United States Patent Application Publication US 2017/0114356 A1 - sequence listing, part 114

SEQ ID NO: 213207 - DNA, 2623 bp, Zea Mays
cagacaagtccagtcctctccctcccctcaacctagcaccgccacttgcgcccaccacgccgccgcaccgccgctggtgaacgaatccgtccatcccgtacaccagccatgtcctgacacactgacacacacctggtggaggaggaggcgctacctccgtccgccggcggtgcaggggaggagccggccatcctcagggcggcgttgggctccggcaagctgcgcatcgaggggtcgctgagcttcaagcgggcgcagaccgcactgcaggtggagaccgagatctccatccggaccgctgccatgcccgcgccgggaccgggacccctacccaggggaacccccgagaggaacacacaacaacgtctcaccagtcagccaccaccgtgctccatttcctttctctctctcggctcctccgctctcttgcccgagtcgctagcttccctgccccgcctcctcccatccccgtggacagacaaccccccacctccgcttccatagcatccgagctaaggtcaactcctccatcggcggagcgagagcggggaagagacgggagggtcccgaatccgagccgagctgcgctccccgcgcgaccgacactcaggtcttgtcgtcccatgcagatctgctcttcctcctgaggccatccatgaatccgtggcacacaggaagttaagattaatctagacatgataatctacaggcttatgagggcttacataagttcatcttctctacggaaatctgcattgagggtaatacttttgtaggttgcttgtactgttttgcaagaatcatcatctttcgtttctgttggatcttggatgatcaataactgaagcctccatttttaagtgtattttattgataatgttttatctgcatcacctagcaaatggttgctttgttttttgatttatgtgatcctcttatgctttttcctcttataaatatatgtagtatgtactgctctgtaaataaaaacactgaatgcctgtggtctgtccgtctgtgcacaatccatgctttctattcagcttaatgcaaatctggtatactctgtgcagatctgttataacaagtgttattcagtatgttccttgcttgcctttcaccttaaaaattagaataaatgatcgtcatatggttgttctatttttccattctactgatccttatttcctgggactgcatttttgttgggatgacattgtttcttgctattattgtgaacaaaggacacttcaagaaactgttatacatgacctgctaattagctatttaagtttttcaggctcttgcaaaggcactgacgacagatcaactcttcaacctaagagagcagtttacattattcggtccaaacaagagtggccatatatcattgcaaaatatgaagacggccttgatgaaaaattcctcgggtgcaatgaatgattctaggattcttgactttgttaactcaatatgcaatatccaatatggcatgattgattttgaagagttctctgctacggccattagtgtatatcaaatggaaggcctggagacctgggaagaacatgctcaacaagcatatgaattgtttgacaaggagggcaaccgaccaattgtgattgaagaacttgcatcggaacttggacttggcccttcgatctcatttcatgttgttctcaaagattggatcagacattcagatggacacccaggaagttgagttgccccttgaccaggaggaatccacctaccgtctggacgaaaaacgatcccatccatggggcagcgccaggtgtaccgaatctttggcacagcgatcagggatctatttcgcaaatgaacggaaagatagcacaattctttttctttttgtgctagtgccagtattgtggaacgaatttataaggtttgtgggttgggctgctaacatttatgttcgaatttggacgcctctctctctctcaggttggaaaggggttgctgaaggacgagaatgctcagaagcttgcgttgcagcactggctggaagcgattgacccgcggcaccggtacggccacaaccttcactgctactacgactgctggctccactccgaaagcaagcaacctttcttctactggccgcacttgaagaaatcttatatcagtttgaggaaaaactccaagctgaaagagaggaagctgctaggaagcaggaagagttgcaagcacaactacaagctcaacaggccgcacttgaagaaaaccaaagtttgctgcgccaggcccaagaggaagtgaaggggatgcataccaagtttgaagagaccaatgcactgctacgagctgtcctgaaacttcagaaagattgaggtagggatgcataccaagtctggggatgatgcctttgcttaaggtttttctaccttgctagaacatatctgtggttagaactttgtcagaactacgtgcaatctgtttgaatgcttcaaacctttgtggtggaacctttgtatgtttgaacctctgttgtggaagaactagtgtgctggaattgtgtatgacttgtgatgagaatgttgtgtatgatggcttttctgtgtattatgattctgtgagctgtcatgagagctcagtgtgt

SEQ ID NO: 213208 - DNA, 1939 bp, Zea Mays
ccgcagacaagtccagtcctctccctcccctcaacctagcaccgccacttgcgcccaccacgccgccgcaccgccgctggtgaacgaatccgtccatcccgtacaccagccatgtcctgacacactgacacacacctggtggaggaggaggcgctacctccgtccgccggcggtgcaggggaggagccggccatcctcagggcggcgttgggctccggcaagctgcgcatcgaggggtcgctgagcttcaagcgggcgcagaccgcactgcaggtggagaccgagatctccatccggaccgctgccatgcccgcgccgggaccgggacccctacccaggggaacccccgagaggaacacacaacaacgtctcaccagtcagccaccaccgtgctccatttcctttctctctctcggctcctccgctctcttgcccgagtcgctagcttccctgccccgcctcctcccatccccgtggacagacaaccccccacctccgcttccatagcatccgagctaaggtcaactcctccatcggcggagcgagagcggggaagagacgggagggtcccgaatccgagccgagctgcgctccccgcgcgaccgacactcaggtcttgtcgtcccatgcagatctgctcttcctcctgaggccatccatgaatccgtggcacacaggaagttaagattaatctagacatgataatctacaggcttatgagggcttacataagttcatcttctctacggaaatctgcattgagggctcttgcaaaggcactgacgacagatcaactcttcaacctaagagagcagtttacattattcggtccaaacaagagtggccatatatcattgcaaaatatgaagacggccttgatgaaaaattcctcgggtgcaatgaatgattctaggattcttgactttgttaactcaatatgcaatatccaatatggcatgattgattttgaagagttctctgctacggccattagtgtatatcaaatggaaggcctggagacctgggaagaacatgctcaacaagcatatgaattgtttgacaaggagggcaaccgaccaattgtgattgaagaacttgcatcggaacttggacttggcccttcgatctcatttcatgttgttctcaaagattggatcagacattcagatggacacccaggaagttgagttgccccttgaccaggaggaatccacctaccgtctggacgaaaaacgatcccatccatggggcagcgccaggtgtaccgaatctttggcacagcgatcagggatctatttcgcaaatgaacggaaagatagcacaattctttttctttttgtgctagtgccagtattgtggaacgaatttataaggttggaaaggggttgctgaaggacgagaatgctcagaagcttgcgttgcagcactggctggaagcggccgcacttgaagaaatcttatatcagtttgaggaaaaactccaagctgaaagagaggaagctgctaggaagcaggaagagttgcaagcacaactacaagctcaacaggccgcacttgaagaaaaccaaagtttgctgcgccaggcccaagaggaagtgaaggggatgcataccaagtttgaagagaccaatgcactgctacgagctgtcctgaaacttcagaaagattgaggtagggatgcataccaagtctggggatgatgcctttgcttaaggtttttctaccttgctagaacatatctgtggttagaactttgtcagaactacgtgcaatctgtttgaatgcttcaaacctttgtggtggaacctttgtatgtttgaacctctgttgtggaagaactagtgtgctggaattgtgtatgacttgtgatgagaatgttgtgtatgatggcttttctgtgtattatgattctgtgagctgtcatgagagctcagtgtgt

SEQ ID NO: 213209 - DNA, 1988 bp, Zea Mays
ccgcagacaagtccagtcctctccctcccctcaacctagcaccgccacttgcgcccaccacgccgccgcaccgccgctggtgaacgaatccgtccatcccgtacaccagccatgtcctgacacactgacacacacctggtggaggaggaggcgctacctccgtccgccggcggtgcaggggaggagccggccatcctcagggcggcgttgggctccggcaagctgcgcatcgaggggtcgctgagcttcaagcgggcgcagaccgcactgcaggtggagaccgagatctccatccggaccgctgccatgcccgcgccgggaccgggacccctacccaggggaacccccgagaggaacacacaacaacgtctcaccagtcagccaccaccgtgctccatttcctttctctctctcggctcctccgctctcttgcccgagtcgctagcttccctgccccgcctcctcccatccccgtggacagacaaccccccacctccgcttccatagcatccgagctaaggtcaactcctccatcggcggagcgagagcggggaagagacgggagggtcccgaatccgagccgagctgcgctccccgcgcgaccgacactcaggtcttgtcgtcccatgcagatctgctcttcctcctgagataaagtgaccctgaccccttctttcttatacattggaaattacaggccatccatgaatccgtggcacacaggaagttaagattaatctagacatgataatctacaggcttatgagggcttacataagttcatcttctctacggaaatctgcattgagggctcttgcaaaggcactgacgacagatcaactcttcaacctaagagagcagtttacattattcggtccaaacaagagtggccatatatcattgcaaaatatgaagacggccttgatgaaaaattcctcgggtgcaatgaatgattctaggattcttgactttgttaactcaatatgcaatatccaatatggcatgattgattttgaagagttctctgctacggccattagtgtatatcaaatggaaggcctggagacctgggaagaacatgctcaacaagcatatgaattgtttgacaaggagggcaaccgaccaattgtgattgaagaacttgcatcggaacttggacttggcccttcgatctcatttcatgttgttctcaaagattggatcagacattcagatggacacccaggaagttgagttgccccttgaccaggaggaatccacctaccgtctggacgaaaaacgatcccatccatggggcagcgccagtgccagtattgtggaacgaatttataaggttggaaaggggttgctgaaggacgagaatgctcagaagcttgcgttgcagcactggctggaagcgattgacccgcggcaccggtacggccacaaccttcactgctactacgactgctggctccactccgaaagcaagcaacctttcttctactggccgcacttgaagaaatcttatatcagtttgaggaaaaactccaagctgaaagagaggaagctgctaggaagcaggaagagttgcaagcacaactacaagctcaacaggccgcacttgaagaaaaccaaagtttgctgcgccaggcccaagaggaagtgaaggggatgcataccaagtttgaagagaccaatgcactgctacgagctgtcctgaaacttcagaaagattgaggtagggatgcataccaagtctggggatgatgcctttgcttaaggtttttctaccttgctagaacatatctgtggttagaactttgtcagaactacgtgcaatctgtttgaatgcttcaaacctttgtggtggaacctttgtatgtttgaacctctgttgtggaagaactagtgtgctggaattgtgtatgacttgtgatgagaatgttgtgtatgatggcttttctgtgtattatgattctgtgagctgtcatgagagctcagtgtgt

SEQ ID NO: 213210 - DNA, 1942 bp, Zea Mays
ccgcagacaagtccagtcctctccctcccctcaacctagcaccgccacttgcgcccaccacgccgccgcaccgccgctggtgaacgaatccgtccatcccgtacaccagccatgtcctgacacactgacacacacctggtggaggaggaggcgctacctccgtccgccggcggtgcaggggaggagccggccatcctcagggcggcgttgggctccggcaagctgcgcatcgaggggtcgctgagcttcaagcgggcgcagaccgcactgcaggtggagaccgagatctccatccggaccgctgccatgcccgcgccgggaccgggacccctacccaggggaacccccgagaggaacacacaacaacgtctcaccagtcagccaccaccgtgctccatttcctttctctctctcggctcctccgctctcttgcccgagtcgctagcttccctgccccgcctcctcccatccccgtggacagacaaccccccacctccgcttccatagcatccgagctaaggtcaactcctccatcggcggagcgagagcggggaagagacgggagggtcccgaatccgagccgagctgcgctccccgcgcgaccgacactcaggtcttgtcgtcccatgcagatctgctcttcctcctgaggccatccatgaatccgtggcacacaggaagttaagattaatctagacatgataatctacaggcttatgagggcttacataagttcatcttctctacggaaatctgcattgagggctcttgcaaaggcactgacgacagatcaactcttcaacctaagagagcagtttacattattcggtccaaacaagagtggccatatatcattgcaaaatatgaagacggccttgatgaaaaattcctcgggtgcaatgaatgattctaggattcttgactttgttaactcaatatgcaatatccaatatggcatgattgattttgaagagttctctgctacggccattagtgtatatcaaatggaaggcctggagacctgggaagaacatgctcaacaagcatatgaattgtttgacaaggagggcaaccgaccaattgtgattgaagaacttgcatcggaacttggacttggcccttcgatctcatttcatgttgttctcaaagattggatcagacattcagatggacacccaggaagttgagttgccccttgaccaggaggaatccacctaccgtctggacgaaaaacgatcccatccatggggcagcgccagtgccagtattgtggaacgaatttataaggttggaaaggggttgctgaaggacgagaatgctcagaagcttgcgttgcagcactggctggaagcgattgacccgcggcaccggtacggccacaaccttcactgctactacgactgctggctccactccgaaagcaagcaacctttcttctactggccgcacttgaagaaatcttatatcagtttgaggaaaaactccaagctgaaagagaggaagctgctaggaagcaggaagagttgcaagcacaactacaagctcaacaggccgcacttgaagaaaaccaaagtttgctgcgccaggcccaagaggaagtgaaggggatgcataccaagtttgaagagaccaatgcactgctacgagctgtcctgaaacttcagaaagattgaggtagggatgcataccaagtctggggatgatgcctttgcttaaggtttttctaccttgctagaacatatctgtggttagaactttgtcagaactacgtgcaatctgtttgaatgcttcaaacctttgtggtggaacctttgtatgtttgaacctctgttgtggaagaactagtgtgctggaattgtgtatgacttgtgatgagaatgttgtgtatgatggcttttctgtgtattatgattctgtgagctgtcatgagagctcagtgtgt

SEQ ID NO: 213211 - DNA, 2904 bp, Zea Mays
tcttcctcggctcctccaccccggtcctctcctgccgcgtcgcgttcgcccctcgcagcgggcaactcccaccgccgccgcttcgcatccgcccatctgcttccatcgtctcacggaggttttgccgctcgagtttagataagttccttcaatgcatcgtgttgggagtgctggtaacacagctggctcgactcgaccgagaaaagagaagcgcttcacatatgtactcaatgatgctgatgataaaaagcattgtgcggggatcaattgcttggcttatctagatggttccatatttagtacaagtgatcatctttttagcgggagccgtgatggtaccttgaaaagatgggaattaaataatggggatgcaagcttctcaggaactttcgagtctcatgttgattgggttaatgatgccattatagttggagacaagcttgtttcctgctcctcagacactacaataaaggtgtggaattgcttctctgatggtgcctgtaccaggactctccgccggcattctgattacgtgatttgtcttgctgctgctgagaataatagcaatattgtagcctctggtggtcttggtggtgaggttttcatttgggaccttgatgctgctcttgctcctgtagccaaatctgtggatgcaaaagaggatgaggttcctaatggaaactccgggcctgctttgacaacactgtgcagcataaattctagtagcaatattgcttcctctaatggtcaatcacatgggtacagtccaatagctgccaaaggtcacaaagattcagtttacgcactggcgatgaatgatacaggaacccttcttctctctggtggcactgagaaggttgtccgagtgtgggatccgaggacaggatcgaaaaacatgaaattgagagggcacactgacaatatcagagccttgcttgttgattctacagggaggtattgcctatcgggatcatctgattcaatgataagactatgggatctaggacagcagcgttgtgttcattcttatgctgtgcatactgattctgtttgggcacttgcaagcactcctgcatttggtcatgtctacagtggtggaagagatcaatctgtatacctaacagatttgtccacaagagagagtcttttactctgcacaaatgaataccctgttctacagttgtctctgcaagatgacacaatatgggtggcaacaactgattcttctgtttatggatggccagctgaagggcgcacaccccaaaaagtcttcgaaaagggtgcctcattcttagctgggaatttgtcattctcaagggcaagagcatctttagaaggatcggcacctgtccctgtatacaaagagccatcttttgttatcccaggagttccagcaataattcaacatgaaataatgaataatagaagacatgtactgacaaaggataccactggttcagtcaaattgtgggagatcactcggggtgctgttattgaagattttggcaaggtttctttcgaagacaagaaaaaagagttgtttgagatggtaagcatacctgcttggttcaccatggatgctcgattagggtgcttgtctgtccacctggatactccacaatgcttttctgcagaaatatatgcggttgacctaaatgttgctggagcacaagaagatctcaagattaatttggctcaagagacccttcgtggtttgctaattcattggagtaaaagaaagcagaaatctagttcacacagcttgtgtaatggtgatagttcaatagggaaagatgttccgtcgaaagactcgccccggtcaagacctgaggtcgacgatgccactcaaaaccatgcaactcatgtgcttccatcatttgagttttctacagtttcacctccatcaattatcacggaaggttctagtggagggccatggagaaagagaattaccgatttggatgtaactgagggtgatcttccatggtggtgtgtggactgcattactctcaatcgatatccaaaggagaatacaaaatgcgggttttatttacaccctgctgaaggctcgcctgcaccaaacataactcaagggaagcttagtgctccacggatattgcgaattcacaaggtagctaactatgtggttgagaaactcgttcttgacaaaccattggatggaggctctgatgcgtttgttatgggattgagttctgctcaatcacagctctcagttctagatagttcttcgcggcttggactaaagccatggcaaaaaacaaagccatgtattgagatattgtgcaataaccaggttctatcaccagagatgagtttggctactgtgcgaacatatatatggaaaaagccagaagatttgattcttcattacagagtggtccaaccgagatgatcacggcttcagatcacatggttctcagcatgcctgcaccataaacggtgtggttgaagacacccttggcttagcgaggaaaccgtcagaaatattttgctcttgggctccggtagcctttctcctagaatcccgacttcgtttgcttctttgtaaagttccttcctgatcttgccctggtagtaagatgtatcatagcacaggtataaggccctctgcttgtacatgtagaagatttgggtgcttaataaaggtcaaatggatttttttcgtttttctttgataaagtttgtaagaaaacgggctggttctcggctcagaccgtgacgttccgacgtcgattattggatttaaccctgtcgcatcctcttggttctgttagcgtaagaggtggacgggatgtcgggagcaataaagctgtttttttatatatgttgctgtctttcgactgtgctgttcagctgcgacgaattacaaaggctgtagactcg

SEQ ID NO: 213212 - DNA, 2490 bp, Zea Mays
acaataaaggactctccgccggcattctgattacgtgatttgtcttgctgctgctgagaataatagcaatattgtagcctctggtggtcttggtggtgaggttttcatttgggaccttgatgctgctcttgctcctgtagccaaatctgtggatgcaaaagaggatgaggttcctaatggaaactccgggcctgctttgacaacactgtgcagcataaattctagtagcaatattgcttcctctaatggtcaatcacatgggtacagtccaatagctgccaaaggtcacaaagattcagtttacgcactggcgatgaatgatacaggaacccttcttctctctggtggcactgagaaggttgtccgagtgtgggatccgaggacaggatcgaaaaacatgaaattgagagggcacactgacaatatcagagccttgcttgttgattctacagggaggtattgcctatcgggatcatctgattcaatgataagactatgggatctaggacagcagcgttgtgttcattcttatgctgtgcatactgattctgtttgggcacttgcaagcactcctgcatttggtcatgtctacagtggtggaagagatcaatctgtatacctaacagatttgtccacaagagagagtcttttactctgcacaaatgaataccctgttctacagttgtctctgcaagatgacacaatatgggtggcaacaactgattcttctgtttatggatggccagctgaagggcgcacaccccaaaaagtcttcgaaaagggtgcctcattcttagctgggaatttgtcattctcaagggcaagagcatctttagaaggatcggcacctgtccctgtatacaaagagccatcttttgttatcccaggagttccagcaataattcaacatgaaataatgaataatagaagacatgtactgacaaaggataccactggttcagtcaaattgtgggagatcactcggggtgctgttattgaagattttggcaaggtttctttcgaagacaagaaaaaagagttgtttgagatggtattactgaaatatgtcatgatttctatgttttattaaaaagtttggtacctactactgtgtaatttgttaattgattattaggtaagcatacctgcttggttcaccatggatgctcgattagggtgcttgtctgtccacctggatactccacaatgcttttctgcagaaatatatgcggttgacctaaatgttgctggagcacaagaagatctcaagattaatttggctcaagagacccttcgtggtttgctaattcattggagtaaaagaaagcagaaatctagttcacacagcttgtgtaatggtgatagttcaatagggaaagatgttccgtcgaaagactcgccccggtcaagacctgaggtcgacgatgccactcaaaaccatgcaactcatgtgcttccatcatttgagttttctacagtttcacctccatcaattatcacggaaggttctagtggagggccatggagaaagagaattaccgatttggatgtaactgagggtgatcttccatggtggtgtgtggactgcattactctcaatcgatatccaaaggagaatacaaaatgcgggttttatttacaccctgctgaaggctcgcctgcaccaaacataactcaagggaagcttagtgctccacggatattgcgaattcacaaggtagctaactatgtggttgagaaactcgttcttgacaaaccattggatggaggctctgatgcgtttgttatgggattgagttctgctcaatcacagctctcagttctagatagttcttcgcggcttggactaaagccatggcaaaaaacaaagccatgtattgagatattgtgcaataaccaggttctatcaccagagatgagtttggctactgtgcgaacatatatatggaaaaagccagaagatttgattcttcattacagagtggtccaaccgagatgatcacggcttcagatcacatggttctcagcatgcctgcaccataaacggtgtggttgaagacacccttggcttagcgaggaaaccgtcagaaatattttgctcttgggctccggtagcctttctcctagaatcccgacttcgtttgcttctttgtaaagttccttcctgatcttgccctggtagtaagatgtatcatagcacaggtataaggccctctgcttgtacatgtagaagatttgggtgcttaataaaggtcaaatggatttttttcgtttttctttgataaagtttgtaagaaaacgggctggttctcggctcagaccgtgacgttccgacgtcgattattggatttaaccctgtcgcatcctcttggttctgttagcgtaagaggtggacgggatgtcgggagcaataaagctgtttttttatatatgttgctgtctttcgactgtgctgttcagctgcgacgaattacaaaggctgtagactcg

SEQ ID NO: 213213 - DNA, 1157 bp, Zea Mays
tgcgcgccgaccggtcggaccggaaccggaagattctcgcgtccggagtctgcgtctccattctccaccttcttcaaaggttcaactcagagaggagagaactagagaaagatccccacccccaggcgacgcgaccggcgagccccgaaaccctaggtcgcgcgacccgggcagcgcgcttctgcgtgactgcgtgtctttcggggaggggacagcgttaggacgcgacgaggttagcgaggccgtctggccgactataagcggaagaatctcctccgaagccttcctagagctgtgaagagcgcgtggatctcctggatttgcagactcgaggggagctgagacaagatggtgtgtttgttggagggtggccttcttcagttgaacacctgccaccaggtgaccccgcgatcatagattgcacgtgcgagctgccaaaaagctcgactatctctaacaatgcatatttgtgcattgctacctgggacacgagggctcctcagccatcacagattgagtctgccgtgcaatgggctgtgagaaagcggtcacagaacaagcctgtctatgtccactgtgcctatggtcatggcagaagtgtctgtgtgatgtgtgcgcttcttgtcgcattagggttcgctgaagattggaaagctgctgcacaaatgatccgtgagaagcgaccttctattagcatgaatactcttcaccgcaaaagcttggaggaatggtcaaaacatttgctctcctctaaaagaagtggggaatcagatcaaccgcctaattcagctgtccatggcagatgatattggaagcagagttgattttggaattttgagcctactgataagtgataagttgatctcaaataatgtgaaaattgcttctcctttccttcatttgtccatcgatcgctctggtcttgcatcttacaatttacttgtcagtttatgtaagattcctattgctgtttttacatgtgttgcacaatattgatatttcttgctatgcactccccatgtttcattctaaattataattcgtttatgtatctagaaaagtcaaaacgacttatatataatttaggagggtgcataatattttctagttgtttcactatcggcgcttctttaccgtcacagtttcgttcttttcca

SEQ ID NO: 213214 - DNA, 1615 bp, Zea Mays
acacgctcacgaataaagttaagttccaagctgcatatggaaaacccttgctagctgccaaagattctaaatgttcagcaaaggatgctgaagctggtattcttgcaatggaggcactgcataagcaggtcatgccgtttctactgagaagaacaaaggatgaagttttatctgatcttccagagaagataatccaggatagatattgtgatctcagtctattgcagctcaaactttatgacaaattttccagctccaatgcaaaagacgagatttcaactatagtaaaagcaaatgaactggaggaatctgcacctcaaccaaaggcaactcggcatgtgtttcaggcattgcagtacctattaaaactatgcagccatcccttgcttgtaactggggagaaccccccaaatcatcttgtggatcttctgaatgaaataggtctgggatctggcagtgagcttcatgagcttcaccactcacctaagcttgttgctcttcaagaaatacttcaagaatgtggtatagggtcagaaatatctagtcctgatgcttctacagctgttgggcaacacagagttttgatttttgctcagcataaggcttttcttgacatcatagagaaggacctgtttcaatctcatatgagaagtgtcacatatttgcggctggatggctctgttgatccagagaagagatttgaaatcgttaaagcattcaattcagacccaaccattgatgtacttctgctaacaacccatgtcggtgggcttggcttgaacttgacatctgccgacacattggtgttcgtggaacatgattggaacccaatgaaggaccttcaggctatggacagagcacatcgattgggtcaaaggaaagtggtgaatgttcaccgtctcatcatgcgtggcacccttgaggagaaggtgatgtctctccagaggttcaaggtgtcagtcgccaatgctgtcatcaatgctgagaactcgagcttgaagaccatgaacactgaccagctgcttgatctgttcacatcaacccctgcttcaagaaaagcaagcgacgagcagagtaagaggaaatctggtggcaaaggcttgaagtccattcttaatggtctggatgagctttgggatcagtcgcagtatgccgatgagtatgatctgaaccagttcctggcgaagctgaacggctgagccaccaccggctggctcgtgtacagtgtataaagcaatttggggcaggttaattttgttgttgctgttgtttgatagaggaaggaaaagattagatgctaacagatataggtggtggttggggttacgatctcaatttttttggtttccatcttcctcaatttttgttttgaggagttgtatatactctgctcacctataatcaaagctgcagctcttatcagaatttcccttgattggtcatggtgactgttccatgtactttgttctgccgcggccgtagctatatggactgctgcagctgcaattcatagaaacaaaatacttcatagaaacaaaatattgtagaagccgcatttggattaaagacgcggcaagtcgcagcgaacctggaaaggtgaatgctgatatgcttg

SEQ ID NO: 213215 - DNA, 6066 bp, Zea Mays
caccacggctcagatatatttgattttctctgagactggaggactggatttatgtgagcagtttatggatgttaatgacgttatcaaagacgaggatcttcttgcccaaaaaaattattggggttcacatgtacagaataatggattccattcatttaattcaggtcataatattcagcagttggtttctaccatggtccccaggtatcccaagcattctaattttcgctctagacgattaagtgccagggagttaaatatgctgaagcgtaaagcaaagagtaatgcaaaagatcatacaaaggctgtatctgaggatgatgaggttacactgaaaggatctgtgccctccaatggagcttcttctgaacaagctggtgcacaaaatggtgtatttgatacagctgtcgaagaagacaatctggagtacaatgagaacggaagatggccttttcaacaatttgtggatcagcttattcatgatatgtttgatcctatttgggaagttcgccatggcaccattatggctttaagggaaattttgacacatcatggtgcttgtgctggagtatattttcctgatctgagcttgccttcctctgacttggatggtaaaaccaactttgactcccttaaaagggaacatggtatcgatctaaacgaagatgtccatttggaacaccttgaaccagcattaaagaagcataagaaagagccaaaatgtgctgaaagtatgatggattgtgataaggagttggttgacagtgattatctaaaaacggaaggagatctgagcaatgtgcctgatgtattaactgccgaaccaaattctactcatgtaaaagttgagcctgagttctgtgttgatgattcagctgacccctctaaaggcgtttcgacatgtaaatcacagaaaaaactcaactccatatcacatctgagttctcatattcttgctccagaaagttcaaaattcatgaaactgatgaaactagccaaatactcatatatgaagaattgggaatttcttcaggattgtgcaatccgcttcctttgtgtgctttcactggaccgctttggtgattatgtatccgatcaagttgtcgccccagttcgtgaaacttgtgctcaagctcttggtgctgtgctgaagtacatgcacccttctttagtatgtcatacattcaaaatcttgctgcagatgcagcacagacaagagtgggaagttcgtcatgggagccttcttggcattaaatacttagttgctgttcgccaggaaatgcttaaagatttgcttgactatatcattcatgcttgtaaagctggtctggaggaccctgatgatgatgtccgagcagtggctgcagaagccctgattccagctgccgactctttagttaggctaaatgaccaaattttgcatccaattgtggtgttgctttgggatatactgcttgaccttgacgatttaagcccatctacaagcagtgtaatgaacttgttagcagaaatatattctcaaccagagatggtcccaaagatgcttggcacagcagcttcaggggaaaagggagaatttgatctaaacgaagcaactcagattgctgagcaagaagacgaactaacatctattgaaaacccttacggtctagctacactgacaccccggctgtggccctttatgagacatagtattacttctgttcggcgttccgccatacgaacactggagaagcttcttgaggttggcaacactaggagttctgctggaacaaccccatctaaactctggccaacatcaatattaggtgatgcactgcaggttgtatttcagaacctacttttggagtcaaatgatgatattcttcagtcttctgaaagggcttggaaacttctacttcagtgccctgagaaggaccttgaatatgctgcaaggttatattttagtaattgggtacaacttgctaccactccatttggctcagcattggattctacaaaaatgtttttaccagttgcccttccacgaggaaatcgttcgagagctgctgcaaagattagatctgctaggctagaacatgagtacacaacaatgatctcgtttggttctacaggggaaagtatttcacatgaaaagcattcggacgttccctctattttttcgaatataattgttggctctgatcctgacaaatctgttactcatacacgggttcttacgtcaatggcccttgggctttttgcctctaagttgcccgtaagctcatggcaagtggttttaagtccactagcaaatcacctcatgtctctctcaggagtccagagacaagtggcttcaatgatcatcgtttcttggttcaaagatctgagaggcagagatcctgtatcagtgggtacattgctagcttttctatcttccttgaaagagtggctggtggacttattgacttgctctgatccagcattacccacaaaaggttctgtgcttccatattctgaactttcaaggacatacacgaagatgcgcaatgaagccaataatttgctccacttaatcgattcatgtgctgctttcaaagattatagtagcagcttaaaccttaacactgacgtgctgactgttgatgatgctatcaactttgcatcaaagcttttgttaccatctgaatctgatattccttcagaaactgagaacattttcttgaataacatagaatcagcaaaacaaggcctattgtctacatcaggttacttgaaatgtgttcagaataatttgcatgtgacagtctgttctttggtggcttctgctgtagtttggatgtcatgtttgcccagcaagttgaaccctgttattttacctttaatggctgccattaaaagagaacaggaggaagtacttcaagataaagctgctgatgcacttgctgagcttatatttagctgcattggccgcaagcctggccccaatgacaagctaaccaagaatctctgcactctaacatgcactgatgctagtgagacacctcaagctgcaataatcaactcaatgcaggttattgaggaccagaatttgctatcgattggaaagcgttttagcagtcatagatccaggggccatacaacgtctggtggcgatgaaaggtcaaaaatggagggttttataagccggcgtggatcagagttggctttcaagcatctctgtgtgaaatttggaccttcattgtttgaaaaccttcccaagttatgggattgccttactgagtttcttagacctgtaaaaacagaagatggtattccggaagatgatgcaagtattgcacagctgggcagatcgtatgaggataaggacccacagtcactcattaataatatccaggtcgttcgttccatttcacctcacttggctgagcccttaaggcctcaactgctaaatctccttccctctattcttgggtgtgttcgtcatcctcatgtggctgttagactagctgctgcaagatgcatcacatctatggcaaagtcattgaccgatgatgtgatggtactggtgatagaaaatgtcatcccaatgttgtccgatttatcttctgtctgtgcaagacaaggagctgggattctgttaagccttcttgttcagggtttggctgtggagttggttccttatgctcctttccttgtcgttcctcttctgaagtgtatgagtgacccagatggttctgttaggcagactgtgactcacagttttgctgctcttgttcctttgctgccattatcaaggggtgcttctttaccatgtggactaagtgaacgcttatctagcagtgctgaagatgtgcaatttctggaacagctccttgacaatacccaaattgatgatttcaagcttaatattgatcttaatgttgaactacgaaggtatcagcaagaagggatcaactggcttgcattcctccgtcggtttaagttacatggaattttatgtgatgacatggggctcggtaagacgctccaagcatctgctattgtagcaagtgacattgcagaagcacgtgcacggaatgatgaaaaaattctgacatctttgattatctgcccttctacattagtggcccactgggaatatgaaatagagaagtacatagacagctctatcttgaaacctcttcagtacgttggttcttctcaggacagagtgacactccgtagtcagtttgataaggttaatgttatcataacatcatatgatattatacggaaggatattgattttcttggaaatatcacttggaactattgtgttctggatgaagggcatataataaaaaactcaaggtctaaaataacgtttgctgtgaaacagctgaaagcgcaacaccgtcttatcttgagtggcacacctattcagaataatgtgttggagttatggtctttatttgacttccttatgcctgggtttcttggaacagaaaaacaattccaagctgcatatggaaaacccttgctagctgccaaagattctaaatgttcagcaaaggatgctgaagctggtattcttgcaatggaggcactgcataagcaggtcatgccgtttctactgagaagaacaaaggatgaagttttatctgatcttccagagaagataatccaggatagatattgtgatctcagtctattgcagctcaaactttatgacaaattttccagctccaatgcaaaagacgagatttcaactatagtaaaagcaaatgaactggaggaatctgcacctcaaccaaaggcaactcggcatgtgtttcaggcattgcagtacctattaaaactatgcagccatcccttgcttgtaactggggagaaccccccaaatcatcttgtggatcttctgaatgaaataggtctgggatctggcagtgagcttcatgagcttcaccactcacctaagcttgttgctcttcaagaaatacttcaagaatgtggtatagggtcagaaatatctagtcctgatgcttctacagctgttgggcaacacagagttttgatttttgctcagcataaggcttttcttgacatcatagagaaggacctgtttcaatctcatatgagaagtgtcacatatttgcggctggatggctctgttgatccagagaagagatttgaaatcgttaaagcattcaattcagacccaaccattgatgtacttctgctaacaacccatgtcggtgggcttggcttgaacttgacatctgccgacacattggtgttcgtggaacatgattggaacccaatgaaggaccttcaggctatggacagagcacatcgattgggtcaaaggaaagtggtgaatgttcaccgtctcatcatgcgtggcacccttgaggagaaggtgatgtctctccagaggttcaaggtgtcagtcgccaatgctgtcatcaatgctgagaactcgagcttgaagaccatgaacactgaccagctgcttgatctgttcacatcaacccctgcttcaagaaaagcaagcgacgagcagagtaagaggaaatctggtggcaaaggcttgaagtccattcttaatggtctggatgagctttgggatcagtcgcagtatgccgatgagtatgatctgaaccagttcctggcgaagctgaacggctgagccaccaccggctggctcgtgtacagtgtataaagcaatttggggcaggttaattttgttgttgctgttgtttgatagaggaaggaaaagattagatgctaacagatataggtggtggttggggttacgatctcaatttttttggtttccatcttcctcaatttttgttttgaggagttgtatatactctgctcacctataatcaaagctgcagctcttatcagaatttcccttgattggtcatggtgactgttccatgtactttgttctgccgcggccgtagctatatggactgctgcagctgcaattcatagaaacaaaatacttcatagaaacaaaatattgtagaagccgcatttggattaaagacgcggcaagtcgcagcgaacctggaaaggtgaatgctgatatgcttg

SEQ ID NO: 213216 - DNA, 4495 bp, Zea Mays
ctggtgtgcacttctattacattacatgcatgtggagtaatttacctacggcagattgctgactaaaggcgctgaagtaaaccttccctcagtatacttcctcggatgtcacgtctgcccctctgcgtcatttatggctcagaactcgtcccgtcttcaccgcctcctcacattactagacactggttcgacacaagcaacgaggtttgcggctgcacgccaaattggagaaatcgccaagtcccacccccaggagctgaattcgttgctaaaaaaggtttctcaatatattcgtagtaaaaattgggacacgagggttgcggcagcccatgcgattggtgccatagcagagaatgtcaaacacacatcattgaaggacttgtatgcttccgtgcaagcagaaaaacatgcttccggtttctctgatggaagtgatgatgctggctcagcattgccacggactgatagtgcagcaacatctgatcttgcttttggaagctttgacataggcagggtattggaatttggatctcctctattggcatcaggtggacaggaatacgacattgctgatagtggcaagaatccagcagagcgtctagctcgccaaaagaaaaatctccggcgtcgtttaggactggatttatgtgagcagtttatggatgttaatgacgttatcaaagacgaggatcttcttgcccaaaaaaattattggggttcacatgtacagaataatggattccattcatttaattcaggtggcttcaatgatcatcgtttcttggttcaaagatctgagaggcagagatcctgtatcagtgggtacattgctagcttttctatcttccttgaaagagtggctggtggacttattgacttgctctgatccagcattacccacaaaaggttctgtgcttccatattctgaactttcaaggacatacacgaagatgcgcaatgaagccaataatttgctccacttaatcgattcatgtgctgctttcaaagattatagtagcagcttaaaccttaacactgacgtgctgactgttgatgatgctatcaactttgcatcaaagcttttgttaccatctgaatctgatattccttcagaaactgagaacattttcttgaataacatagaatcagcaaaacaaggcctattgtctacatcaggttacttgaaatgtgttcagaataatttgcatgtgacagtctgttctttggtggcttctgctgtagtttggatgtcatgtttgcccagcaagttgaaccctgttattttacctttaatggctgccattaaaagagaacaggaggaagtacttcaagataaagctgctgatgcacttgctgagcttatatttagctgcattggccgcaagcctggccccaatgacaagctaaccaagaatctctgcactctaacatgcactgatgctagtgagacacctcaagctgcaataatcaactcaatgcaggttattgaggaccagaatttgctatcgattggaaagcgttttagcagtcatagatccaggggccatacaacgtctggtggcgatgaaaggtcaaaaatggagggttttataagccggcgtggatcagagttggctttcaagcatctctgtgtgaaatttggaccttcattgtttgaaaaccttcccaagttatgggattgccttactgagtttcttagacctgtaaaaacagaagatggtattccggaagatgatgcaagtattgcacagctgggcagatcgtatgaggataaggacccacagtcactcattaataatatccaggtcgttcgttccatttcacctcacttggctgagcccttaaggcctcaactgctaaatctccttccctctattcttgggtgtgttcgtcatcctcatgtggctgttagactagctgctgcaagatgcatcacatctatggcaaagtcattgaccgatgatgtgatggtactggtgatagaaaatgtcatcccaatgttgtccgatttatcttctgtctgtgcaagacaaggagctgggattctgttaagccttcttgttcagggtttggctgtggagttggttccttatgctcctttccttgtcgttcctcttctgaagtgtatgagtgacccagatggttctgttaggcagactgtgactcacagttttgctgctcttgttcctttgctgccattatcaaggggtgcttctttaccatgtggactaagtgaacgcttatctagcagtgctgaagatgtgcaatttctggaacagctccttgacaatacccaaattgatgatttcaagcttaatattgatcttaatgttgaactacgaaggtatcagcaagaagggatcaactggcttgcattcctccgtcggtttaagttacatggaattttatgtgatgacatggggctcggtaagacgctccaagcatctgctattgtagcaagtgacattgcagaagcacgtgcacggaatgatgaaaaaattctgacatctttgattatctgcccttctacattagtggcccactgggaatatgaaatagagaagtacatagacagctctatcttgaaacctcttcagtacgttggttcttctcaggacagagtgacactccgtagtcagtttgataaggttaatgttatcataacatcatatgatattatacggaaggatattgattttcttggaaatatcacttggaactattgtgttctggatgaagggcatataataaaaaactcaaggtctaaaataacgtttgctgtgaaacagctgaaagcgcaacaccgtcttatcttgagtggcacacctattcagaataatgtgttggagttatggtctttatttgacttccttatgcctgggtttcttggaacagaaaaacaattccaagctgcatatggaaaacccttgctagctgccaaagattctaaatgttcagcaaaggatgctgaagctggtattcttgcaatggaggcactgcataagcaggtcatgccgtttctactgagaagaacaaaggatgaagttttatctgatcttccagagaagataatccaggatagatattgtgatctcagtctattgcagctcaaactttatgacaaattttccagctccaatgcaaaagacgagatttcaactatagtaaaagcaaatgaactggaggaatctgcacctcaaccaaaggcaactcggcatgtgtttcaggcattgcagtacctattaaaactatgcagccatcccttgcttgtaactggggagaaccccccaaatcatcttgtggatcttctgaatgaaataggtctgggatctggcagtgagcttcatgagcttcaccactcacctaagcttgttgctcttcaagaaatacttcaagaatgtggtatagggtcagaaatatctagtcctgatgcttctacagctgttgggcaacacagagttttgatttttgctcagcataaggcttttcttgacatcatagagaaggacctgtttcaatctcatatgagaagtgtcacatatttgcggctggatggctctgttgatccagagaagagatttgaaatcgttaaagcattcaattcagacccaaccattgatgtacttctgctaacaacccatgtcggtgggcttggcttgaacttgacatctgccgacacattggtgttcgtggaacatgattggaacccaatgaaggaccttcaggctatggacagagcacatcgattgggtcaaaggaaagtggtgaatgttcaccgtctcatcatgcgtggcacccttgaggagaaggtgatgtctctccagaggttcaaggtgtcagtcgccaatgctgtcatcaatgctgagaactcgagcttgaagaccatgaacactgaccagctgcttgatctgttcacatcaacccctgcttcaagaaaagcaagcgacgagcagagtaagaggaaatctggtggcaaaggcttgaagtccattcttaatggtctggatgagctttgggatcagtcgcagtatgccgatgagtatgatctgaaccagttcctggcgaagctgaacggctgagccaccaccggctggctcgtgtacagtgtataaagcaatttggggcaggttaattttgttgttgctgttgtttgatagaggaaggaaaagattagatgctaacagatataggtggtggttggggttacgatctcaatttttttggtttccatcttcctcaatttttgttttgaggagttgtatatactctgctcacctataatcaaagctgcagctcttatcagaatttcccttgattggtcatggtgactgttccatgtactttgttctgccgcggccgtagctatatggactgctgcagctgcaattcatagaaacaaaatacttcatagaaacaaaatattgtagaagccgcatttggattaaagacgcggcaagtcgcagcgaacctggaaaggtgaatgctgatatgcttg

SEQ ID NO: 213217 - DNA, 6673 bp, Zea Mays
gtaggatctcatgcccgaattattcaagctggtgtgcacttctattacattacatgcatgtggagtaatttacctacggcagattgctgactaaaggcgctgaagtaaaccttccctcagtatacttcctcggatgtcacgtctgcccctctgcgtcatttatggctcagaactcgtcccgtcttcaccgcctcctcacattactagacactggttcgacacaagcaacgaggtttgcggctgcacgccaaattggagaaatcgccaagtcccacccccaggagctgaattcgttgctaaaaaaggtttctcaatatattcgtagtaaaaattgggacacgagggttgcggcagcccatgcgattggtgccatagcagagaatgtcaaacacacatcattgaaggacttgtatgcttccgtgcaagcagaaaaacatgcttccggtttctctgatggaagtgatgatgctggctcagcattgccacggactgatagtgcagcaacatctgatcttgcttttggaagctttgacataggcagggtattggaatttggatctcctctattggcatcaggtggacaggaatacgacattgctgatagtggcaagaatccagcagagcgtctagctcgccaaaagaaaaatctccggcgtcgtttaggactggatttatgtgagcagtttatggatgttaatgacgttatcaaagacgaggatcttcttgcccaaaaaaattattggggttcacatgtacagaataatggattccattcatttaattcaggtcataatattcagcagttggtttctaccatggtccccaggtatcccaagcattctaattttcgctctagacgattaagtgccagggagttaaatatgctgaagcgtaaagcaaagagtaatgcaaaagatcatacaaaggctgtatctgaggatgatgaggttacactgaaaggatctgtgccctccaatggagcttcttctgaacaaggtgtatttgatacagctgtcgaagaagacaatctggagtacaatgagaacggaagatggccttttcaacaatttgtggatcagcttattcatgatatgtttgatcctatttgggaagttcgccatggcaccattatggctttaagggaaattttgacacatcatggtgcttgtgctggagtatattttcctgatctgagcttgccttcctctgacttggatggtaaaaccaactttgactcccttaaaagggaacatggtatcgatctaaacgaagatgtccatttggaacaccttgaaccagcattaaagaagcataagaaagagccaaaatgtgctgaaagtatgatggattgtgataaggagttggttgacagtgattatctaaaaacggaaggagatctgagcaatgtgcctgatgtattaactgccgaaccaaattctactcatgtaaaagttgagcctgagttctgtgttgatgattcagctgacccctctaaaggcgtttcgacatgtaaatcacagaaaaaactcaactccatatcacatctgagttctcatattcttgctccagaaagttcaaaattcatgaaactgatgaaactagccaaatactcatatatgaagaattgggaatttcttcaggattgtgcaatccgcttcctttgtgtgctttcactggaccgctttggtgattatgtatccgatcaagttgtcgccccagttcgtgaaacttgtgctcaagctcttggtgctgtgctgaagtacatgcacccttctttagtatgtcatacattcaaaatcttgctgcagatgcagcacagacaagagtgggaagttcgtcatgggagccttcttggcattaaatacttagttgctgttcgccaggaaatgcttaaagatttgcttgactatatcattcatgcttgtaaagctggtctggaggaccctgatgatgatgtccgagcagtggctgcagaagccctgattccagctgccgactctttagttaggctaaatgaccaaattttgcatccaattgtggtgttgctttgggatatactgcttgaccttgacgatttaagcccatctacaagcagtgtaatgaacttgttagcagaaatatattctcaaccagagatggtcccaaagatgcttggcacagcagcttcaggggaaaagggagaatttgatctaaacgaagcaactcagattgctgagcaagaagacgaactaacatctattgaaaacccttacggtctagctacactgacaccccggctgtggccctttatgagacatagtattacttctgttcggcgttccgccatacgaacactggagaagcttcttgaggttggcaacactaggagttctgctggaacaaccccatctaaactctggccaacatcaatattaggtgatgcactgcaggttgtatttcagaacctacttttggagtcaaatgatgatattcttcagtcttctgaaagggcttggaaacttctacttcagtgccctgagaaggaccttgaatatgctgcaaggttatattttagtaattgggtacaacttgctaccactccatttggctcagcattggattctacaaaaatgtttttaccagttgcccttccacgaggaaatcgttcgagagctgctgcaaagattagatctgctaggctagaacatgagtacacaacaatgatctcgtttggttctacaggggaaagtatttcacatgaaaagcattcggacgttccctctattttttcgaatataattgttggctctgatcctgacaaatctgttactcatacacgggttcttacgtcaatggcccttgggctttttgcctctaagttgcccgtaagctcatggcaagtggttttaagtccactagcaaatcacctcatgtctctctcaggagtccagagacaagtggcttcaatgatcatcgtttcttggttcaaagatctgagaggcagagatcctgtatcagtgggtacattgctagcttttctatcttccttgaaagagtggctggtggacttattgacttgctctgatccagcattacccacaaaaggttctgtgcttccatattctgaactttcaaggacatacacgaagatgcgcaatgaagccaataatttgctccacttaatcgattcatgtgctgctttcaaagattatagtagcagcttaaaccttaacactgacgtgctgactgttgatgatgctatcaactttgcatcaaagcttttgttaccatctgaatctgatattccttcagaaactgagaacattttcttgaataacatagaatcagcaaaacaaggcctattgtctacatcaggttacttgaaatgtgttcagaataatttgcatgtgacagtctgttctttggtggcttctgctgtagtttggatgtcatgtttgcccagcaagttgaaccctgttattttacctttaatggctgccattaaaagagaacaggaggaagtacttcaagataaagctgctgatgcacttgctgagcttatatttagctgcattggccgcaagcctggccccaatgacaagctaaccaagaatctctgcactctaacatgcactgatgctagtgagacacctcaagctgcaataatcaactcaatgcaggttattgaggaccagaatttgctatcgattggaaagcgttttagcagtcatagatccaggggccatacaacgtctggtggcgatgaaaggtcaaaaatggagggttttataagccggcgtggatcagagttggctttcaagcatctctgtgtgaaatttggaccttcattgtttgaaaaccttcccaagttatgggattgccttactgagtttcttagacctgtaaaaacagaagatggtattccggaagatgatgcaagtattgcacagctgggcagatcgtatgaggataaggacccacagtcactcattaataatatccaggtcgttcgttccatttcacctcacttggctgagcccttaaggcctcaactgctaaatctccttccctctattcttgggtgtgttcgtcatcctcatgtggctgttagactagctgctgcaagatgcatcacatctatggcaaagtcattgaccgatgatgtgatggtactggtgatagaaaatgtcatcccaatgttgtccgatttatcttctgtctgtgcaagacaaggagctgggattctgttaagccttcttgttcagggtttggctgtggagttggttccttatgctcctttccttgtcgttcctcttctgaagtgtatgagtgacccagatggttctgttaggcagactgtgactcacagttttgctgctcttgttcctttgctgccattatcaaggggtgcttctttaccatgtggactaagtgaacgcttatctagcagtgctgaagatgtgcaatttctggaacagctccttgacaatacccaaattgatgatttcaagcttaatattgatcttaatgttgaactacgaaggtatcagcaagaagggatcaactggcttgcattcctccgtcggtttaagttacatggaattttatgtgatgacatggggctcggtaagacgctccaagcatctgctattgtagcaagtgacattgcagaagcacgtgcacggaatgatgaaaaaattctgacatctttgattatctgcccttctacattagtggcccactgggaatatgaaatagagaagtacatagacagctctatcttgaaacctcttcagtacgttggttcttctcaggacagagtgacactccgtagtcagtttgataaggttaatgttatcataacatcatatgatattatacggaaggatattgattttcttggaaatatcacttggaactattgtgttctggatgaagggcatataataaaaaactcaaggtctaaaataacgtttgctgtgaaacagctgaaagcgcaacaccgtcttatcttgagtggcacacctattcagaataatgtgttggagttatggtctttatttgacttccttatgcctgggtttcttggaacagaaaaacaattccaagctgcatatggaaaacccttgctagctgccaaagattctaaatgttcagcaaaggatgctgaagctggtattcttgcaatggaggcactgcataagcaggtcatgccgtttctactgagaagaacaaaggatgaagttttatctgatcttccagagaagataatccaggatagatattgtgatctcagtctattgcagctcaaactttatgacaaattttccagctccaatgcaaaagacgagatttcaactatagtaaaagcaaatgaactggaggaatctgcacctcaaccaaaggcaactcggcatgtgtttcaggcattgcagtacctattaaaactatgcagccatcccttgcttgtaactggggagaaccccccaaatcatcttgtggatcttctgaatgaaataggtctgggatctggcagtgagcttcatgagcttcaccactcacctaagcttgttgctcttcaagaaatacttcaagaatgtggtatagggtcagaaatatctagtcctgatgcttctacagctgttgggcaacacagagttttgatttttgctcagcataaggcttttcttgacatcatagagaaggacctgtttcaatctcatatgagaagtgtcacatatttgcggctggatggctctgttgatccagagaagagatttgaaatcgttaaagcattcaattcagacccaaccattgatgtacttctgctaacaacccatgtcggtgggcttggcttgaacttgacatctgccgacacattggtgttcgtggaacatgattggaacccaatgaaggaccttcaggctatggacagagcacatcgattgggtcaaaggaaagtggtgaatgttcaccgtctcatcatgcgtggcacccttgaggagaaggtgatgtctctccagaggttcaaggtgtcagtcgccaatgctgtcatcaatgctgagaactcgagcttgaagaccatgaacactgaccagctgcttgatctgttcacatcaacccctgcttcaagaaaagcaagcgacgagcagagtaagaggaaatctggtggcaaaggcttgaagtccattcttaatggtctggatgagctttgggatcagtcgcagtatgccgatgagtatgatctgaaccagttcctggcgaagctgaacggctgagccaccaccggctggctcgtgtacagtgtataaagcaatttggggcaggttaattttgttgttgctgttgtttgatagaggaaggaaaagattagatgctaacagatataggtggtggttggggttacgatctcaatttttttggtttccatcttcctcaatttttgttttgaggagttgtatatactctgctcacctataatcaaagctgcagctcttatcagaatttcccttgattggtcatggtgactgttccatgtactttgttctgccgcggccgtagctatatggactgctgcagctgcaattcatagaaacaaaatacttcatagaaacaaaatattgtagaagccgcatttggattaaagacgcggcaagtcgcagcgaacctggaaaggtgaatgctgatatgcttg

SEQ ID NO: 213218 - DNA, 6859 bp, Zea Mays
accacaccagcagccaggtgcccggtgccgactcgacccgaccaccacccaggccagccagaagcccgtcccgacccggccgggcgcgcgcgtgcgtgcgttcgggcgcgcgcgttcctgcgcggattgggctcggcctccgctcgtcgccttccggccccacgcgcccctccccgcgagggctcgcccctccgcccccagtccgcctcccgcgatccccttctcccgccgctcgtcgcccgcctctttcctccccgctccccgcagagctggtgtgcacttctattacattacatgcatgtggagtaatttacctacggcagattgctgactaaaggcgctgaagtaaaccttccctcagtatacttcctcggatgtcacgtctgcccctctgcgtcatttatggctcagaactcgtcccgtcttcaccgcctcctcacattactagacactggttcgacacaagcaacgaggtttgcggctgcacgccaaattggagaaatcgccaagtcccacccccaggagctgaattcgttgctaaaaaaggtttctcaatatattcgtagtaaaaattgggacacgagggttgcggcagcccatgcgattggtgccatagcagagaatgtcaaacacacatcattgaaggacttgtatgcttccgtgcaagcagaaaaacatgcttccggtttctctgatggaagtgatgatgctggctcagcattgccacggactgatagtgcagcaacatctgatcttgcttttggaagctttgacataggcagggtattggaatttggatctcctctattggcatcaggtggacaggaatacgacattgctgatagtggcaagaatccagcagagcgtctagctcgccaaaagaaaaatctccggcgtcgtttaggactggatttatgtgagcagtttatggatgttaatgacgttatcaaagacgaggatcttcttgcccaaaaaaattattggggttcacatgtacagaataatggattccattcatttaattcagacgattaagtgccagggagttaaatatgctgaagcgtaaagcaaagagtaatgcaaaagatcatacaaaggctgtatctgaggatgatgaggttacactgaaaggatctgtgccctccaatggagcttcttctgaacaagctggtgcacaaaatggtgtatttgatacagctgtcgaagaagacaatctggagtacaatgagaacggaagatggccttttcaacaatttgtggatcagcttattcatgatatgtttgatcctatttgggaagttcgccatggcaccattatggctttaagggaaattttgacacatcatggtgcttgtgctggagtatattttcctgatctgagcttgccttcctctgacttggatggtaaaaccaactttgactcccttaaaagggaacatggtatcgatctaaacgaagatgtccatttggaacaccttgaaccagcattaaagaagcataagaaagagccaaaatgtgctgaaagtatgatggattgtgataaggagttggttgacagtgattatctaaaaacggaaggagatctgagcaatgtgcctgatgtattaactgccgaaccaaattctactcatgtaaaagttgagcctgagttctgtgttgatgattcagctgacccctctaaaggcgtttcgacatgtaaatcacagaaaaaactcaactccatatcacatctgagttctcatattcttgctccagaaagttcaaaattcatgaaactgatgaaactagccaaatactcatatatgaagaattgggaatttcttcaggattgtgcaatccgcttcctttgtgtgctttcactggaccgctttggtgattatgtatccgatcaagttgtcgccccagttcgtgaaacttgtgctcaagctcttggtgctgtgctgaagtacatgcacccttctttagtatgtcatacattcaaaatcttgctgcagatgcagcacagacaagagtgggaagttcgtcatgggagccttcttggcattaaatacttagttgctgttcgccaggaaatgcttaaagatttgcttgactatatcattcatgcttgtaaagctggtctggaggaccctgatgatgatgtccgagcagtggctgcagaagccctgattccagctgccgactctttagttaggctaaatgaccaaattttgcatccaattgtggtgttgctttgggatatactgcttgaccttgacgatttaagcccatctacaagcagtgtaatgaacttgttagcagaaatatattctcaaccagagatggtcccaaagatgcttggcacagcagcttcaggggaaaagggagaatttgatctaaacgaagcaactcagattgctgagcaagaagacgaactaacatctattgaaaacccttacggtctagctacactgacaccccggctgtggccctttatgagacatagtattacttctgttcggcgttccgccatacgaacactggagaagcttcttgaggttggcaacactaggagttctgctggaacaaccccatctaaactctggccaacatcaatattaggtgatgcactgcaggttgtatttcagaacctacttttggagtcaaatgatgatattcttcagtcttctgaaagggcttggaaacttctacttcagtgccctgagaaggaccttgaatatgctgcaaggttatattttagtaattgggtacaacttgctaccactccatttggctcagcattggattctacaaaaatgtttttaccagttgcccttccacgaggaaatcgttcgagagctgctgcaaagattagatctgctaggctagaacatgagtacacaacaatgatctcgtttggttctacaggggaaagtatttcacatgaaaagcattcggacgttccctctattttttcgaatataattgttggctctgatcctgacaaatctgttactcatacacgggttcttacgtcaatggcccttgggctttttgcctctaagttgcccgtaagctcatggcaagtggttttaagtccactagcaaatcacctcatgtctctctcaggagtccagagacaagtggcttcaatgatcatcgtttcttggttcaaagatctgagaggcagagatcctgtatcagtgggtacattgctagcttttctatcttccttgaaagagtggctggtggacttattgacttgctctgatccagcattacccacaaaaggttctgtgcttccatattctgaactttcaaggacatacacgaagatgcgcaatgaagccaataatttgctccacttaatcgattcatgtgctgctttcaaagattatagtagcagcttaaaccttaacactgacgtgctgactgttgatgatgctatcaactttgcatcaaagcttttgttaccatctgaatctgatattccttcagaaactgagaacattttcttgaataacatagaatcagcaaaacaaggcctattgtctacatcaggttacttgaaatgtgttcagaataatttgcatgtgacagtctgttctttggtggcttctgctgtagtttggatgtcatgtttgcccagcaagttgaaccctgttattttacctttaatggctgccattaaaagagaacaggaggaagtacttcaagataaagctgctgatgcacttgctgagcttatatttagctgcattggccgcaagcctggccccaatgacaagctaaccaagaatctctgcactctaacatgcactgatgctagtgagacacctcaagctgcaataatcaactcaatgcaggttattgaggaccagaatttgctatcgattggaaagcgttttagcagtcatagatccaggggccatacaacgtctggtggcgatgaaaggtcaaaaatggagggttttataagccggcgtggatcagagttggctttcaagcatctctgtgtgaaatttggaccttcattgtttgaaaaccttcccaagttatgggattgccttactgagtttcttagacctgtaaaaacagaagatggtattccggaagatgatgcaagtattgcacagctgggcagatcgtatgaggataaggacccacagtcactcattaataatatccaggtcgttcgttccatttcacctcacttggctgagcccttaaggcctcaactgctaaatctccttccctctattcttgggtgtgttcgtcatcctcatgtggctgttagactagctgctgcaagatgcatcacatctatggcaaagtcattgaccgatgatgtgatggtactggtgatagaaaatgtcatcccaatgttgtccgatttatcttctgtctgtgcaagacaaggagctgggattctgttaagccttcttgttcagggtttggctgtggagttggttccttatgctcctttccttgtcgttcctcttctgaagtgtatgagtgacccagatggttctgttaggcagactgtgactcacagttttgctgctcttgttcctttgctgccattatcaaggggtgcttctttaccatgtggactaagtgaacgcttatctagcagtgctgaagatgtgcaatttctggaacagctccttgacaatacccaaattgatgatttcaagcttaatattgatcttaatgttgaactacgaaggtatcagcaagaagggatcaactggcttgcattcctccgtcggtttaagttacatggaattttatgtgatgacatggggctcggtaagacgctccaagcatctgctattgtagcaagtgacattgcagaagcacgtgcacggaatgatgaaaaaattctgacatctttgattatctgcccttctacattagtggcccactgggaatatgaaatagagaagtacatagacagctctatcttgaaacctcttcagtacgttggttcttctcaggacagagtgacactccgtagtcagtttgataaggttaatgttatcataacatcatatgatattatacggaaggatattgattttcttggaaatatcacttggaactattgtgttctggatgaagggcatataataaaaaactcaaggtctaaaataacgtttgctgtgaaacagctgaaagcgcaacaccgtcttatcttgagtggcacacctattcagaataatgtgttggagttatggtctttatttgacttccttatgcctgggtttcttggaacagaaaaacaattccaagctgcatatggaaaacccttgctagctgccaaagattctaaatgttcagcaaaggatgctgaagctggtattcttgcaatggaggcactgcataagcaggtcatgccgtttctactgagaagaacaaaggatgaagttttatctgatcttccagagaagataatccaggatagatattgtgatctcagtctattgcagctcaaactttatgacaaattttccagctccaatgcaaaagacgagatttcaactatagtaaaagcaaatgaactggaggaatctgcacctcaaccaaaggcaactcggcatgtgtttcaggcattgcagtacctattaaaactatgcagccatcccttgcttgtaactggggagaaccccccaaatcatcttgtggatcttctgaatgaaataggtctgggatctggcagtgagcttcatgagcttcaccactcacctaagcttgttgctcttcaagaaatacttcaagaatgtggtatagggtcagaaatatctagtcctgatgcttctacagctgttgggcaacacagagttttgatttttgctcagcataaggcttttcttgacatcatagagaaggacctgtttcaatctcatatgagaagtgtcacatatttgcggctggatggctctgttgatccagagaagagatttgaaatcgttaaagcattcaattcagacccaaccattgatgtacttctgctaacaacccatgtcggtgggcttggcttgaacttgacatctgccgacacattggtgttcgtggaacatgattggaacccaatgaaggaccttcaggctatggacagagcacatcgattgggtcaaaggaaagtggtgaatgttcaccgtctcatcatgcgtggcacccttgaggagaaggtgatgtctctccagaggttcaaggtgtcagtcgccaatgctgtcatcaatgctgagaactcgagcttgaagaccatgaacactgaccagctgcttgatctgttcacatcaacccctgcttcaagaaaagcaagcgacgagcagagtaagaggaaatctggtggcaaaggcttgaagtccattcttaatggtctggatgagctttgggatcagtcgcagtatgccgatgagtatgatctgaaccagttcctggcgaagctgaacggctgagccaccaccggctggctcgtgtacagtgtataaagcaatttggggcaggttaattttgttgttgctgttgtttgatagaggaaggaaaagattagatgctaacagatataggtggtggttggggttacgatctcaatttttttggtttccatcttcctcaatttttgttttgaggagttgtatatactctgctcacctataatcaaagctgcagctcttatcagaatttcccttgattggtcatggtgactgttccatgtactttgttctgccgcggccgtagctatatggactgctgcagctgcaattcatagaaacaaaatacttcatagaaacaaaatattgtagaagccgcatttggattaaagacgcggcaagtcgcagcgaacctggaaaggtgaatgctgatatgcttg

SEQ ID NO: 213219 - DNA, 6909 bp, Zea Mays
accacaccagcagccaggtgcccggtgccgactcgacccgaccaccacccaggccagccagaagcccgtcccgacccggccgggcgcgcgcgtgcgtgcgttcgggcgcgcgcgttcctgcgcggattgggctcggcctccgctcgtcgccttccggccccacgcgcccctccccgcgagggctcgcccctccgcccccagtccgcctcccgcgatccccttctcccgccgctcgtcgcccgcctctttcctccccgctccccgcagagctggtgtgcacttctattacattacatgcatgtggagtaatttacctacggcagattgctgactaaaggcgctgaagtaaaccttccctcagtatacttcctcggatgtcacgtctgcccctctgcgtcatttatggctcagaactcgtcccgtcttcaccgcctcctcacattactagacactggttcgacacaagcaacgaggtttgcggctgcacgccaaattggagaaatcgccaagtcccacccccaggagctgaattcgttgctaaaaaaggtttctcaatatattcgtagtaaaaattgggacacgagggttgcggcagcccatgcgattggtgccatagcagagaatgtcaaacacacatcattgaaggacttgtatgcttccgtgcaagcagaaaaacatgcttccggtttctctgatggaagtgatgatgctggctcagcattgccacggactgatagtgcagcaacatctgatcttgcttttggaagctttgacataggcagggtattggaatttggatctcctctattggcatcaggtggacaggaatacgacattgctgatagtggcaagaatccagcagagcgtctagctcgccaaaagaaaaatctccggcgtcgtttaggactggatttatgtgagcagtttatggatgttaatgacgttatcaaagacgaggatcttcttgcccaaaaaaattattggggttcacatgtacagaataatggattccattcatttaattcaggtcataatattcagcagttggtttctaccatggtccccaggtatcccaagcattctaattttcgctctagacgattaagtgccagggagttaaatatgctgaagcgtaaagcaaagagtaatgcaaaagatcatacaaaggctgtatctgaggatgatgaggttacactgaaaggatctgtgccctccaatggagcttcttctgaacaaggtgtatttgatacagctgtcgaagaagacaatctggagtacaatgagaacggaagatggccttttcaacaatttgtggatcagcttattcatgatatgtttgatcctatttgggaagttcgccatggcaccattatggctttaagggaaattttgacacatcatggtgcttgtgctggagtatattttcctgatctgagcttgccttcctctgacttggatggtaaaaccaactttgactcccttaaaagggaacatggtatcgatctaaacgaagatgtccatttggaacaccttgaaccagcattaaagaagcataagaaagagccaaaatgtgctgaaagtatgatggattgtgataaggagttggttgacagtgattatctaaaaacggaaggagatctgagcaatgtgcctgatgtattaactgccgaaccaaattctactcatgtaaaagttgagcctgagttctgtgttgatgattcagctgacccctctaaaggcgtttcgacatgtaaatcacagaaaaaactcaactccatatcacatctgagttctcatattcttgctccagaaagttcaaaattcatgaaactgatgaaactagccaaatactcatatatgaagaattgggaatttcttcaggattgtgcaatccgcttcctttgtgtgctttcactggaccgctttggtgattatgtatccgatcaagttgtcgccccagttcgtgaaacttgtgctcaagctcttggtgctgtgctgaagtacatgcacccttctttagtatgtcatacattcaaaatcttgctgcagatgcagacaagagtgggaagttcgtcatgggagccttcttggcattaaatacttagttgctgttcgccaggaaatgcttaaagatttgcttgactatatcattcatgcttgtaaagctggtctggaggaccctgatgatgatgtccgagcagtggctgcagaagccctgattccagctgccgactctttagttaggctaaatgaccaaattttgcatccaattgtggtgttgctttgggatatactgcttgaccttgacgatttaagcccatctacaagcagtgtaatgaacttgttagcagaaatatattctcaaccagagatggtcccaaagatgcttggcacagcagcttcaggggaaaagggagaatttgatctaaacgaagcaactcagattgctgagcaagaagacgaactaacatctattgaaaacccttacggtctagctacactgacaccccggctgtggccctttatgagacatagtattacttctgttcggcgttccgccatacgaacactggagaagcttcttgaggttggcaacactaggagttctgctggaacaaccccatctaaactctggccaacatcaatattaggtgatgcactgcaggttgtatttcagaacctacttttggagtcaaatgatgatattcttcagtcttctgaaagggcttggaaacttctacttcagtgccctgagaaggaccttgaatatgctgcaaggttatattttagtaattgggtacaacttgctaccactccatttggctcagcattggattctacaaaaatgtttttaccagttgcccttccacgaggaaatcgttcgagagctgctgcaaagattagatctgctaggctagaacatgagtacacaacaatgatctcgtttggttctacaggggaaagtatttcacatgaaaagcattcggacgttccctctattttttcgaatataattgttggctctgatcctgacaaatctgttactcatacacgggttcttacgtcaatggcccttgggctttttgcctctaagttgcccgtaagctcatggcaagtggttttaagtccactagcaaatcacctcatgtctctctcaggagtccagagacaagtggcttcaatgatcatcgtttcttggttcaaagatctgagaggcagagatcctgtatcagtgggtacattgctagcttttctatcttccttgaaagagtggctggtggacttattgacttgctctgatccagcattacccacaaaaggttctgtgcttccatattctgaactttcaaggacatacacgaagatgcgcaatgaagccaataatttgctccacttaatcgattcatgtgctgctttcaaagattatagtagcagcttaaaccttaacactgacgtgctgactgttgatgatgctatcaactttgcatcaaagcttttgttaccatctgaatctgatattccttcagaaactgagaacattttcttgaataacatagaatcagcaaaacaaggcctattgtctacatcaggttacttgaaatgtgttcagaataatttgcatgtgacagtctgttctttggtggcttctgctgtagtttggatgtcatgtttgcccagcaagttgaaccctgttattttacctttaatggctgccattaaaagagaacaggaggaagtacttcaagataaagctgctgatgcacttgctgagcttatatttagctgcattggccgcaagcctggccccaatgacaagctaaccaagaatctctgcactctaacatgcactgatgctagtgagacacctcaagctgcaataatcaactcaatgcaggttattgaggaccagaatttgctatcgattggaaagcgttttagcagtcatagatccaggggccatacaacgtctggtggcgatgaaaggtcaaaaatggagggttttataagccggcgtggatcagagttggctttcaagcatctctgtgtgaaatttggaccttcattgtttgaaaaccttcccaagttatgggattgccttactgagtttcttagacctgtaaaaacagaagatggtattccggaagatgatgcaagtattgcacagctgggcagatcgtatgaggataaggacccacagtcactcattaataatatccaggtcgttcgttccatttcacctcacttggctgagcccttaaggcctcaactgctaaatctccttccctctattcttgggtgtgttcgtcatcctcatgtggctgttagactagctgctgcaagatgcatcacatctatggcaaagtcattgaccgatgatgtgatggtactggtgatagaaaatgtcatcccaatgttgtccgatttatcttctgtctgtgcaagacaaggagctgggattctgttaagccttcttgttcagggtttggctgtggagttggttccttatgctcctttccttgtcgttcctcttctgaagtgtatgagtgacccagatggttctgttaggcagactgtgactcacagttttgctgctcttgttcctttgctgccattatcaaggggtgcttctttaccatgtggactaagtgaacgcttatctagcagtgctgaagatgtgcaatttctggaacagctccttgacaatacccaaattgatgatttcaagcttaatattgatcttaatgttgaactacgaaggtatcagcaagaagggatcaactggcttgcattcctccgtcggtttaagttacatggaattttatgtgatgacatggggctcggtaagacgctccaagcatctgctattgtagcaagtgacattgcagaagcacgtgcacggaatgatgaaaaaattctgacatctttgattatctgcccttctacattagtggcccactgggaatatgaaatagagaagtacatagacagctctatcttgaaacctcttcagtacgttggttcttctcaggacagagtgacactccgtagtcagtttgataaggttaatgttatcataacatcatatgatattatacggaaggatattgattttcttggaaatatcacttggaactattgtgttctggatgaagggcatataataaaaaactcaaggtctaaaataacgtttgctgtgaaacagctgaaagcgcaacaccgtcttatcttgagtggcacacctattcagaataatgtgttggagttatggtctttatttgacttccttatgcctgggtttcttggaacagaaaaacaattccaagctgcatatggaaaacccttgctagctgccaaagattctaaatgttcagcaaaggatgctgaagctggtattcttgcaatggaggcactgcataagcaggtcatgccgtttctactgagaagaacaaaggatgaagttttatctgatcttccagagaagataatccaggatagatattgtgatctcagtctattgcagctcaaactttatgacaaattttccagctccaatgcaaaagacgagatttcaactatagtaaaagcaaatgaactggaggaatctgcacctcaaccaaaggcaactcggcatgtgtttcaggcattgcagtacctattaaaactatgcagccatcccttgcttgtaactggggagaaccccccaaatcatcttgtggatcttctgaatgaaataggtctgggatctggcagtgagcttcatgagcttcaccactcacctaagcttgttgctcttcaagaaatacttcaagaatgtggtatagggtcagaaatatctagtcctgatgcttctacagctgttgggcaacacagagttttgatttttgctcagcataaggcttttcttgacatcatagagaaggacctgtttcaatctcatatgagaagtgtcacatatttgcggctggatggctctgttgatccagagaagagatttgaaatcgttaaagcattcaattcagacccaaccattgatgtacttctgctaacaacccatgtcggtgggcttggcttgaacttgacatctgccgacacattggtgttcgtggaacatgattggaacccaatgaaggaccttcaggctatggacagagcacatcgattgggtcaaaggaaagtggtgaatgttcaccgtctcatcatgcgtggcacccttgaggagaaggtgatgtctctccagaggttcaaggtgtcagtcgccaatgctgtcatcaatgctgagaactcgagcttgaagaccatgaacactgaccagctgcttgatctgttcacatcaacccctgcttcaagaaaagcaagcgacgagcagagtaagaggaaatctggtggcaaaggcttgaagtccattcttaatggtctggatgagctttgggatcagtcgcagtatgccgatgagtatgatctgaaccagttcctggcgaagctgaacggctgagccaccaccggctggctcgtgtacagtgtataaagcaatttggggcaggttaattttgttgttgctgttgtttgatagaggaaggaaaagattagatgctaacagatataggtggtggttggggttacgatctcaatttttttggtttccatcttcctcaatttttgttttgaggagttgtatatactctgctcacctataatcaaagctgcagctcttatcagaatttcccttgattggtcatggtgactgttccatgtactttgttctgccgcggccgtagctatatggactgctgcagctgcaattcatagaaacaaaatacttcatagaaacaaaatattgtagaagccgcatttggattaaagacgcggcaagtcgcagcgaacctggaaaggtgaatgctgatatgcttg

SEQ ID NO: 213220 - DNA, 6913 bp, Zea Mays
accacaccagcagccaggtgcccggtgccgactcgacccgaccaccacccaggccagccagaagcccgtcccgacccggccgggcgcgcgcgtgcgtgcgttcgggcgcgcgcgttcctgcgcggattgggctcggcctccgctcgtcgccttccggccccacgcgcccctccccgcgagggctcgcccctccgcccccagtccgcctcccgcgatccccttctcccgccgctcgtcgcccgcctctttcctccccgctccccgcagagctggtgtgcacttctattacattacatgcatgtggagtaatttacctacggcagattgctgactaaaggcgctgaagtaaaccttccctcagtatacttcctcggatgtcacgtctgcccctctgcgtcatttatggctcagaactcgtcccgtcttcaccgcctcctcacattactagacactggttcgacacaagcaacgaggtttgcggctgcacgccaaattggagaaatcgccaagtcccacccccaggagctgaattcgttgctaaaaaaggtttctcaatatattcgtagtaaaaattgggacacgagggttgcggcagcccatgcgattggtgccatagcagagaatgtcaaacacacatcattgaaggacttgtatgcttccgtgcaagcagaaaaacatgcttccggtttctctgatggaagtgatgatgctggctcagcattgccacggactgatagtgcagcaacatctgatcttgcttttggaagctttgacataggcagggtattggaatttggatctcctctattggcatcaggtggacaggaatacgacattgctgatagtggcaagaatccagcagagcgtctagctcgccaaaagaaaaatctccggcgtcgtttaggactggatttatgtgagcagtttatggatgttaatgacgttatcaaagacgaggatcttcttgcccaaaaaaattattggggttcacatgtacagaataatggattccattcatttaattcaggtcataatattcagcagttggtttctaccatggtccccaggtatcccaagcattctaattttcgctctagacgattaagtgccagggagttaaatatgctgaagcgtaaagcaaagagtaatgcaaaagatcatacaaaggctgtatctgaggatgatgaggttacactgaaaggatctgtgccctccaatggagcttcttctgaacaagctggtgcacaaaatctgtcgaagaagacaatctggagtacaatgagaacggaagatggccttttcaacaatttgtggatcagcttattcatgatatgtttgatcctatttgggaagttcgccatggcaccattatggctttaagggaaattttgacacatcatggtgcttgtgctggagtatattttcctgatctgagcttgccttcctctgacttggatggtaaaaccaactttgactcccttaaaagggaacatggtatcgatctaaacgaagatgtccatttggaacaccttgaaccagcattaaagaagcataagaaagagccaaaatgtgctgaaagtatgatggattgtgataaggagttggttgacagtgattatctaaaaacggaaggagatctgagcaatgtgcctgatgtattaactgccgaaccaaattctactcatgtaaaagttgagcctgagttctgtgttgatgattcagctgacccctctaaaggcgtttcgacatgtaaatcacagaaaaaactcaactccatatcacatctgagttctcatattcttgctccagaaagttcaaaattcatgaaactgatgaaactagccaaatactcatatatgaagaattgggaatttcttcaggattgtgcaatccgcttcctttgtgtgctttcactggaccgctttggtgattatgtatccgatcaagttgtcgccccagttcgtgaaacttgtgctcaagctcttggtgctgtgctgaagtacatgcacccttctttagtatgtcatacattcaaaatcttgctgcagatgcagcacagacaagagtgggaagttcgtcatgggagccttcttggcattaaatacttagttgctgttcgccaggaaatgcttaaagatttgcttgactatatcattcatgcttgtaaagctggtctggaggaccctgatgatgatgtccgagcagtggctgcagaagccctgattccagctgccgactctttagttaggctaaatgaccaaattttgcatccaattgtggtgttgctttgggatatactgcttgaccttgacgatttaagcccatctacaagcagtgtaatgaacttgttagcagaaatatattctcaaccagagatggtcccaaagatgcttggcacagcagcttcaggggaaaagggagaatttgatctaaacgaagcaactcagattgctgagcaagaagacgaactaacatctattgaaaacccttacggtctagctacactgacaccccggctgtggccctttatgagacatagtattacttctgttcggcgttccgccatacgaacactggagaagcttcttgaggttggcaacactaggagttctgctggaacaaccccatctaaactctggccaacatcaatattaggtgatgcactgcaggttgtatttcagaacctacttttggagtcaaatgatgatattcttcagtcttctgaaagggcttggaaacttctacttcagtgccctgagaaggaccttgaatatgctgcaaggttatattttagtaattgggtacaacttgctaccactccatttggctcagcattggattctacaaaaatgtttttaccagttgcccttccacgaggaaatcgttcgagagctgctgcaaagattagatctgctaggctagaacatgagtacacaacaatgatctcgtttggttctacaggggaaagtatttcacatgaaaagcattcggacgttccctctattttttcgaatataattgttggctctgatcctgacaaatctgttactcatacacgggttcttacgtcaatggcccttgggctttttgcctctaagttgcccgtaagctcatggcaagtggttttaagtccactagcaaatcacctcatgtctctctcaggagtccagagacaagtggcttcaatgatcatcgtttcttggttcaaagatctgagaggcagagatcctgtatcagtgggtacattgctagcttttctatcttccttgaaagagtggctggtggacttattgacttgctctgatccagcattacccacaaaaggttctgtgcttccatattctgaactttcaaggacatacacgaagatgcgcaatgaagccaataatttgctccacttaatcgattcatgtgctgctttcaaagattatagtagcagcttaaaccttaacactgacgtgctgactgttgatgatgctatcaactttgcatcaaagcttttgttaccatctgaatctgatattccttcagaaactgagaacattttcttgaataacatagaatcagcaaaacaaggcctattgtctacatcaggttacttgaaatgtgttcagaataatttgcatgtgacagtctgttctttggtggcttctgctgtagtttggatgtcatgtttgcccagcaagttgaaccctgttattttacctttaatggctgccattaaaagagaacaggaggaagtacttcaagataaagctgctgatgcacttgctgagcttatatttagctgcattggccgcaagcctggccccaatgacaagctaaccaagaatctctgcactctaacatgcactgatgctagtgagacacctcaagctgcaataatcaactcaatgcaggttattgaggaccagaatttgctatcgattggaaagcgttttagcagtcatagatccaggggccatacaacgtctggtggcgatgaaaggtcaaaaatggagggttttataagccggcgtggatcagagttggctttcaagcatctctgtgtgaaatttggaccttcattgtttgaaaaccttcccaagttatgggattgccttactgagtttcttagacctgtaaaaacagaagatggtattccggaagatgatgcaagtattgcacagctgggcagatcgtatgaggataaggacccacagtcactcattaataatatccaggtcgttcgttccatttcacctcacttggctgagcccttaaggcctcaactgctaaatctccttccctctattcttgggtgtgttcgtcatcctcatgtggctgttagactagctgctgcaagatgcatcacatctatggcaaagtcattgaccgatgatgtgatggtactggtgatagaaaatgtcatcccaatgttgtccgatttatcttctgtctgtgcaagacaaggagctgggattctgttaagccttcttgttcagggtttggctgtggagttggttccttatgctcctttccttgtcgttcctcttctgaagtgtatgagtgacccagatggttctgttaggcagactgtgactcacagttttgctgctcttgttcctttgctgccattatcaaggggtgcttctttaccatgtggactaagtgaacgcttatctagcagtgctgaagatgtgcaatttctggaacagctccttgacaatacccaaattgatgatttcaagcttaatattgatcttaatgttgaactacgaaggtatcagcaagaagggatcaactggcttgcattcctccgtcggtttaagttacatggaattttatgtgatgacatggggctcggtaagacgctccaagcatctgctattgtagcaagtgacattgcagaagcacgtgcacggaatgatgaaaaaattctgacatctttgattatctgcccttctacattagtggcccactgggaatatgaaatagagaagtacatagacagctctatcttgaaacctcttcagtacgttggttcttctcaggacagagtgacactccgtagtcagtttgataaggttaatgttatcataacatcatatgatattatacggaaggatattgattttcttggaaatatcacttggaactattgtgttctggatgaagggcatataataaaaaactcaaggtctaaaataacgtttgctgtgaaacagctgaaagcgcaacaccgtcttatcttgagtggcacacctattcagaataatgtgttggagttatggtctttatttgacttccttatgcctgggtttcttggaacagaaaaacaattccaagctgcatatggaaaacccttgctagctgccaaagattctaaatgttcagcaaaggatgctgaagctggtattcttgcaatggaggcactgcataagcaggtcatgccgtttctactgagaagaacaaaggatgaagttttatctgatcttccagagaagataatccaggatagatattgtgatctcagtctattgcagctcaaactttatgacaaattttccagctccaatgcaaaagacgagatttcaactatagtaaaagcaaatgaactggaggaatctgcacctcaaccaaaggcaactcggcatgtgtttcaggcattgcagtacctattaaaactatgcagccatcccttgcttgtaactggggagaaccccccaaatcatcttgtggatcttctgaatgaaataggtctgggatctggcagtgagcttcatgagcttcaccactcacctaagcttgttgctcttcaagaaatacttcaagaatgtggtatagggtcagaaatatctagtcctgatgcttctacagctgttgggcaacacagagttttgatttttgctcagcataaggcttttcttgacatcatagagaaggacctgtttcaatctcatatgagaagtgtcacatatttgcggctggatggctctgttgatccagagaagagatttgaaatcgttaaagcattcaattcagacccaaccattgatgtacttctgctaacaacccatgtcggtgggcttggcttgaacttgacatctgccgacacattggtgttcgtggaacatgattggaacccaatgaaggaccttcaggctatggacagagcacatcgattgggtcaaaggaaagtggtgaatgttcaccgtctcatcatgcgtggcacccttgaggagaaggtgatgtctctccagaggttcaaggtgtcagtcgccaatgctgtcatcaatgctgagaactcgagcttgaagaccatgaacactgaccagctgcttgatctgttcacatcaacccctgcttcaagaaaagcaagcgacgagcagagtaagaggaaatctggtggcaaaggcttgaagtccattcttaatggtctggatgagctttgggatcagtcgcagtatgccgatgagtatgatctgaaccagttcctggcgaagctgaacggctgagccaccaccggctggctcgtgtacagtgtataaagcaatttggggcaggttaattttgttgttgctgttgtttgatagaggaaggaaaagattagatgctaacagatataggtggtggttggggttacgatctcaatttttttggtttccatcttcctcaatttttgttttgaggagttgtatatactctgctcacctataatcaaagctgcagctcttatcagaatttcccttgattggtcatggtgactgttccatgtactttgttctgccgcggccgtagctatatggactgctgcagctgcaattcatagaaacaaaatacttcatagaaacaaaatattgtagaagccgcatttggattaaagacgcggcaagtcgcagcgaacctggaaaggtgaatgctgatatgcttg

SEQ ID NO: 213221 - DNA, 6894 bp, Zea Mays
accacaccagcagccaggtgcccggtgccgactcgacccgaccaccacccaggccagccagaagcccgtcccgacccggccgggcgcgcgcgtgcgtgcgttcgggcgcgcgcgttcctgcgcggattgggctcggcctccgctcgtcgccttccggccccacgcgcccctccccgcgagggctcgcccctccgcccccagtccgcctcccgcgatccccttctcccgccgctcgtcgcccgcctctttcctccccgctccccgcagagctggtgtgcacttctattacattacatgcatgtggagtaatttacctacggcagattgctgactaaaggcgctgaagtaaaccttccctcagtatacttcctcggatgtcacgtctgcccctctgcgtcatttatggctcagaactcgtcccgtcttcaccgcctcctcacattactagacactggttcgacacaagcaacgaggtttgcggctgcacgccaaattggagaaatcgccaagtcccacccccaggagctgaattcgttgctaaaaaagtaaaaattgggacacgagggttgcggcagcccatgcgattggtgccatagcagagaatgtcaaacacacatcattgaaggacttgtatgcttccgtgcaagcagaaaaacatgcttccggtttctctgatggaagtgatgatgctggctcagcattgccacggactgatagtgcagcaacatctgatcttgcttttggaagctttgacataggcagggtattggaatttggatctcctctattggcatcaggtggacaggaatacgacattgctgatagtggcaagaatccagcagagcgtctagctcgccaaaagaaaaatctccggcgtcgtttaggactggatttatgtgagcagtttatggatgttaatgacgttatcaaagacgaggatcttcttgcccaaaaaaattattggggttcacatgtacagaataatggattccattcatttaattcaggtcataatattcagcagttggtttctaccatggtccccaggtatcccaagcattctaattttcgctctagacgattaagtgccagggagttaaatatgctgaagcgtaaagcaaagagtaatgcaaaagatcatacaaaggctgtatctgaggatgatgaggttacactgaaaggatctgtgccctccaatggagcttcttctgaacaaggtgtatttgatacagctgtcgaagaagacaatctggagtacaatgagaacggaagatggccttttcaacaatttgtggatcagcttattcatgatatgtttgatcctatttgggaagttcgccatggcaccattatggctttaagggaaattttgacacatcatggtgcttgtgctggagtatattttcctgatctgagcttgccttcctctgacttggatggtaaaaccaactttgactcccttaaaagggaacatggtatcgatctaaacgaagatgtccatttggaacaccttgaaccagcattaaagaagcataagaaagagccaaaatgtgctgaaagtatgatggattgtgataaggagttggttgacagtgattatctaaaaacggaaggagatctgagcaatgtgcctgatgtattaactgccgaaccaaattctactcatgtaaaagttgagcctgagttctgtgttgatgattcagctgacccctctaaaggcgtttcgacatgtaaatcacagaaaaaactcaactccatatcacatctgagttctcatattcttgctccagaaagttcaaaattcatgaaactgatgaaactagccaaatactcatatatgaagaattgggaatttcttcaggattgtgcaatccgcttcctttgtgtgctttcactggaccgctttggtgattatgtatccgatcaagttgtcgccccagttcgtgaaacttgtgctcaagctcttggtgctgtgctgaagtacatgcacccttctttagtatgtcatacattcaaaatcttgctgcagatgcagcacagacaagagtgggaagttcgtcatgggagccttcttggcattaaatacttagttgctgttcgccaggaaatgcttaaagatttgcttgactatatcattcatgcttgtaaagctggtctggaggaccctgatgatgatgtccgagcagtggctgcagaagccctgattccagctgccgactctttagttaggctaaatgaccaaattttgcatccaattgtggtgttgctttgggatatactgcttgaccttgacgatttaagcccatctacaagcagtgtaatgaacttgttagcagaaatatattctcaaccagagatggtcccaaagatgcttggcacagcagcttcaggggaaaagggagaatttgatctaaacgaagcaactcagattgctgagcaagaagacgaactaacatctattgaaaacccttacggtctagctacactgacaccccggctgtggccctttatgagacatagtattacttctgttcggcgttccgccatacgaacactggagaagcttcttgaggttggcaacactaggagttctgctggaacaaccccatctaaactctggccaacatcaatattaggtgatgcactgcaggttgtatttcagaacctacttttggagtcaaatgatgatattcttcagtcttctgaaagggcttggaaacttctacttcagtgccctgagaaggaccttgaatatgctgcaaggttatattttagtaattgggtacaacttgctaccactccatttggctcagcattggattctacaaaaatgtttttaccagttgcccttccacgaggaaatcgttcgagagctgctgcaaagattagatctgctaggctagaacatgagtacacaacaatgatctcgtttggttctacaggggaaagtatttcacatgaaaagcattcggacgttccctctattttttcgaatataattgttggctctgatcctgacaaatctgttactcatacacgggttcttacgtcaatggcccttgggctttttgcctctaagttgcccgtaagctcatggcaagtggttttaagtccactagcaaatcacctcatgtctctctcaggagtccagagacaagtggcttcaatgatcatcgtttcttggttcaaagatctgagaggcagagatcctgtatcagtgggtacattgctagcttttctatcttccttgaaagagtggctggtggacttattgacttgctctgatccagcattacccacaaaaggttctgtgcttccatattctgaactttcaaggacatacacgaagatgcgcaatgaagccaataatttgctccacttaatcgattcatgtgctgctttcaaagattatagtagcagcttaaaccttaacactgacgtgctgactgttgatgatgctatcaactttgcatcaaagcttttgttaccatctgaatctgatattccttcagaaactgagaacattttcttgaataacatagaatcagcaaaacaaggcctattgtctacatcaggttacttgaaatgtgttcagaataatttgcatgtgacagtctgttctttggtggcttctgctgtagtttggatgtcatgtttgcccagcaagttgaaccctgttattttacctttaatggctgccattaaaagagaacaggaggaagtacttcaagataaagctgctgatgcacttgctgagcttatatttagctgcattggccgcaagcctggccccaatgacaagctaaccaagaatctctgcactctaacatgcactgatgctagtgagacacctcaagctgcaataatcaactcaatgcaggttattgaggaccagaatttgctatcgattggaaagcgttttagcagtcatagatccaggggccatacaacgtctggtggcgatgaaaggtcaaaaatggagggttttataagccggcgtggatcagagttggctttcaagcatctctgtgtgaaatttggaccttcattgtttgaaaaccttcccaagttatgggattgccttactgagtttcttagacctgtaaaaacagaagatggtattccggaagatgatgcaagtattgcacagctgggcagatcgtatgaggataaggacccacagtcactcattaataatatccaggtcgttcgttccatttcacctcacttggctgagcccttaaggcctcaactgctaaatctccttccctctattcttgggtgtgttcgtcatcctcatgtggctgttagactagctgctgcaagatgcatcacatctatggcaaagtcattgaccgatgatgtgatggtactggtgatagaaaatgtcatcccaatgttgtccgatttatcttctgtctgtgcaagacaaggagctgggattctgttaagccttcttgttcagggtttggctgtggagttggttccttatgctcctttccttgtcgttcctcttctgaagtgtatgagtgacccagatggttctgttaggcagactgtgactcacagttttgctgctcttgttcctttgctgccattatcaaggggtgcttctttaccatgtggactaagtgaacgcttatctagcagtgctgaagatgtgcaatttctggaacagctccttgacaatacccaaattgatgatttcaagcttaatattgatcttaatgttgaactacgaaggtatcagcaagaagggatcaactggcttgcattcctccgtcggtttaagttacatggaattttatgtgatgacatggggctcggtaagacgctccaagcatctgctattgtagcaagtgacattgcagaagcacgtgcacggaatgatgaaaaaattctgacatctttgattatctgcccttctacattagtggcccactgggaatatgaaatagagaagtacatagacagctctatcttgaaacctcttcagtacgttggttcttctcaggacagagtgacactccgtagtcagtttgataaggttaatgttatcataacatcatatgatattatacggaaggatattgattttcttggaaatatcacttggaactattgtgttctggatgaagggcatataataaaaaactcaaggtctaaaataacgtttgctgtgaaacagctgaaagcgcaacaccgtcttatcttgagtggcacacctattcagaataatgtgttggagttatggtctttatttgacttccttatgcctgggtttcttggaacagaaaaacaattccaagctgcatatggaaaacccttgctagctgccaaagattctaaatgttcagcaaaggatgctgaagctggtattcttgcaatggaggcactgcataagcaggtcatgccgtttctactgagaagaacaaaggatgaagttttatctgatcttccagagaagataatccaggatagatattgtgatctcagtctattgcagctcaaactttatgacaaattttccagctccaatgcaaaagacgagatttcaactatagtaaaagcaaatgaactggaggaatctgcacctcaaccaaaggcaactcggcatgtgtttcaggcattgcagtacctattaaaactatgcagccatcccttgcttgtaactggggagaaccccccaaatcatcttgtggatcttctgaatgaaataggtctgggatctggcagtgagcttcatgagcttcaccactcacctaagcttgttgctcttcaagaaatacttcaagaatgtggtatagggtcagaaatatctagtcctgatgcttctacagctgttgggcaacacagagttttgatttttgctcagcataaggcttttcttgacatcatagagaaggacctgtttcaatctcatatgagaagtgtcacatatttgcggctggatggctctgttgatccagagaagagatttgaaatcgttaaagcattcaattcagacccaaccattgatgtacttctgctaacaacccatgtcggtgggcttggcttgaacttgacatctgccgacacattggtgttcgtggaacatgattggaacccaatgaaggaccttcaggctatggacagagcacatcgattgggtcaaaggaaagtggtgaatgttcaccgtctcatcatgcgtggcacccttgaggagaaggtgatgtctctccagaggttcaaggtgtcagtcgccaatgctgtcatcaatgctgagaactcgagcttgaagaccatgaacactgaccagctgcttgatctgttcacatcaacccctgcttcaagaaaagcaagcgacgagcagagtaagaggaaatctggtggcaaaggcttgaagtccattcttaatggtctggatgagctttgggatcagtcgcagtatgccgatgagtatgatctgaaccagttcctggcgaagctgaacggctgagccaccaccggctggctcgtgtacagtgtataaagcaatttggggcaggttaattttgttgttgctgttgtttgatagaggaaggaaaagattagatgctaacagatataggtggtggttggggttacgatctcaatttttttggtttccatcttcctcaatttttgttttgaggagttgtatatactctgctcacctataatcaaagctgcagctcttatcagaatttcccttgattggtcatggtgactgttccatgtactttgttctgccgcggccgtagctatatggactgctgcagctgcaattcatagaaacaaaatacttcatagaaacaaaatattgtagaagccgcatttggattaaagacgcggcaagtcgcagcgaacctggaaaggtgaatgctgatatgcttg

SEQ ID NO: 213222 - DNA, 6808 bp, Zea Mays
cgaccacaccagcagccaggtgcccggtgccgactcgacccgaccaccacccaggccagccagaagcccgtcccgacccggccgggcgcgcgcgtgcgtgcgttcgggcgcgcgcgttcctgcgcggattgggctcggcctccgctcgtcgccttccggccccacgcgcccctccccgcgagggctcgcccctccgcccccagtccgcctcccgcgatccccttctcccgccgctcgtcgcccgcctctttcctccccgctccccgcagagctggtgtgcacttctattacattacatgcatgtggagtaatttacctacggcagattgctgactaaaggcgctgaagtaaaccttccctcagtatacttcctcggatgtcacgtctgcccctctgcgtcatttatggctcagaactcgtcccgtcttcaccgcctcctcacattactagacactggttcgacacaagcaacgaggtttgcggctgcacgccaaattggagaaatcgccaagtcccacccccaggagctgaattcgttgctaaaaaaggtttctcaatatattcgtagtaaaaattgggacacgagggttgcggcagcccatgcgattggtgccatagcagagaatgtcaaacacacatcattgaaggacttgtatgcttccgtgcaagcagaaaaacatgcttccggtttctctgatggaagtgatgatgctggctcagcattgccacggactgatagtgcagcaacatctgatcttgcttttggaagctttgacataggcagggtattggaatttggatctcctctattggcatcaggtggacaggaatacgacattgctgatagtggcaagaatccagcagagcgtctagctcgccaaaagaaaaatctccggcgtcgtttaggactggatttatgtgagcagtttatggatgttaatgacgttatcaaagacgaggatcttcttgcccaaaaaaattattggggttcacatgtacagaataatggattccattcatttaattcaggtcataatattcagcagttggtttctaccatggtccccaggtatcccaagcattctaattttcgctctagacgattaagtgccagggagttaaatatgctgaagcgtaaagcaaagagtaatgcaaaagatcatacaaaggctgtatctgaggatgatgaggttacactgaaaggatctgtgccctccaatggagcttcttctgaacaaggtgtatttgatacagctgtcgaagaagacaatctggagtacaatgagaacggaagatggccttttcaacaatttgtggatcagcttattcatgatatgtttgatcctatttgggaagttcgccatggcaccattatggctttaagggaaattttgacacatcatggtgcttgtgctggagtatattttcctgatctgagcttgccttcctctgacttggatggtaaaaccaactttgactcccttaaaagggaacatggtatcgatctaaacgaagatgtccatttggaacaccttgaaccagcattaaagaagcataagaaagagccaaaatgtgctgaaagtatgatggattgtgataaggagttggttgacagtgattatctaaaaacggaaggagatctgagcaatgtgcctgatgtattaactgccgaaccaaattctactcatgtaaaagttgagcctgagttctgtgttgatgattcagctgacccctctaaaggcgtttcgacatgtaaatcacagaaaaaactcaactccatatcacatctgagttctcatattcttgctccagaaagttcaaaattcatgaaactgatgaaactagccaaatactcatatatgaagaattgggaatttcttcaggattgtgcaatccgcttcctttgtgtgctttcactggaccgctttggtgattatgtatccgatcaagttgtcgccccagttcgtgaaacttgtgctcaagctcttggtgctgtgctgaagtacatgcacccttctttagtatgtcatacattcaaaatcttgctgcagatgcagcacagacaagagtgggaagttcgtcatgggagccttcttggcattaaatacttagttgctgttcgccaggaaatgcttaaagatttgcttgactatatcattcatgcttgtaaagctggtctggaggaccctgatgatgatgtccgagcagtggctgcagaagccctgattccagctgccgactctttagttaggctaaatgaccaaattttgcatccaattgtggtgttgctttgggatatactgcttgaccttgacgatttaagcccatctacaagcagtgtaatgaacttgttagcagaaatatattctcaaccagagatggtcccaaagatgcttggcacagcagcttcaggggaaaagggagaatttgatctaaacgaagcaactcagattgctgagcaagaagacgaactaacatctattgaaaacccttacggtctagctacactgacaccccggctgtggccctttatgagacatagtattacttctgttcggcgttccgccatacgaacactggagaagcttcttgaggttggcaacactaggagttctgctggaacaaccccatctaaactctggccaacatcaatattaggtgatgcactgcaggttgtatttcagaacctacttttggagtcaaatgatgatattcttcagtcttctgaaagggcttggaaacttctacttcagtgccctgagaaggaccttgaatatgctgcaaggttatattttagtaattgggtacaacttgctaccactccatttggctcagcattggattctacaaaaatgtttttaccagttgcccttccacgaggaaatcgttcgagagctgctgcaaagattagatctgctaggctagaacatgagtacacaacaatgatctcgtttggttctacaggggaaagtatttcacatgaaaagcattcggacgttccctctattttttcgaatataattgttggctctgatcctgacaaatctgttactcatacacgggttcttacgtcaatggcccttgggctttttgcctctaagttgcccgtaagctcatggcaagtggttttaagtccactagcaaatcacctcatgtctctctcaggagtccagagacaagtggcttcaatgatcatcgtttcttggttcaaagatctgagaggcagagatcctgtatcagtgggtacattgctagcttttctatcttccttgaaagagtggctggtggacttattgacttgctctgatccagcattacccacaaaaggttctgtgcttccatattctgaactttcaaggacatacacgaagatgcgcaatgaagccaataatttgctccacttaatcgattcatgtgctgctttcaaagattatagtagcagcttaaaccttaacactgacgtgctgactgttgatgatgctatcaactttgcatcaaagcttttgttaccatctgaatctgatattccttcagaaactgagaacattttcttgaataacatagaatcagcaaaacaaggcctattgtctacatcaggttacttgaaatgtgttcagaataatttgcatgtgacagtctgttctttggtggcttctgctgtagtttggatgtcatgtttgcccagcaagttgaaccctgttattttacctttaatggctgccattaaaagagaacaggaggaagtacttcaagataaagctgctgatgcacttgctgagcttatatttagctgcattggccgcaagcctggccccaatgacaagctaaccaagaatctctgcactctaacatgcactgatgctagtgagacacctcaagctgcaataatcaactcaatgcaggttattgaggaccagaatttgctatcgattggaaagcgttttagcagtcatagatccaggggccatacaacgtctggtggcgatgaaaggtcaaaaatggagggttttataagccggcgtggatcagagttggctttcaagcatctctgtgtgaaatttggaccttcattgtttgaaaaccttcccaagttatgggattgccttactgagtttcttagacctgtaaaaacagaagatggtattccggaagatgatgcaagtattgcacagctgggcagatcgtatgaggataaggacccacagtcactcattaataatatccaggtcgttcgttccatttcacctcacttggctgagcccttaaggcctcaactgctaaatctccttccctctattcttgggtgtgttcgtcatcctcatgtggctgttagactagctgctgcaagatgcatcacatctatggcaaagtcattgaccgatgatgtgatggtactggtgatagaaaatgtcatcccaatgttgtccgatttatcttctgtctgtgcaagacaaggagctgggattctgttaagccttcttgttcagggtttggctgtggagttggttccttatgctcctttccttgtcgttcctcttctgaagtgtatgagtgacccagatggttctgttaggcagactgtgactcacagttttgctgctcttgttcctttgctgccattatcaaggggtgcttctttaccatgtggactaagtgaacgcttatctagcagtgctgaagatgtgcaatttctggaacagctccttgacaatacccaaattgatgatttcaagcttaatattgatcttaatgttgaactacgaaggtatcagcaagaagggatcaactggcttgcattcctccgtcggtttaagttacatggaattttatgtgatgacatggggctcgtggcccactgggaatatgaaatagagaagtacatagacagctctatcttgaaacctcttcagtacgttggttcttctcaggacagagtgacactccgtagtcagtttgataaggttaatgttatcataacatcatatgatattatacggaaggatattgattttcttggaaatatcacttggaactattgtgttctggatgaagggcatataataaaaaactcaaggtctaaaataacgtttgctgtgaaacagctgaaagcgcaacaccgtcttatcttgagtggcacacctattcagaataatgtgttggagttatggtctttatttgacttccttatgcctgggtttcttggaacagaaaaacaattccaagctgcatatggaaaacccttgctagctgccaaagattctaaatgttcagcaaaggatgctgaagctggtattcttgcaatggaggcactgcataagcaggtcatgccgtttctactgagaagaacaaaggatgaagttttatctgatcttccagagaagataatccaggatagatattgtgatctcagtctattgcagctcaaactttatgacaaattttccagctccaatgcaaaagacgagatttcaactatagtaaaagcaaatgaactggaggaatctgcacctcaaccaaaggcaactcggcatgtgtttcaggcattgcagtacctattaaaactatgcagccatcccttgcttgtaactggggagaaccccccaaatcatcttgtggatcttctgaatgaaataggtctgggatctggcagtgagcttcatgagcttcaccactcacctaagcttgttgctcttcaagaaatacttcaagaatgtggtatagggtcagaaatatctagtcctgatgcttctacagctgttgggcaacacagagttttgatttttgctcagcataaggcttttcttgacatcatagagaaggacctgtttcaatctcatatgagaagtgtcacatatttgcggctggatggctctgttgatccagagaagagatttgaaatcgttaaagcattcaattcagacccaaccattgatgtacttctgctaacaacccatgtcggtgggcttggcttgaacttgacatctgccgacacattggtgttcgtggaacatgattggaacccaatgaaggaccttcaggctatggacagagcacatcgattgggtcaaaggaaagtggtgaatgttcaccgtctcatcatgcgtggcacccttgaggagaaggtgatgtctctccagaggttcaaggtgtcagtcgccaatgctgtcatcaatgctgagaactcgagcttgaagaccatgaacactgaccagctgcttgatctgttcacatcaacccctgcttcaagaaaagcaagcgacgagcagagtaagaggaaatctggtggcaaaggcttgaagtccattcttaatggtctggatgagctttgggatcagtcgcagtatgccgatgagtatgatctgaaccagttcctggcgaagctgaacggctgagccaccaccggctggctcgtgtacagtgtataaagcaatttggggcaggttaattttgttgttgctgttgtttgatagaggaaggaaaagattagatgctaacagatataggtggtggttggggttacgatctcaatttttttggtttccatcttcctcaatttttgttttgaggagttgtatatactctgctcacctataatcaaagctgcagctcttatcagaatttcccttgattggtcatggtgactgttccatgtactttgttctgccgcggccgtagctatatggactgctgcagctgcaattcatagaaacaaaatacttcatagaaacaaaatattgtagaagccgcatttggattaaagacgcggcaagtcgcagcgaacctggaaaggtgaatgctgatatgcttg

SEQ ID NO: 213223 - DNA, 824 bp, Zea Mays
cgcccttatccataatacgatcatcactgtaaaatcttccccaccgcccatatctccctcttatcctctcacgttactctttcctgtttccagaatccactcgacacggttcctggtaccatggtcgcctcctattttcatctgatgaagcttggctccctgggaaatccttcgccaacacccttacctggaggtttctcccttgtgctggcgcctgcagggatccctgtgggtgctccatccgtttcctttcgcctacaacaacatcgtcgtgccgcgttgtcgactgtgttcagccccgagccatcgaccaccgaccccaacagcgccgcgcttccctgaccctgaccccaaacatcacaaagacctgcgcacgtgctcctcatcgaagtgctcgacaaaccttgcctcgccaacgtctcgccaagttgtcagacccgtcctcgagtttggtggagtcccaagcttgcacgccgtcgactccctgctcgcctcgcttcgttgtcatcgttcactatcttcgtcctcgtcgtctacctcgccggttctcgcgcccaactggccatcgtgctcgacgtgttttcctccgtgcagattcgcatgtacctttcactccatccgctagtcgcgtggtagagaagatcacgttatcggtggatcaatcgccttgtggagtaatttcttggaggctggtcgtcaccctgaagatttgtggcaaattattttcttagtcattggctcttcactgcaacaaaggaggtgagaatccaagaacgacgtgcaagtgattacaagtcagagtgaacagtacggtgttattgttc

SEQ ID NO: 213224 - DNA, 1664 bp, Zea Mays
gatcctactacaggcttcaaccgtctagcaacatttcagttgtgaaacaggcagaggctcttttggaccctgaccttttcaatatgttaaggttcactatagcagccatcccttttgtgccgctgttactaaaatcgctgaggaatatgcaaatcctttttagaggactagagttgggcatttgggtaagcgtggcctaccttgctcaggctatggggttagttacggctggtgctggacgtgcatctttcatttctgcactcacagttatcatcgtcccgttcttggatggtcttattggagcagaagtacctgcccatacatggtttggggcatttttatcactttttggtgttattatgctggagctaagtggttctccaccatgtgtaagtcggattatctacatggacaggttggtgatcttctgaacctcttgagcgccttttcttttgcaattcatatgctcagaactgagcatatttcaagaaatataaagaaagaaaatttcttaactcttgttggatgtgaggttagtattctgactaagactcattacctcagttatgcgagttcttctgttcgtcttgacaaggttcttaaacaagtgtaaaaccaggtgtttgttgtagcaatcctatcagcagcgtcatatacttttaaatgcttcacacaaaatgtacaacactggaatttgaaagtatggtctccatcagagttatttggtatggcgatgttgtttccttggccagcaattctatacacaggcatattgtcaacttcgttttgtttatgggcagaggtggccgctatgcgcgttgtatcagctacagaaactgcaattatttatggtctggaacctgtatggggtgctgcttttgcatgggtaatgctcggcgagagatggggcctgacaggatttgtcggggctatcttcatcatggctggcagcttgatggttcagatatatggatcaatcctagatgatgtatctagaggagacgattaccagatgaacatttaaatgttcatattacagaagatgaagcaagttgtaattcatgatgaagcaagttttttcccatttatagggtaggtagctacgagcaagtgtaaccaaactctcaaagtttgcccccccccccccacacacacacacacacacattcctccaaatggctttgttgttgttgagagtttctcatcgatatttcatcctctacttctcagcacaccctaaccgatctcctattttttttccctttacactgtattgttatggtcatgggccctgttcattaggtctggattgtcaaatttatggaaagagaggaggaataaggggaagaatgatgggctcctacatctagaggtctaggggagataaatgagagtcctccatccatctgggggatgtgatgacccaaggtggcagcgcataggcgagtatggtggaattaagtagcaggtatagagtattagctgagtctttcgagtattagtgcttgggtcgtattaatctttttatgggctgtaataggtgaattagccaaggcattaggtgtattaaaagttgaattcgagatctataaatgatgtaatgagttgttgataggggaataagaaatgaaatagaatagacacctgaaaccaactcacctgag

SEQ ID NO: 213225 - DNA, 589 bp, Zea Mays
caaccatcctcatcgcccttatccagaatacgatcatcactagaaaatcttccccaccgcccatatctccctctcttatcctctcacgttactctttcctgtttccagaatccactcgacacggttcctggtaccatggtcgcctcctatattcatctgatgaagctcggctccctgggaaatccttcgtcaacgcccttacctggatgtttctcccttgtgcgggcaagccgtccggcgcctgcagggatccctatcacgttatcgatggatcaatcgtctactggagtaatttcttggaggctggtcatcaccctgaagacttgtggcaaattatttttgttggggacttgttctcaaatgctgagttaagaacaaggcaacacaaatgttaatggttaaagaccttcgtctttcgaagcattatctccctgcggatataatgatcttcagacgaaggttatgaaggacataccttcataatttcagtatgtaataatgaaagcagaaacatatgaaacatagaaaagaacatgttaatcacattaaaccatcagattatttgtgttctcattatataatcatgaac

SEQ ID NO: 213226 - DNA, 1908 bp, Zea Mays
gctatggtattggtatggtagctagctagggttctgtaaccaatctcacccatcttttctttccttcgtcggagaaggggagaaaagcgtacctgaaacgattccctgcattccattccgctgcatacttgcattgcatctcatccctcctgctcctgcgtcctcctcctctatttctctcctgctgcttgctactacctcatcgatccattccatccatcgccgaggggggagggccgccgcccgcccgggtcgcatcgcatcgcctggtcggccggggactcggggcaggcgagcgacactagctataaaagacctcccgccgcctgcgactgggccgtgtgcaagcaaattaaagcgcaaggccgatccgagggtggactgtggagggccggccatggtgatgatgatgcggtcgtgcctcggcggtggcctgctgccggtggcggtcatgctctgcctcaacgtggtggcggcggtcatggtatcgctcgtcaaggtggccatggacggcggcatgaaaccgctcgtgatcgtcaccctgcagcagctcaccgccgccgtcttcctcgcgccaatcgcattcttcaaggagaggaagtcgaggccaaagctgacgctggagatcttcgcctacatcttcgtcagtgcggcgctcggcctgcgccatatattgcagggcagctcttcgtcagtacatgatcttcgtggccctgcgctacaccacggccaccttcgtgaccgccttctccaacatcgcccccgtgctcaccttcctcctggccgtcgccacgcggtccgaagcgctggacctcaagagcaggacggggttggcgaagctgctgggcacgctggtgtcgctggccggcgccatggtgctcaccctctacaagggcgtggcgctcacccacgcggcggcagcctcgcaggaccagcagcagcactcccacggccggttgccgccgagcgccgccgacagccgcggcaagtggacgctgggcaccgtggccatcctgggcaactgcgtctgcctctcctgctggttcctgctccacggccgcctcgccaagaagtacccgcacgtctactcctgcaacgcgctcatgtccttgctcagcttcctccaggtcgccgtcgtcggcctctgcacccagcgcagcatctccccctggatcgtcaccagcaagttcaacatcctcaccgtcctatacgccagaggagccgtgttcgtggccgccttcataccggtggtgcagatcatcgtctccgtcatcgacttctccatcctgcacgagcagctctacctcggaagcgtgctgggatcagtgctagtgataggtggcctttaccttctgctgtggggcaagaggcaggaggccctgcactgtcctcctcctcctcctccaaaggttgccgaagaagaccctgctgacaaagagcagcagcaagtgcagcacaactgaagacggacagcatcctctgactgttggtcgtttggttgtaacagtgccagcaataagatccctctgcctccttttcttttcttttggtgtctcaggggggtgggcaatgttccttccttctcagatcgatcaccaacaaagtgtttagattctaatccaaaacagtagaatggtcttaaatacagtactcctgcttactgatgatagcaacaccactaccaactaggcctctggagaaatacagagtagagtgtgtgtgcgcgcaatactggagagcagaatattcctgcaaatatagtacgcagttgctgtccgcctttttcttatgaggacatatctggtgcacatggaggattggtgcacatggtgcacatattaaatcaccaccacttattttaaatctaacgcctctaattgatcattcaatttacaaataacaccttcc

SEQ ID NO: 213227 - DNA, 2554 bp, Zea Mays
ccttccccgtatggccaccgccccatttagattctgttcctcctaaatctcctccccgttggcccctgcgctcttcacaaaatagctctctgcctcacagcaagcctgtgcgtctcatattcaaggagcctgcctctgaggtggttgcaacttgcttgggacgaggatttggattttggaggcaagattggaccgcagactgtgagatccatccaatccaacaaccgaatccaatccaatccaatcagagaaaaagaaaaaaggcgaaaggctcgtgtctgtgtggcaccacatcttgccatcagggaaaatggggctgtcaatctcgtacccaccagacgactacctgccagcagtggaggacgacatggggcggctgttcatccggtctctcagcttcgacgacatggaggccgccgccgattcgccttcgtattcgccttcggcattgccccccgcctttggctccgggaagctgatcatggagggctccctgggcttcttcgaaagaagagaagctgacagcgtccagatgcagaacgtgctgtccatcaggaatcctaaacctcctgatagagaagcctgcagcagcgtcagtcccggtgctgcgacagctacttgtggctcatcaagattcgaccgtccaccagattatgattaccccatggtcgggatgaacagccccaggcaccagagcgcggccgtcaggctgcagaaggtgtacaagagcttcaggacgaggcggcagcttgcggattgcgctgttcttgtggaacaacgatggtggaagttgcttgattttgcactgctcaagcggaactcggtgtcattttttgacatagggaagcctgagactgctgtctcaaaatggtcccgggcaaggatgagggccgccaaggttggaaagggtctctccaaggacgagaaggcccagaaacttgcgctgcagcactggctcgaggcgattgaccctcggcatcggtatggccacaacctgcacttctactaccaccgctggctccactgccagagcaagcagccattcttctattggttggatgtaggagaagggaaagatgtcaacttagaggagcattgccctagattcaagttacacaagcaatgtatcaagtaccttggccctaaagaaagggaaacctatgaggtggtagtcgaggacaagaggctgatgtacaagctgagccgtcagatagtcgacacgaccagaagcgtcaaggggaccaagtggatattcgtgctcagtacatgcaagacactttacataggccagaagcagaagggcgtgttccagcactcaagcttccttgcagggggagccacatctgctgcaggaagactggttgtggaggatggaattctcaagagatgtgttcgtttcaggctgtgtggcctcatagcgggcattaccggccgacggagcagaacttccaggagttcatgaacttcctcaaggagaggaatgtagatcttaacaacgtggtgttgagcccatcagaaggtgaagaagatggcgacttcagcctggcgagcagctactctcagctggacctgacccaactctgccagcaagaagacagccaagaacaagaggcacaatctgcgcgacgccatggccaagtcgaagccgaagccgaagctaggacctgcagcctggagcccagcctgccatctacagagacctgcagcacgccggcgacgatcaggaagagctcctcagacaaccggctgcaagggaagcggccgcccaggctgctgatcagctcaaacaacatagcgccgctgccgcccaccacgcacagcaacgccgggccatcgcccggcgggaaggacgacctggacccggactcggccatgatgggcgagtgcctcgacttctgcaagcgaaacctgttcgcggaggacgggtacgaggaccgctacctggatgacctcgcggagctgccggaggcgctgatcctgaaccgcatcaactccaagcgggccatgcactcgtaccagctcgggaagcagctgtccttccactggagcaccggcgccgggccccggatcgggtgcgtccgtgactacccgtccgagctccagttccgggcgctggaggatgtcagcctgtcgccccgtggcggcggcaggtcggtgaggttcccgtcgcccaggccgggcgcgctcacgcccaacagcatccctgcggccaagtgtggctctcttacggcggacggcgacggcgtgcacgcgtcgctcaagcccaggcagaggagtgccacttggactgcgttctgagggacataccatgcatgcatgcatgctgcttccttcagcttttttttttcacagcattgtgacgataaaccgagggaaaagtgagatagcatgctccttcacgtagacgaggatagaaggatcagcattgacagacatttggcaaacactgggtaatgccatattgtaatggtacctataggttgatgacaaagctcttgctgttttataagggcacggaaagagcgaatatggagtatcccctcacttcagtgag

SEQ ID NO: 213228 - DNA, 2529 bp, Zea Mays
gccacctaccttccccgtatggccaccgccccatttagattctgttcctcctaaatctcctccccgttggcccctgcgctcttcacaaaatagctctctgcctcacagcaagcctgtgcgtctcatattcaaggagcctgcctctgaggtggttgcaacttgcttgggacgaggatttggattttggagattggaccgcagactgtgagatccatccaatccaacaaccgaatccaatccaatccaatcagagaaaaagaaaaaaggcgaaaggctcgtgtctgtgtggcaccacatcttgccatcagggaaaatggggctgtcaatctcgtacccaccagacgactacctgccagcagtggaggacgacatggggcggctgttcatccggtctctcagcttcgacgacatggaggccgccgccgattcgccttcgtattcgccttcggcattgccccccgcctttggctccgggaagctgatcatggagggctccctgggcttcttcgaaagaagagaagctgacagcgtccagatgcagaacgtgctgtccatcaggaatcctaaacctcctgatagagaagcctgcagcagcgtcagtcccggtgctgcgacagctacttgtggctcatcaagattcgaccgtccaccagattatgattaccccatggtcgggatgaacagccccaggcaccagagcgcggccgtcaggctgcagaaggtgtacaagagcttcaggacgaggcggcagcttgcggattgcgctgttcttgtggaacaacgatggtggaagttgcttgattttgcactgctcaagcggaactcggtgtcattttttgacatagggaagcctgagactgctgtctcaaaatggtcccgggcaaggatgagggccgccaaggttggaaagggtctctccaaggacgagaaggcccagaaacttgcgctgcagcactggctcgaggcgattgaccctcggcatcggtatggccacaacctgcacttctactaccaccgctggctccactgccagagcaagcagccattcttctattggagaagggaaagatgtcaacttagaggagcattgccctagattcaagttacacaagcaatgtatcaagtaccttggccctaaagaaagggaaacctatgaggtggtagtcgaggacaagaggctgatgtacaagctgagccgtcagatagtcgacacgaccagaagcgtcaaggggaccaagtggatattcgtgctcagtacatgcaagacactttacataggccagaagcagaagggcgtgttccagcactcaagcttccttgcagggggagccacatctgctgcaggaagactggttgtggaggatggaattctcaaggctgtgtggcctcatagcgggcattaccggccgacggagcagaacttccaggagttcatgaacttcctcaaggagaggaatgtagatcttaacaacgtggtgttgagcccatcagaaggtgaagaagatggcgacttcagcctggcgagcagctactctcagctggacctgacccaactctgccagcaagaagacagccaagaacaagaggcacaatctgcgcgacgccatggccaagtcgaagccgaagccgaagctaggacctgcagcctggagcccagcctgccatctacagagacctgcagcacgccggcgacgatcaggaagagctcctcagacaaccggctgcaagggaagcggccgcccaggctgctgatcagctcaaacaacatagcgccgctgccgcccaccacgcacagcaacgccgggccatcgcccggcgggaaggacgacctggacccggactcggccatgatgggcgagtgcctcgacttctgcaagcgaaacctgttcgcggaggacgggtacgaggaccgctacctggatgacctcgcggagctgccggaggcgctgatcctgaaccgcatcaactccaagcgggccatgcactcgtaccagctcgggaagcagctgtccttccactggagcaccggcgccgggccccggatcgggtgcgtccgtgactacccgtccgagctccagttccgggcgctggaggatgtcagcctgtcgccccgtggcggcggcaggtcggtgaggttcccgtcgcccaggccgggcgcgctcacgcccaacagcatccctgcggccaagtgtggctctcttacggcggacggcgacggcgtgcacgcgtcgctcaagcccaggcagaggagtgccacttggactgcgttctgagggacataccatgcatgcatgcatgctgcttccttcagcttttttttttcacagcattgtgacgataaaccgagggaaaagtgagatagcatgctccttcacgtagacgaggatagaaggatcagcattgacagacatttggcaaacactgggtaatgccatattgtaatggtacctataggttgatgacaaagctcttgctgttttataagggcacggaaagagcgaatatggagtatcccctcacttcagtgag

SEQ ID NO: 213229 - DNA, 2917 bp, Zea Mays
cttcatcatgcatagatgtggaggtgatccccatctcagatggcccagtggggggctggggcgagacatgcatttagggagtcatgatgaggcgagctcagcccccagggaatgacggcggcccagcagttgagttacgctggggcaaggtcagcctgattgagccccggcggtccatcatggagagacaatgccctagcagggtcattaatatcacatgcgcctgtagctgccttcataatattactctggtggatgtccacaccttcctcgggaatacacgaaatctgtgcatcagccacaagatactccacgcgctctgaggaataagccgtcgggtgacatgaatgcgccaagcgctccccacagttctcgtctaccgtgacgcacttaggcgtcgagtccagagccctaggcgcatgcttagcccgcgccccctcggaccctgtggacccaggcggagatgaacaggtcgccgcggatcctgggagcctcctggacgtcgaggctgctggtcaggcttattgcgatcttcattagcatcaggccctccgtcagaagccggagggaggggaggttgagaaaccatggatgatgactgcaaattcgccgggaaaaacctgatggaaatcttgtatgttaggcatctcttttgttgcatgtcaagatctggctcaataatatgaaggtccatgtcactatgcagcctttctggatcaaaacaccatgcccgcaccttgaaggatgagaaatccctcacactctcagtgtccggatgcaagtcagaaatccagcaagattcatgcaagatgtgctctgccgttgaacggaaccaagcatgctcaggaatacctctaatttcaacatctcagtgtccggatgttgatggcatgttgggaaggcgggagaaccctggagaacatgaagccatgcggaagatgaaaaatgagtttatggtgaactgggatggtctgagaacaagggagaaagaacgtgtattagtacttgctgcaactaacaggccatttgatcttgatgaggctgttgttaggcggcttccaaggaggttgatggtgaatttgccagatgcatcaaataggagaaaaattcttagtgtaatactagccaaggaagatttggcagacgacgttgatctagaaactatagctaacctgacagaagggtactcaggcagtgatctcaagaatctgtgtgttactgctgcacaccgtcctattagggagattcttgaaaaggaaaagaaggagagagcttcagcagaagcagaaaatagatcattgcctccgtcacacactagcaatgatgtccgtgcattaagaacaagtgatttcatacatgcgcatgaacaggtgtgtgcaagtgttccctcggattccagtaacatgagcgagcttgtgcaatggaatgatctctatggagaaggcggatcaaggaaaaagacaacgctaagctacttcatgtagcttaggttataaatatattgggagaagtgccctggcacaaagcagcaatagttggaggcggtgcagttggaaaaaaaaagctatgctcatctgccagacatccatatcaaagagaattgatggttcaggtggagcggaatagaatggaatggaatagtatacatacacatggttgctgcctctgctctgggccatgcatcatgcatctggacaggacggctatcctggcttgcagttgccctatgcagttttgagtgcaatggtcaccatctgtgaagcacggataccacagagatcctggccccaaccactcttttcacaaatggagctgaggacctttggagttctaccaaaagtgatcttaaatctttgttctttgactttccgttttgtgaacggaaggccccactctgctagtatggattgttgatcctccgtttctctggtactgactgaactgctcatacaaaactcgttcaacaggcagaaatgctgcctggtggccttctagagtgcttctttgacgccgcagagagcacatcaaaaaaaatgtgtttgtttcgaacgatttgtgctgcattccattcacggcgatatcaggtgccgttgtttgtgtttggttccgcaatcaagggagtgaaagccattagcacatccaatcaaacaaatagcgatatctctttcactgtaccagttagcgctggtctcggatgctattaacattgctgttgtctgtctcggaaccaaacaccgcctaactcgtcggctgttaaatatttctgaactgaattactgcacttggttggggtttcatgcttatcaagttggcttatatagccaacaatactttgtgcagttctgcatcctctgcctgcttatgcgcgatctcattggctgagcggtacgaagataaaacggtagctaatccgaagcgatggcttctctttttctttctacggtattttgtctctatgaattacagttacagcagtcagaacagctgatttaaaaccgcagcgaaaaggctgattgccttgcccatttttgggtgggtggaggttaatacagatttctgtaatttttttactttaatattgtttgacatattgtgcaaggcaaatgatttcctaatgatttgttctacttgatattgtaatccatattgacctatatgctatgctcagttccttagagcatctccagtacttgatattgtaatccatattgacctaggggaaaaaaaggagaatttaacctgatgacactggtggactatgctatgctcagttccttggaacatctctagtagttttgtaaaaaaatctctctaaagacagatgtaaggagttgctacataataatagggagtaaaaatatctgtactctcatgtagtctttatttttagttaccaaatattataaattatgcctgc

SEQ ID NO: 213230 - DNA, 2388 bp, Zea Mays
ccagagccagagctgctagctctcaatctatctgtctctctccctctatgcccggccccccttcaatgccttcaacttcaagtcaagtcttctttaattaacaacaaggccaccaccacattcaaacgcacacgtacataggggcagctagctcgctcttggttccttttcctccgtcgttgctcaggtccctcctcctgcacacccagagtgtgcatgcgtgagagtacatatatatagtaggagaatgatgatgatgaacaccagcgccgccatgtcgccaccaagtaccgacgtcgtcgtcgacgacttctccctcggcgccatgcatcagccgtacgtcgtcggcttccacgccgacgccggcatgcgcatcatgcccagcgtcgtcgtcgataggccgctgctccagcagaacaccgacctattagaagagtacgacagtttcgacttcgcggccacggggctactaccgttaccgttccaagaactacctggtctcctgccccccgcgaattacctgccgctgccaacgccaagcatggccatgtcgccgccgtcgctgaggctgctgacgctcccgggcgtgccagtgcctacggcggcggcggatgtcgtgtacggcggattgggcgggggcggcgcgggagggccgtcgttcctgaagcgggagcacggcgtcggcagcggcggcgggaggatcggcggcctgaacctaggacgccgcacctacttcacccccgccgccgtggaccggctgctcggcggcggcctaggcggcgtgggcctcggcatgagcgtgctggggctcggggtcggcgccgctcaccaccaccagcagcagccgccgcggtgccaggccgagggctgcaaggccgacctctccgccgccaagcactaccaccgccgccacaaggtctgcgagttccacaccaaggccagcgccgtcgccgccgccggcaagcagcagcgcttctgccagcaatgcagcaggtttcatgtgcttgcggagtttgacgaggccaagaggagctgccggaagcggctcaccgagcacaaccgacgccgccggaagccgatcagcgcacagggcaataatgaccactcgtcgccgccaccgccggcgccaaagaaagcggatacttgcataaccacctcgtacaacgatgaccccaagagtaagaagcattcgagatcatgcatctagctgtgatgtcatcagcatgcatatataatctctgcactcaaagatattctatagctagctaactccacatgcacctcgatgctacttcaccagtatcagtttcatcgtcacatcgtctgacctgacgtacatgcattgcacatgcaatcatgcgtacgtgcacggcgccaaagtttcgtcgtacgtacgcgtgtgcgtacgggtacgtgtgtgggatcaattcgcagctgcctcagtgcctgtgcctccacactagatcgatatacagattgatatgatgcaacccctgctgcatcatcagatccatttgtgctgcatcaatatgcttcgagcaccatatgcattcgcaaagttatttttgtatgccgcaacgtatgtactgacgtgcccaatatcatcattattgtacgtacaacgagctagtagcaggtgcgagcaacacggctgcagccatctcgccgaatggcggcagcggcggcggcagctgcctcgacgtcctggacaacggccagataacgagcagcgcgacggcggcggcaccgacggcgctatctctggcagcgccgcccccgccgctgcatcacgagctgcatcacgagaaggacgggagcctggactccgtgctgatgcagcggcgggttcattattggtccatggccggcggcgggacgacgacgacgaagagcatcgctgtttcatcacctcgctggtgacgcagacccagcagcaacagcagcacggcggcaacgtcttgtcgtgctcgtcgatcggtgtcagatcagcgcagaacggcggccagcaacggtttctttgaggtggacttcatctagtgcgatgcatgcacgtaaaaggggcagggaaaagcatatagcgtcgctgtattgtttctgagatgggaaggatgcatggcgtgaggaaagcaacaaaggctagggtttggttggttccactctagctaggggtggctagcagccttttctttttactgtgtttagtacttgggctagctagtgctagacttctctgttatattaattactagagggaaaaatataatgctggtgtagtatgtgtattcctttttcctgttgctaacaatgtgtatatactattacgtgcatgcatctgagtttacaactaatggttaattaatgtagctagctagggtgtatggtatggtg

SEQ ID NO: 213231 - DNA, 3247 bp, Zea Mays
accggcggcaaccctgcgaaaatgctttgtgttggaagaatttgttcaagatattatgcaggacatgctgtatcttcattacttgtgggtatacgatgtttgtttgctcctcaaagcccacaccatgtcggctccaagtatcatgggactcaccaaagtagggacagtagtaccaaaaccttgaaaccagagctaaatattggtagatgtggcgcttgcttttccactgtcacaggaaccattctagtccaagctcatgatccatctcagctagcaatggagatagagaatgcaattgatcagcagagatttgatgatgcatggagggcttatgagaagcatgttcacatggatggacttccaagaaagtctgttttgagcaagctcatcactggcttagcagagagctgtgatcatcactggcttaagcagtcctacaatgtggtcagtcatgcatttgaagagaagcaagaattgttggataaggaacccctaatttacctatccctcattcttgcacactgtgctctgcctaatcttgctttaaatgttgtgaggaagttggtaaagatggaagcatacccacctgttgcagcatggtcggcaattttagctcatatgtgtcaaactaacactggtgcatttctcggtgcagaccttgtaatggagcttggttatcttttccaaaataatagagttgatccacggaagaagagtaaccgtcctttgctatcaatgaaacccaattcatttacattcaacatagttttgaccgcttccctcgtgtttggcactacaagaaaagctgagcagcttctcgaactaatgccgaggataggcgtgaagcctgaagtcaacttgttgattgttatggcccacatatatgaaaggaatggtcgcagagatgagattcggaaattaaagaggcatgttgatgaagcttatggtcttagtgaatcagaggttaggcagttttatgattgcttgctctcctgtcatttgaaatttggggattttgattatgcagttgatatggtactggatatgattaggaaaggtaagaatgcaaagcggtcattggaagcagctaaagcagttcttgaagctgttgaaaatagaaaattttattttccttatgagaaagctgatgctgaaaacccacgctcttgtagtagccaaatgctaagtcacgcttcattcttcaaagacaacagctttgggagacttgaattggacgcaagagaatcagtcaggctattgacagataagctgcaggaacaggttggactggttaaatctgagcatggcattctccatccaactgaaacaatgtatgccaagcttgttaaagcttttctggaagcagataagatcagtgcattggcatcgtttcttgtgaaagcaagcaaagaagattctcctgtatctgttgaaagctcctttgttgttcaagtgataaatgcatgcatttctcttggcttattagagcaagcacatgatcttctggatgaaatgagattttctggaattagggttggttcatccatttattcatcactcctaaaagcctattgcaaagagggacaacatgaagatgacataactgcacttttgaaggatgctcaacaagctggcattcagcttgattcaagctgctatgaggatttgatacaatctagggtgaatcacagtaacaccacaggtgctctccatctttttaaagaattgaagaatttgaatgttctgaaagctggtcacatggaatttcagagaatagtgcaaggctctgatgacaatgaagctgctttgatgaccaagctagtggaggaagtcaggagtgatcatacagttgatcatgctgttcatgaatggaataatgttatccatttcttctgcaagaagagattgatgcatgatgctcacagagcactgaacaagatgcgagcttccggccatgtgccaaatgcacaaacttttcattctttaataactgcttatgctgccattggtggcaaatatgtggaagtgacagatttgtggggtgaaatgaaacttctggctagtctaagttctatgaaatttgatcaggagctcttagactctctgttgtattgttttgtgagaggtggtttcttccttcgagccatggaagttatagagatgatggagaaaagagagatgtttatagacaaatataaatacaagtccttgtggctcaagtaccacagaacattgtacaaaggtaaggctcccaaggtgcaaacagaagcacaactaaaaagaagagaagcagcaatacgtttcaagaaatggattgggttgacatgagagcaagaagttcaactcaagctatatgaactgatcaggaattctttgattatctgctgtatggatggatctttacaaattctgtaaaatcgtagttgcgaagtttgttagaagaaatgcttcagccaacacttacaatataatggtgttgcatggcattaagaaagggggcatggcattaagaaaggggtcttggagcatttgagcgcgtttgggagtcttggacatcttcaaagtgcagtttcttcctttggcttgtcatgcacaacagatgctggaccgcagactgtcttactaaaagaggactaccccaccccagtgcgtgtcccctttgcgaccaagaaggggaaacaatacaacatcttctcatcttttgcgtctttgcaagacagttctggtacttcttgttgcgcaggtctgggttgcctaatctttcaccagacaatgcttcttgcagccttgatgactggtggagcagcgctgtggagaaggttccccgtgatctccaatcaggcttcaattctctagttattcttggcgcttggagcctctggcgtcatcgcaacgactatgtgttcaatgggaggtcgtcgagcctagcgagtactctcaccctcgctggcgatgagctcaggatgtggtgtagtgccggggcgaaagggttgaacctgctttcaactcttgtgtttatgcttgacccaggggatagtcttgtgtcttgttcagagtggttgtgtgtggtggctgtgttgcgtcttgtgtgtcttgttgtgtcatgtgtgttgtgttgtaccttcttatatctattaatggaatgatacgcagatctcctgcgtgttcgagaaaaaaaagaaaaggggcttggtgcattttcaaggaatacaatagacacctcatgattactgagagttggatttag

SEQ ID NO: 213232 - DNA, 3266 bp, Zea Mays
aaaccctaacaccgtccactcccgtcggccaccagccacctccatttcaaatacagtttccaccttcctcctccgcctcccacccctcgctgtctccggcgagacccggaaatggatctcgtcgcctccccctccaggtcaaaatccaagcccagatcctcgccagcgaagcccgtcgccgcccccgctgagtccaggatggacctctgcaccccgtccaagcccacgcccaggcggaagtccaaaacgacggcctcgccggcgccgatgtctccggcgacgccatccaccgtccgacgctcgcgtcgccttcttgaaacccccaccaaagcctccccggaggtgcaagtgaaggctacgcccatctccagggctaagcgcaccgcgccgtcaccgaaaacccctgttcagcgcgagaccaagaggcagaggcgacacccgaggaagagggcatactaccggaaggtggtgtatgatggcggggagttcgaggtcggcgatgacgtgtacgtgaagaggcgggagacggcggagtctgacgcggaggaccccgaggaggaggagtgccgcgtatgcttccgcactggcggcggggttatggtggagtgcgacgcgtgcctcggcggattccacctgcgatgcgtgcgaccgccgcttcggagggtgcctgaaggtgattgggcgtgcccttactgcgaggccgagcgcgccggtaaggtggtcgagcggcccaggccgcctgaggggaagcgcgtcgtgaggaccgccaaggaaaaactcctttccagcgacctgtgggctgcacgcatcgagagtttatggagggagcctgatgggacgttctgggcaaaggtcaggtggtacattatccctgaagagactgcagcaggaaggcagctgcataacttgagaagagagctgtatcgtaccaatgatcttgcagacattgagatggaaacaatccttagacattgttctataatgtgccccaaagactttagggatgctaacaacggaggggatgatgtattttattgtgaatatgagtatgatatacattggcataattttaagcgtttggcagatattgatgatgagccagagacaaaggaagatctcagtgacgagccctacaatgctggtgatgattataacagtgacactgatgaagattcagactatgacgaggaggaagaatccacatcatctttctctgtcagaaggaatcaatcacatgaatctgcggcgaattcaaggaaaggtagaatatatggcctgcaaaaaattgggatacaaaaaattcctgagcatgctcggtgccaccaaaagactgagctggagaaggctaaagcaaccctgttattggcaactcttcctaagtcattgccttgcagagataaagaaatggatgagatatcaatatttgtaaaggatgcaatctgcaacaaccaatgcctaggacgctgcctttatatacatggtgtacctggcactggcaagactatgagtgtacttgctgttatgaggaggctgagatctgaatttgattctggaactctgaggccatattgttttatcgaaattaatggtcttaaattagcatctccagagaatatctacaagggtggtactaaaattggaaagcaagcaaaccagccaattgttttgctgatcgatgaacttgatcttcttatgacaagaaaccaatcggtgttgtataacattcttgactggcctaccaaaccaaattcaaatctagttgttataggtatagcaaacacaatggatcttccagaaaagttattgcctcgtatatcaagtcggatgggtatccaacgactgtgttttggtccatacaattatagacaactgcaggaaattataacaagccgtttaaagggtattgatgcctttgaggaacaggctattgaatttgcttctagaaaggtagctgctatgtcaggtgatgctaggcgagctttagagatttgtagacgggcagcagagtttgcagactaccgtgtcaaacagtctcgacagtctgcacagactactgtttctgcaaagaaaggtgatgctgttgtttccatgggtgacatagaagctgctattcaggaagtcttccaggcacctcatattcaagtgatgaagaattgcccaaagtttggaaaagttatactggttgccatggttcatgagctgtacaaaagtggactaggtgaaataatgtttgataagttagcaacaacagttttctcctggtgccatgccaacagagaactattgcctggatacgacactctcttgaaaatttgttgcaagcttggtgaaagcaagatcatcctctgtgaagagggtagtaagcacaagttgcagaaggttcagcttaactatccaagtgacgatgtgacatttgccctcaaggaatccccagatcttccttggctatccaagtacttgtgaggttcatattacattaaccattaattcctggcgttctgttgcatttctgttctctttggaagcaacgattcactttacctgcagaccttgcatacacacgtcccatggtcgatctgcaaaggaaccatcgaaggatgtcggcatggcgctgcacccaagggatcacgcatatttaatcgcacaacaggaacataaaacgttaagaaatatgtacgtctgcaatttcgtctccttcaaactatggtgttgtttgtgttgtattgaactgccgcgtgtgagctgatccaattgttttctattgccatctttcagtaactatatacgaattgttcgttaaacattgacagttttgaataagaaacattgagatatcaaatttgtactttgccggccccagtgtgatgaccatctaagagtatatttgtttgagttgtatttttttatgttttctaaaaagcggttgttggtttttttgacgctgagagtcgacgatagcttttttcgataatgttattagttttctaaagttaggaagctcgaaagaaatctttaaaaagccggccctccgtttgatcgttctgtcgccgtcccctcctcttctgtcctaacccaactacaacagccagtcaacacaatttcccccacaacttgtgtggacccagacgagagtggaaggcacgagcgacatcatgagttcctgaaggtatgcgtcccacggttgtatccgtagtaggagaggtaccacctgacgaacttcttcaaccccatctccaggctcgtcgtgggcttgtagccgagctgct

SEQ ID NO: 213233 - DNA, 3255 bp, Zea Mays
aaaccctaacaccgtccactcccgtcggccaccagccacctccatttcaaatacagtttccaccttcctcctccgcctcccacccctcgctgtctccggcgagacccggaaatggatctcgtcgcctccccctccaggtcaaaatccaagcccagatcctcgccagcgaagcccgtcgccgcccccgctgagtccaggatggacctctgcaccccgtccaagcccacgcccaggcggaagtccaaaacgacggcctcgccggcgccgatgtctccggcgacgccatccaccgtccgacgctcgcgtcgccttcttgaaacccccaccaaagcctccccggaggtgcaagtgaaggctacgcccatctccagggctaagcgcaccgcgccgtcaccgaaaacccctgttcagcgcgagaccaagaggcagaggcgacacccgaggaagagggcatactaccggaaggtggtgtatgatggcggggagttcgaggtcggcgatgacgtgtacgtgaagaggcgggagacggcggagtctgacgcggaggaccccgaggaggaggagtgccgcgtatgcttccgcactggcggcggggttatggtggagtgcgacgcgtgcctcggcggattccacctgcgatgcgtgcgaccgccgcttcggagggtgcctgaaggtgattgggcgtgcccttactgcgaggccgagcgcgccggtaaggtggtcgagcggcccaggccgcctgaggggaagcgcgtcgtgaggaccgccaaggaaaaactcctttccagcgacctgtgggctgcacgcatcgagagtttatggagggagcctgatgggacgttctgggcaaaggtcaggtggtacattatccctgaagagactgcagcaggaaggcagctgcataacttgagaagagagctgtatcgtaccaatgatcttgcagacattgagatggaaacaatccttagacattgttctataatgtgccccaaagactttagggatgctaacaacggaggggatgatgtattttattgtgaatatgagtatgatatacattggcataattttaagcgtttggcagatattgatgatgagccagagacaaaggaagatctcagtgacgagccctacaatgctggtgatgattataacagtgacactgatgaagattcagactatgacgaggaggaagaatccacatcatctttctctgtcagaaggaatcaatcacatgaatctgcggcgaattcaaggaaaggtagaatatatggcctgcaaaaaattgggatacaaaaaattcctgagcatgctcggtgccaccaaaagactgagctggagaaggctaaagcaaccctgttattggcaactcttcctaagtcattgccttgcagagataaagaaatggatgagatatcaatatttgtaaaggatgcaatctgcaacaaccaatgcctaggacgctgcctttatatacatggtgtacctggcactggcaagactatgagtgtacttgctgttatgaggaggctgagatctgaatttgattctggaactctgaggccatattgttttatcgaaattaatggtcttaaattagcatctccagagaatatctacaaggttgtatatgaacagttgagtgggcatagggttgggtggaaaaaggctcttcactatttaacagaacatttttcaggtggtactaaaattggaaagcaagcaaaccagccaattgttttgctgatcgatgaacttgatcttcttatgacaagaaaccaatcggtgttgtataacattcttgactggcctaccaaaccaaattcaaatctagttgttataggtatagcaaacacaatggatcttccagaaaagttattgcctcgtatatcaagtcggatgggtatccaacgactgtgttttggtccatacaattatagacaactgcaggaaattataacaagccgtttaaagggtattgatgcctttgaggaacaggctattgaatttgcttctagaaagctgctatgtcaggtgatgctaggcgagctttagagatttgtagacgggcagcagagtttgcagactaccgtgtcaaacagtctcgacagtctgcacagactactgtttctgcaaagaaaggtgatgctgttgtttccatgggtgacatagaagctgctattcaggaagtcttccaggcacctcatattcaagtgatgaagaattgcccaaagtttggaaaagttatactggttgccatggttcatgagctgtacaaaagtggactaggtgaaataatgtttgataagttagcaacaacagttttctcctggtgccatgccaacagagaactattgcctggatacgacactctcttgaaaatttgttgcaagcttggtgaaagcaagatcatcctctgtgaagagggtagtaagcacaagttgcagaaggttcagcttaactatccaagtgacgatgtgacatttgccctcaaggaatccccagatcttccttggctatccaagtacttgtgaggaccttgcatacacacgtcccatggtcgatctgcaaaggaaccatcgaaggatgtcggcatggcgctgcacccaagggatcacgcatatttaatcgcacaacaggaacataaaacgttaagaaatatgtacgtctgcaatttcgtctccttcaaactatggtgttgtttgtgttgtattgaactgccgcgtgtgagctgatccaattgttttctattgccatctttcagtaactatatacgaattgttcgttaaacattgacagttttgaataagaaacattgagatatcaaatttgtactttgccggccccagtgtgatgaccatctaagagtatatttgtttgagttgtatttttttatgttttctaaaaagcggttgttggtttttttgacgctgagagtcgacgatagcttttttcgataatgttattagttttctaaagttaggaagctcgaaagaaatctttaaaaagccggccctccgtttgatcgttctgtcgccgtcccctcctcttctgtcctaacccaactacaacagccagtcaacacaatttcccccacaacttgtgtggacccagacgagagtggaaggcacgagcgacatcatgagttcctgaaggtatgcgtcccacggttgtatccgtagtaggagaggtaccacctgacgaacttcttcaaccccatctccaggctcgtcgtgggcttgtagccgagctgct

SEQ ID NO: 213234 - DNA, 999 bp, Zea Mays
ggcctgatcagggcccggcgtgcttcatgtaagctccggcccgatcgatgagaggagtcagacggaggcaaggccggggtcggcagcagaggggagcagagagatctcattctccgatccgcccaggccaccatggcggaggatgctacgagcagccacccgtcacgctacgtcaagctcaccaaggaccaggacgcccccgccgaggacatccgccccggcgagctcaaccagccagttcacgtcccgcagcagctcgaaggccggaggtgtagcgagtgcggtcaggtcctgcccgagagctacgagccgcccgccgacgagccctggaccaccgggatcttcggatgcaccgatgacccagagacctgccgaactggattgttttgcccctgcgtgctgtttgggcgcaacgttgaggctgttagggaggacatcccttggacaactccttgcgtgtgccatgctgtattcgttgaaggagggatcacgctggcgattctgacggcgatatttcacggtgttgatccgaggacgtcattcctgattggagaaggtctggtgttcagctggtggttatgtgctacctacactggcatcttccgccaggggcttcagaggaaatatcatctcaaggagcatcgcgagaggacgggacggcttgcagagaacaacgcagtgcccatgacggttgtgaacccgcctccggtgcaagagatgagcatgctggaggaggtggaggagaagggagcagagaagagtgaacacgatgatgtggaggtcattcctctatagataatagggtcggagtccgagtgaggatagcactagcagcatcagatgacgatcacaacttctggtcattcctctatagttagttagttattgatctttcaacaacaaaatgtggtggtgtggcaactgtccatttttattatcccaaataataatactgtactacgttacggcccacgcccaatttttctttcaatctttcgc

SEQ ID NO: 213235 - DNA, 1010 bp, Zea Mays
ggggcaccctccggaaatgttctagagccctcgagagcgccagctgaaccttctccaagactccaactctcgcattccctccttttttttaattccccgcgccacgttccaattccaactctgcaccgagccctgcccacattgcaattcgactgttccacggctcgcttcgattacgcgatacgcggtcatttacgagcggggagtagcgcagcgcagcggccggcgcgcgtcagaagtgcccatggacgccgcggcggtgctgaagcggaagggcgaggaggcgcccgaggcgtggctgcttggcggggtcgtggtccccgccaccaagatccgccgactcacaccatgctgcaagaggcgagcaaccacagagctctgttcgaggagatggcggccagggacgggaacctcaacctggccatggtcccgtgggcgcctcccgaggtcgatgtccatgccgcctccagctccacagcggcggcaatggaaatggtggacgctgatcaggacggcgacggcgcatccatggaggtcgagcacgacgttgagggccagaccacgccaccagctggcggtgcgctgcaggtggaggcgttcaaccaccattaccagcagcagcaccagtggccagcgcagcactgcgttgcgtcgccgcagctacagctcccggccgcgagctaccaggcaagccctgtcacgtggtcgtggtgatggcgcgaactagagcagaggactgcagggggagacatagacacatagttgtcgtagactagtagtagtgattagtattaatctcctccctgctcagtttgctatttgcttttctggatgttggggttggggttgctgttgtgaaaaaacgcgagcttctgagccggaggaggtgattttttggggagatgttcgatgccatccgtttttgcgcgagtcactacagatcgcctgctgtaattcagtgttcacagagttatgagatggaagataaaatgaatgcgtaattgttaatc

SEQ ID NO: 213236 - DNA, 1444 bp, Zea Mays
ctgcgttccgtacgtgggcaagaaggtactcaggctctaatatttttacaaaatcgatggaaagttctaaatctcctcagtcatcaaaaaacagtcggattgtggtgccttctgatagcaatcgctcccgatttgacaatgacggtttttcttcagaaactgcatcaaatcaaatggttgtgttcaactctgaagcagcagatgaactgggagaaaaccgtttgcagaagtcagtgataacaaaggggatatcaccatctattggagcattcactgtccaatgtgctaaatgttttaaatggaggcttattccaacaaaagagaaatacgaagaaattcgtgaacgtattatacaggaaccttttgtatgcaaaagagctcgtgaatggagacctgatataacatgcaatgacccagaagatatatctcaggacggtagcaggctttgggctattgacaaacccaatattgcacaaccccctcatggatgggaaaggcagattaggataagaggtgaagggggtaccaaatttgctgatgtatactatacctctcctactggaaggaaacttaggtctctggttgaagtcgataggttcctccaagagaatccagagcatgttgcacagggtgtaactttagctcagttttcgttccagatacctagacctttgcggcaggactatgtcaaaaagaaaccaaagttgataaatgcaagtgatgaagcaagtacaattacctctaagtcttctgaaccagaagaagtgaaccctatagcctgggcagttcctacaaaacatgagggtgatgccagtgaagaagcttctttcgccgatgagacacttgcatcagaagtagtgctaacccggaagaggaaaataggaagctctttgtcagtagagccaaaccatctctctgatgaacttgaaccaaagttggaggatgcttagaacggggagacttctaactgaaaagtaaaagtgggcagcgtcgtgatgccaacttacccccctgccatggttttattggtcctctgcttgtttctcgttttccttgggagtcagcttctctgttttatgtggtcgcacacggccttatttgtagtattacaccacagaagctggctgacccaaaaaccgacattttgggggcagctacttaacgaaatgtttgcacgagagtttagagccctatggaacttgtttggataaatatgtttattacgttgtagtacttagctaggaacctgcttatgtaagatgatctttctttatgtaagattaagaactgtcagcggcctagttctgctgcacctcggatctaatctcatgttctttgttagacggaccagcagccaaggttctgaaatgtcgtaaagtttatatgctagtactgcgctattgctattgtaattctctgtgcacgtttttgatttgatattgtg

SEQ ID NO: 213237 - DNA, 1075 bp, Zea Mays
aatgggattgggaatccatatcatccaccaaccgcccccacccagtctgagtctgagtcagaggtacccacccactcatccgtccgtccatccaatgcgatggtgtcgttggcgcgccggccgctctccgccgccgtacctgcgggcaacctcctcggcatccatctcttccggtgccccgacgccgttggcatcgtcgccaagctctcggaatgcatcgcctcccgcggtggcaacatccacagcgtcgacgtcttcgtccccgacgacaaacccgtcttctactcccgcagtgagtttacctacaatccaaggctctggccgcgtcatgagctccacaaggatttcctcaatctctcccgctgcttcaatgcgcaaacctccaccgtacgagttcccgatcttgaccccaaatacaacatctccatcctcgcatcaaagcaggaccactgcttgttcgatttgctctatagatggcaagaaggcaggcttccagtacacattaattgtgtcattagaggcatggaatcccataccactacttacccaccgcacctgccaacaaaagagagaaagagatcttggaattgatccagggtacagattttgttgtgctggcaagatacatgcagatactctcagaaaacctgttaaaagcatatggtaaagacattatcaatattcatcatggccttcttccctcatttaagggagggaatccttcaagacaggccttcagtgctggggtgaagttaatcggggcaactagccatttcgttactccagaacttgatgctgggccaatcattgaacagatggttgaacgagtctctcaccgagacacgttacagagttttgttgtcaagtctgagaaccttgagaagcagtgcttagcagaggctatcaagtcatattgcgagcttcgtgtcctaccatatgaactcaggaagactgtcgtgttctgatctgagctccctttattttctgtcttattgtacttttatatggattgataaaatgaattttttagcttaaatatatccatcccctcgacattattttaggtaagaaattc

SEQ ID NO: 213238 - DNA, 1697 bp, Zea Mays
cctgcttcttccgctctctgctcagtgctgagtctgctccgtccgtctccgtgccgtgtgctggcggtggcggtccaggccccgctcgctcctaccagtggcccgtgcgtgcggccgccggcgccctgatcgatcgacccgcgcctcggccggatggaggcgtcagtagcagcagcaggaggtgggggaggcagcgccgccacgcggagcagcccggcggccgtgcaggccaccaacgacgacgccgcggccagcaagctgtcctgtgttaacaaaggatacatgaaggatgattatgtgcggttttttgttaggcgaccaacaagaagggctccaataatcaatcgtgggtattatgcgcgttggtctgttctcaggacgcttctgcatcaattcctcaatgcggggaagaatagtaacaatgacaagcctaaacaaatattatcccttggtgctggctttgacacaacattcttccagttgcaagatgaaggaatggctccacactgttatgtagaattggatttcaaggaggtaaccagcaaaaaagccgccatcattaaccattatagtgaaatgaaggaaaagttaggctcagaagcttcaatttcaatcgaaaaaggtgaagtgataagcacacattacaagctattttccgctgatattcgtgacataccaaaactggattcagttattcgcatggctgaaatggatcctagcttgccgacctttataattgcagagtgtgtgcttatttacctggacccaactgccactggtgctattgtgagttgggcatctcaaaagttctccactgctgtctttttcttatatgagcagattcatcctgatgatgcatttggggagcaaatgattagaaatcttgagagtagaggatgcccccttctcggtataaatgctacaccaaccttgagtcacaaggagaaactttttcttggcaatggatggcagagagccgttgcatgggatatgctgaaaatctataatgacttcattgacagtcaagaaagacgcagcttgtgttatgctgcacctttccatgatgtcactgctgataaggctgcccgcaatggatgcaggatcgaacggttagaactgtttgatgagtttgaagagtggtatatgatgcaggaacactactgtgtggcctatggaatcaacgacgccgagggcatatttgacagttttggatttggggagacatagcagcactggtgccttttcttctgtgggtaccagctgcacttgttgtaaaccgacaccattaattcaagtattactcgaagtaaactttgcttgataaaagaaggaacgattgcttgataaaagaaggaacggacaggggtaggatacctaaacatctcctgatgttggagcttgctttgataggctgttcaagttcaacggcgttgtgcttggtttaaggtctttggtgccagtcgcagtggtgtttgatgtcaagcatgccaggctgccagttcgtcacaatatgaacagaacagtggtgctttccattttactgtttgcagatttaggttaaatctggtagcacatgtttgcagaataaatccgatgtagtttccttcagcctcttcagatacgagaggagatgacatatacgtccggttccaatttgcgcttgacgtgcgaggagctttgaagccaaaatagtttcc

SEQ ID NO: 213239 - DNA, 1512 bp, Zea Mays
cttcttccgctctctgctcagtgctgagtctgctccgtccgtctccgtgccgtgtgctggcggtggcggtccaggccccgctcgctcctaccagtggcccgtgcgtgccaccaacgacgacgccgcggccagcaagctgtcctgtgttaacaaaggatacatgaaggatgattatgtgcggttttttgttaggcgaccaacaagaagggctccaataatcaatcgtgggtattatgcgcgttggtctgttctcaggacgcttctgcatcaattcctcaatgcggggaagaatagtaacaatgacaagcctaaacaaatattatcccttggtgctggctttgacacaacattcttccagttgcaagatgaaggaatggctccacactgttatgtagaattggatttcaaggaggtaaccagcaaaaaagccgccatcattaaccattatagtgaaatgaaggaaaagttaggctcagaagcttcaatttcaatcgaaaaaggtgaagtgataagcacacattacaagctattttccgctgatattcgtgacataccaaaactggattcagttattcgcatggctgaaatggatcctagcttgccgacctttataattgcagagtgtgtgcttatttacctggacccaactgccactggtgctattgtgagttgggcatctcaaaagttctccactgctgtctttttcttatatgagcagattcatcctgatgatgcatttggggagcaaatgattagaaatcttgagagtagaggatgcccccttctcggtataaatgctacaccaaccttgagtcacaaggagaaactttttcttggcaatggatggcagagagccgttgcatgggatatgctgaaaatctataatgacttcattgacagtcaagaaagacgcaggatcgaacggttagaactgtttgatgagtttgaagagtggtatatgatgcaggaacactactgtgtggcctatggaatcaacgacgccgagggcatatttgacagttttggatttggggagacatagcagcactggtgccttttcttctgtgggtaccagctgcacttgttgtaaaccgacaccattaattcaagtattactcgaagtaaactttgcttgataaaagaaggaacgattgcttgataaaagaaggaacggacaggggtaggatacctaaacatctcctgatgttggagcttgctttgataggctgttcaagttcaacggcgttgtgcttggtttaaggtctttggtgccagtcgcagtggtgtttgatgtcaagcatgccaggctgccagttcgtcacaatatgaacagaacagtggtgctttccattttactgtttgcagatttaggttaaatctggtagcacatgtttgcagaataaatccgatgtagtttccttcagcctcttcagatacgagaggagatgacatatacgtccggttccaatttgcgcttgacgtgcgaggagctttgaagccaaaatagtttcc

SEQ ID NO: 213240 - DNA, 1693 bp, Zea Mays
gctcagtgctgagtctgctccgtccgtctccgtgccgtgtgctggcggtggcggtccaggccccgctcgctcctaccagtggcccgtgcgtgcggccgccggcgccctgatcgatcgacccgcgcctcggccggatggaggcgtcagtagcagcagcaggaggtgggggaggcagcgccgccacgcggagcagcccggcggccgtgcaggccaccaacgacgacgccgcggccagcaagctgtcctgtgttaacaaaggatacatgaaggatgattatgtgcggttttttgttaggcgaccaacaagaagggctccaataatcaatcgtgggtattatgcgcgttggtctgttctcaggacgcttctgcatcaattcctcaatgcggggaagaatagtaacaatgacaagcctaaacaaatattatcccttggtgctggctttgacacaacattcttccagttgcaagatgaaggaatggctccacactgttatgtagaattggatttcaaggaggtaaccagcaaaaaagccgccatcattaaccattatagtgaaatgaaggaaaagttaggctcagaagcttcaatttcaatcgaaaaaggtgaagtgataagcacacattacaagctattttccgctgatattcgtgacataccaaaactggattcagttattcgcatggctgaaatggatcctagagtgtgtgcttatttacctggacccaactgccactggtgctattgtgagttgggcatctcaaaagttctccactgctgtctttttcttatatgagcagattcatcctgatgatgcatttggggagcaaatgattagaaatcttgagagtagaggatgcccccttctcggtataaatgctacaccaaccttgagtcacaaggagaaactttttcttggcaatggatggcagagagccgttgcatgggatatgctgaaaatctataatgacttcattgacagtcaagaaagacgcagaattttaaatttgatcctggctgagaactcggtttcagcttgtgttatgctgcacctttccatgatgtcactgctgataaggctgcccgcaatggatgcaggatcgaacggttagaactgtttgatgagtttgaagagtggtatatgatgcaggaacactactgtgtggcctatggaatcaacgacgccgagggcatatttgacagttttggatttggggagacatagcagcactggtgccttttcttctgtgggtaccagctgcacttgttgtaaaccgacaccattaattcaagtattactcgaagtaaactttgcttgataaaagaaggaacgattgcttgataaaagaaggaacggacaggggtaggatacctaaacatctcctgatgttggagcttgctttgataggctgttcaagttcaacggcgttgtgcttggtttaaggtctttggtgccagtcgcagtggtgtttgatgtcaagcatgccaggctgccagttcgtcacaatatgaacagaacagtggtgctttccattttactgtttgcagatttaggttaaatctggtagcacatgtttgcagaataaatccgatgtagtttccttcagcctcttcagatacgagaggagatgacatatacgtccggttccaatttgcgcttgacgtgcgaggagctttgaagccaaaatagtttcc

SEQ ID NO: 213241 - DNA, 1601 bp, Zea Mays
ctccacttgtgaagtagcactgggtctcaggcagagcaatcttacctttgcatcatggagaatgcagagtccctccaggtgcttgtttcatgggcacatcacctacgttggggccaatgagggtatccttggtatgtaatgcaagccccaaccaccataggccaaggaattcggatatatcgcgacaacaaaaaggggggtcctccagaggaaaaggcaagtcgtaccaggataaagatgactctgagaacattgatgaatttgatagtgatatcatgttctccaagaatgggccaccaatctctttggcaagcaattcccgtcctcaagccacatcggctcctggggaaagagagaaggagatcgtggaactctttaaaagggttcaagcacagctgcgagctagggggaaaagcagggaagacaagaagcctgaacatgcaaaagtgcagggtgaaaggggcagtgttgattcacttcttcagttgctcaggaaacactctgtggaccagagaagaaagaatggtgacgacaaagagcagaattccgatgtattgaggagaggcaacgattctggaaatagacaaggttcaaccgtctttggcacaaaaagtgacatccaggaagagaagaagaagccacctccggcacccttcataaggccagcctcaaatttcaggcgaaggtctcctgttcctggagtgaagttccagcctgttatcaatgcggatctggacactgatgacgatcgcaagtccatcggcagtaatgccgtggatgctgtacagaaagctaagacagctcttgatgagaggactgctacagatgagcctgactccatgtctccatatgaggcggattctgtaatagaaccaggaaacatttctttgaatgacctcgatgacattttacatgacgatgaagaattcgatgcggatgaaccagacgacgagtatccagaaccttctttgggtatctctgatgtcacagatacggatgagtcgcacgagaacgactccacccccacgggaagtgcggatctaagctctctgaaggttgcggagctgagagagctcgcaaagtctcgaggaatcaaagggtactcgaagaagaagaaaaacgagctggttgaagtgttgagcagcagcatggattgatgataaagtgactgaaggctggcaattattggtctgcgctgcgctctcgacgccgtgcagtagctgcggctttgctcatggaagacacgcccttctctgcatatgctttggttcctggcagccgtcagatgtggagtgattggacggttagttgggctcctcacgtgccgcgtctctgctccttgtctctctggctggctctgcttccgcctgggcctgggcatattgcggagccttgattaaagctggcccagctcggatacggccgcagctatcattgtacgtactactgcaaccgagttccagccagccagccaccccacccctctcctttctttttccctttagcaaaaaataataaaaaaagagatagagcgagagagaaaagaaaaaccctgtaggaggaagagaaaagaaaagaaaagaaaaaaaacagtaacgtgc

SEQ ID NO: 213242 - DNA, 2317 bp, Zea Mays
ccttctcgtcccagtcgacgaaaacgaacagcccctcgctttagattgccgcaagttcccccattcctgtagatcgccggcccctcgctcggctcggccatgtcggccggctccacggcgtccctcctcgcggccgtcatctgccttgccctcgccgtgcttgctcccgtcgttcctgggtatccaatgatccagaacttcaccagaaggtggcaggtgtattggttgagtcaaatggtgtcaacaatgacttacaagagctgtctcctgatagaaaatttccacaagatgattttgcaccctactcaaatcacagccatgattggaatcctgctggatcaggtatcatgtggaacaaatataattttcctgtatttctactttcagaagagagtacaaacactcttcaaaagatttcagaaaaaaatgagaagactggcaatggatataaagcaaatgttgcagaattcgaccttgttatgcagacaaccaaagctcaaacacatgattcagcatcctgcctcaaagaacaatcatgcttgcccttaggtggacacagtgtatggacttcattaccgccacttaataacggatctacagagcatccgaaacctttaatattggctattgcgtctcaagactctgcatcattttttcgggaccgtagtcttggttcagattctcccatatctggattgattgctttgctcactgctgttgatgctctttctcacattcatggtctaagcaagcttaagaaacagcttgtgttcgctgtttttaatggtgaggcctggggttatcttggtagtcggaaattcttacaggaattagatgaaggcgctgcttctgtgaatggaattagtagcttaaagattgaccaggtactggagattggttctgttggcaaggctatacttgaggaatatccatcattttatgtgcatgctgaagggaatccatcagcttcaaaggaaatattagatgcactgcaaagtgccagcaagtctcttggttctgataatgttaaagtaaaacaagcagcttcatcaaatcctggtgttccaccatcttcattaatgtcattcataaggaagaacatgtcaacttctggagttgtgttggaggattttgattcccacttctccaatagattttatcatagctatctggataactctgtaaacatcaattcctcgtcaatagctgcagccgccgctttggttgcgaggtcgatgtatattcttgctagtgatgactcagttgttgaccttataacactaaacactataaaagtgaacgtttcattggtcgaagaacttattggatgcctgcttacttgcaatcctggtctttcgtgcggccttgtgaaaagattcatttctccaagcaatccctgcccaagtcattatgttggtgtttttctggatgacccatctggcacgcagcttccttcatatgcagatgacacgtctcggtttgtatggaactttttggcagacagaactaattcagcaggcaataaaagctcatgtactggaaagtgtggtgatgaaggtgaagtatgtgtaggggcagaggtggagggtggaggtagatgtgttgtatctacaaccaggtatgttcctgcttattcaactcgggtgaagtttgaggacaatgcatggcacgttcttccagcgaactcgtcagatccaatgggtgctgcagatcccgtgtggactgaaagcttctggaacactattggcctcagggtctacgccgtgcaagatccagcttacgattggcttattcttcttgccgggctcggaatcactgctgcatcttattgcgctgtacactttggcagagcatacatttcaaaggtggcgaagcttgactgaagcgtcagtgagctgccccactgataatgggtatctagagctggaaatagaactaattaggctggcaattcgtagaacattagcagcgcatgagacagggtgattaagctgcgagaaagccgcaataaattatgagaaccaagcacacccgaagcaagtcctccatcattatgcggacgtccaggtcgatgtaatattaatgaaattgtgaccgtgttacgttttgtgttgaactggtactggtaggtaggttatgacacgcctctagctctagttggtggatgtttccggtaacgtgtttttctgtttgtggatcctgcctactcagttttggttgcgtataagcctgcccctcatgaatcctatgagtttgtgaacaccaactattatactggtgacttgcattcgcatgatgattggatcttgtatcgtgt

SEQ ID NO: 213243 - DNA, 5797 bp, Zea Mays
atttaagctcttccagaatttgtgctacgagggattagcctaaactaaactaaagcaaacttcatgcaaaaaaaaatgcctatagacttcacttcacagctctatgctgattccgcatggaccggacccggcgcaacgcatgagaggctgctgttcccggcacgcgtcaggagctcgatcgctcggtttggctttggtgcagcaaacgcacgggcacgcatggaattgggaacgaacctgagtggatgactggattctttcttcaaaggaagggagaaaaaagtggggcttggaatgggcggtggaggcgccctcatgtcgcaggtactaactagtacgtgcgtgtaaagccactagtccgacgcccctacagctgcaaaaggcgtccgcaggagcaggacagcccccatccgaggacgaggacgacgacgacgagcagcgcagaacacgcatgggggggcgaacattcgcgaggctgccgaaatgggcaggttggttcgggaggcgtgtctactcctttaaagtactggttttatgcgttgtatctcgtacatcatatgtgaaacgtgtaagtttgtttctctcttccaattctcctctaccaatgaaccgttactatagatggccagccgtgccgggctaatcgtgccggtccggagcacgacacgacacggctggtgtcgggcccgtgccggcacggcccaataggtagtgtcgtgcctgcaggggcgaatctaggggggtttatcggggtcaggcgaccccgataaattttataaatcctttagcaaaatactgttaaagttcataaaaatttgtatgatatagcaaagctgctcttgatgaccccgatcatattttcggctagattcgccactgcgtgcctgggccgagcatcaggcatgctggccggcacgggcacggcacgattagcccccaggcacggttaggcacgattatgcatgattagatccaaacacacctagttagctgtgtgttgtaatcttttttcttatatagggttttctcataagggtgagtttttacctaaataggtttttaatgagtcagccattgcactaaacagttcaatattagctattttagtatgttttaactgtgtttgtgaatatttgactaaaattctgtggtgtagtgctaaacgggctatatgggctaaacgggctatatgggctaaacgggccggcacggcaaggctaagcaggcttagtgccgtgcttgggcctggccttaggcactagtgccgtgccggcacgacacgactattaaacgggccaaacgggccgtgccctaaccatgtcgtgcctagtcgtgcccgggccgggccgtgccgtgccgcccatttggccatctctaactgttacattacatatgacccataagaaaccatcccagcacaacacgatagaaagtcgcacccagcaccacgtactacgttagctgaaggacaacgacgttaaaagtggatgactctctgttcttcagctaacgtggtgctaggtaagataaaaggttgtacgtgcccttatatggttataccttcctcgaccttttgactaagataaaagagagccggagagccaatgcactcaccggacatgtctgttatctggtaatgcattaaatttctcgctcgacatgagttattcacagacaaagacttctagatggttggctctggactcatcgggcgtgtccactagacgttatgtactattaatggctagttttgaaactaacagtcagagtgtcacatatggctagttttgaaactagttgttagagtatcaccaaacatgttcggtgcaggtagcaaggtcacaccgaacatgtccagtgtcccataaatattgagtggagaggcaacaaataatcctttgtcttagggctatacatacccctccatctcgtatttagagtctctcttgcttatttgttgaagtaaaaaataatttgaaaaacaaggagaagttcttgtctactgaagtggttaatatttgataagattaagaagcttattagtgaacaaagagtaaactcaagatgtgagcagttgtgggtgattcaccgcattggtgattcaccgcattggagtaacaaaaaatagcctttagtgaagacttgttcctttgtggatcaaggaaaagtaatacccttacacaagtgctctaacaagaaccggtggaaagtgttgactgtccaataccttaaaaaccatcaatgtacttctatccctctttacttttatgtatttacatttgtgcaattacattaatgtctttacattcctagaattgccacgctagtgtaggattgaaaacttaagagtgtagaattttatgcatagtacagaaatcaatgctagacaaaacaaatgtaatggaataaatgatagatcttaattattaaaaaatagatcagaccaattcagtatactcttgaatattttgattctttcatatttctctatcaggtatagtttatacaacaaaagattgagcttgttgtattaggtctattcttattatggtgtaggtgaggcaatgtgataagagttgaacaagtacaataatgtttaaatatcgtaggtttccagtgtggtgaattttcttacaggtaatgaacacgtgattagcaagccacgatgcgtctaaatatttgtagccttgcttaaaatgttcattttctttcttggggttgtttttcacgcaatgcaaatattggttgggtttataaagtaagaacaacaatgttttgtatactttttttggcagcaagattatatacacacacataattctaatcagaaagtcatttgtttgccaaatgaatccgtggtatctcagtcctaaggatattgatgttttgtttgccaaatgaacccgtgagcacacatctcacgttgttggcatttttttttttgccaaacgcgagatttgtgcccttatatcagtatatttcccattcgtttaaaaataaactttattagaactacttcttatatacatagccaatacaaatactagtcttactttctcatttctcttatccgcaagttgtggaactcttaaaatctctacaacgtcaacacaggccagatcaaacataaggctgccttcaacaaccttcgctaaatttcatattctaaaaaaaaaattgtgttattcacagtacactctaaaagattttattctatatatctttattatctccaacaatgtactctaaattgtatcctctatatcctatgaatttccgagcacatattgttttgacaagattttaactgatccacagtttgcaaattgtttttattcatattaattaatataatgtagaaataaagtggggtttttagcgtgaacactgaacacacacgtattgttttgacaaaattcggatgttgttggaggtggtagcgtggacatggaacgctaaatttcgcgtacatgtttttttagcgggtgtttgttggagttgatgtcgcaagctagccagctagctagcttcagtccatatcacggcatcacccacctgattttttatacgagtgacagatgatctgtcattgagctgtgagcctgtcgctttcgtaaattgacacgggaatttcaattgtagtaatattccttttcttctaatgcgagaatcgtattatttcgtgttatgcccggctgtgattgctaagcattctgacgttagaatcggtctataataataacacttcgtaccgcttctgtgtgaattgtttaggcctcgttcgtttgcacaggattacatcctgatttattccagctaatcaaaacctatataaattagagaaacaattcagataggaattgttccaggcctccattccgtagtaaccgaacggccccttatgtgaaaaacactcaaatttcgttcactttttctttatctacgcggaaaatctatcctgagttgctgcctgcccgggcgcgtctcccccctgacagcctcccgccaccgacacccacatctctccccgtcggcacatgtgtagttgccacttcgctttcccgttctctcaccttacctcacactcctctccatcgattaatctcctccccctcaacaaccgcgagatcttcagctaccgctctctccggtcgcgtttgcatccgcattcctcagatccagattcgagccccagccccgcttcgagatccagctagctctctatcaagcatccggcggagcgagcagcggggggctcggcgagagagaagatgaagcggaagacgcggaacaagatcatcgtatggacgctggccctggctgcagtggcgattctggtgggcggcacgattgcgctggtgctcacggcggggacgtggaaggccaagataaagaagtcgcaggagaagatctgtaacaaggggtgggagtgctcggggagcaagtactgctgcaacgacaccatcaccgacttcttcaaggtgtaccagttcgagaacctcttcgccaagcgcaacacccccgtcgcgcacgccgtcgggttctgggactaccaggccttcatcaccgccgcggccctcttcgagccccaggggttctgcaccaccggcggcaagcagatgcagatgatggagctctgcgccttcctcgggcacgtcggcgccaagacttcatgtgggtacggcgtggcgaccggcgggccgacggcgtgggggctgtgctacaaccacgagatgagccccgaccagacctactgcgacaagacctacacccagtacccctgcgtcgagggcgccgagtactacggccgaggcgcgattcctgtctactggaactacaactacggcgctgccggtgacgggatcaaggcggatctgctccaccacccagagtacctggagcagaacgcgacgctggcattcatggcggcgatgtggcggtggatgacgccgatcaagaagagccagccgtcggcgcacgacgccttcgtgggcaactggaagcccaccaagaacgacacgctcagcaaacgcctgcctgggttcggcgccaccatgaacatactctacggcgagtcgatctgcggcaagggatacgtcgacgccatgaacgttataatctcgcactaccagtattaccttgatctcatgggcgtcggccgtgagcactctggcgacaaccgtgattgcgccgagcaggcaccgttcaacccctccagcccgacggatgaccagaagcagcagcaatcaggaagctaagacggactcattgcgccattgccactgatcaagcttccacagcgctagattgagctacagattcttcaggatgcgtgaagctgcatgcatcgtgttgatgttgttttgaatagactgtatgtactgtctatgtgaattgcgagatttgtggttatttactaccatgttgtccatagatagtctgttttggtttctttggttctgtcagatacgttatacacatgtttaaagagaactgaacataccaggaccctttttccgcttgaacttctctgtgtgcttcctaccgaaacatcacctggccttttgtatgtctcgtattattgggttgttatctagcgctagcacattgttaacatttggactagagcatggttattccgaccagggacaacctaaccgaggtacaaaaatgaatgatgtgaacttgcttgtactgtgaaaaatagagaaagtattccacacttgttcctgcttctggagtgagttgtaggcgtgtagctagagaatgtggactcgcttggcatggctgaatgtac

SEQ ID NO: 213244 - DNA, 1338 bp, Zea Mays
gtggagctggcagctgaagagagggagagagtgaccgagtgtccggtgtggtgacccaaatggagacggccaccacgtcgccggagcacccgctgctccgccgctcatcaccgtcgtccaataccaacgccgacgctgattctgtcaacctgtcttcgcctcctccctccgcggcgaggccaagccgtctcgcggcactcatcgggcgcgtggggtggccgcgcgggccctcgatgatggtgcacgaggcgacgacgctgcagctgcatcgaaggcgcgcggactgggcgcactcccgccccgtcgtcacgctcgacatcgcctggaacgtcgcctgcgccgccgctgcggccttggtgctcgcgtcctccgccaaggacagccccgtgaagccactccgcctgtggctcgtcgggtacgccgcccagtgcctggtgcacgtcgggatcgtctttacccgtctcgagacgcgggcgcggcacgcctggggcccggcctcagacgttgaatctgccggcgcagggacggacagctcgggaaccgacagcgaagatgacgaaacggcggaagggaggagcagccatgcaagtcgttgtgagacgataaacaggttgatatcatttctgtggtggatcattggattctactggctagtatcaggtggggaggtgctggagtatggcgcgccaaggctttattggtgggtgcatcagatggagatattagtgtccttccgagatatagatattatgatccaagtgaggacagtgaggaggaaaccgatgaaggtctgatgatccctatccttaataacagtggaatgtcaacgagtgagcgtattctgcttcgtgaggatgctgaatgttgtgtctgtctctcatcatacgaagatggagctgagttatctgctctcccttgcagacatcacttccactggagttgtattaccacatggctgcgcatgaacgcgacttgtccactctgcaagtataacattctcgaaatcagtgacagtgcatgaccaacttatgctgaaataactttcggacacagccttcattcaagtggcattctcaaagcaacgcaatgcctttttcattctgatctggttctgtgctgttttaacagctgtgtttttaagcgacagcgatgtcagggttctcctatttaggatgtggtgaattggtgataacctgtaaatggataaaacctcacttgcagttgcccttgctaatatcacttgtaaatacctttggagttgttttctgttagggctagtttggaaaccctattttccgttttcccaagggaaattagttcattttcccttagaaaatt

SEQ ID NO: 213245 - DNA, 2386 bp, Zea Mays
catcatcccattccccccatccccaccctcctttccagcatccactgccaccatcaactgttcatccacctcgccagagcttcatgctgactcccaaggatgacttgaccacctgagatgctgagagcgtcagagagcatagcatagcatagcatttcttggtgtcgctggatggatggggatgactggatcactcacccggaggcggatcagaaagagtactagctaaccactgccaagattccgccgcgcgcacggatgcatctgtgagcgagcttacacgccgcagagaatactagatcacggcgctgcacattccgggagcgcagctggaaccaagcggctaaggatcgatggatcaccaccaccatcatcaccaccaccatcaccatcacatgatcccgggacaagagccgtcggcgacggacggcgcagcccctgacagcttcttcctgggccccgccgcagccgtcatcttctccggaggcgccggggccggttcgtcgtcgtcgggcgccgcggccctcggatcctccgccgggggaggcggtgggccatctccgtccagctcgtcgccgtcgctgagccggtacgagtcccagaagcgccgggactggaacactttcgggcagtatctgcgcaaccaccggccgccgctgtcgttgtcgcggtgcagcggcgcgcacgtgctggagttcctcaagtacatggatcagttcggcaagaccaaggtgcacacgccggtgtgccccttctacgggcaccccaacccgcccgcgccatgcccgtgcccgctgcgccaggcatggggctccctcgacgcgctcatcggccgcctccgcgccgcctacgaggagaacggcggcacgcccgagatgaaccccttcggcgcgcgggccgtgcggctctacctgcgcgaggtgcgcgagacgcaggcgcgggccagggggatcagctacgagaagaagaagcgcaagaagccgtcggcggcttcggccgcggccgcggggccgtcgtccgagggaagcccaccaccggggccgtccagcggcggtggaggacccgacacgtcgtcgccgcagttcatcatgcccagcgcgagttggagttcgttccggtgctgctggtctaggccgttgttctttgtcttcttctccagtggcttgcattttgcaaaagatttctcgacctcccccacacccacaccccccaccttcttttctctgtttcattcacttgaatcatcactgtgcgcgtgcgtgagtactggtttaatcgtcgtcgctgttttgtttagctttcatcaacccattggcagcaggcagagtttatgttagttttgcttggtttgttattctcctcccgaggtacgacatgatgcaaacttgcaagaacagtttgagattccctaccaatgcagctgttgtgtgcttatgcatgtcatggcatggtgtgggagaagttttagtttgcagctagcaacaacagtgacaaaagctgtagctgtatagctagctagtagcatctttcagaatttgttcttgtatgcaacttgcaagcaactagtagtttggttctgctgcagaagccagcagccaaactagcttgctgtgctattcattatattggcagaacagaaatataatccttctacatcacactatatctgttcatggactgctgatgtgtggttcaatttcctttattattaggagagcaaaagtagggcaatgcatgcatatgtgcagtgggggagtgctacctgatttgaagcaaatataagccaggaaaaacatatatatgtatatgtttacctagctacttttaattatgtcctcgatcaatgccagtctggaaaaacacgatttatgtgtcaattatatatttctaggagaatccatatcttgtaacttgaataatatatttcttctgatgagattgcaattgcatgtttcatgtttggtttcctttgcgtggttggcattgctgttgtttgctttgcatggccattgcccattgtggtggtattgctttgaaccctagtacatagatgatgcattcgagctgcctactatattgttcacccctgaaaattattacgatggccaaaagggtagctcatggccaccagcaagccagaagaaacaagcatggcaagcaaaagaagcaacgaagaggggggtgtctttcgaaaaaagaaaaggtagaagacacgcaggaactgaaaacgtatagttttttgttcagtttggtgcagtgtgtgtacaatcgggcagcacctgttttagcccatgctgtcatgcttctggccatacctttccttattcatgttaaaattactggatctggctacatttggtcatttgccttcacttcttgtctcttc

SEQ ID NO: 213246 - DNA, 1574 bp, Zea Mays
ccaaccctaacttcagcccctgccgcgcgcccgcgatccaccccgtttcgactgctcgcctgctgcgtgctgcctgctgtctacggcctcatacgactgccctgcgcccctcgtggcttctgcggttctgcacacgcgcacttgtccccaaacagcggcgtcggcgtcggcggcgatgagtatctcaggcgagcttcccggcgaaggatctgacggcgaggaggaggtcttcatcgacgaggaggacatcatccacgagataaccatcgacgaagaagatctccccgaccgcgacgaagaagatgacgacgtcggcgacgggattgttgattcagaagacatcattgatgattctacgtactcatttcttggccacaaagatgaagtcttctctgttgcatgcagtcctacagatgcatcacttgtggcttctggaggcaaagatgataggggatttctgtggaggatcggatcagatgagggtgccttggagctgactggacacaaggatactgtcggcacagtggctttcagttcagatgggaatttgttggcttgtggaagttttgatgggcaaataaatgtgtggaatacagctgcacgagctctcaagggaacccttgagggttctgggtcaggttttgagtggcttaaatggcatcctcggggacatttgataattgcaggatcagaggattgtaatgtatggatgtggaacgctgaccataatgccattataaatacatttgttggacatagtaacacagtgacatgtggtgattttactccagatggtaaacttatatgtactggatcagatgatgcatctttgaggatatgggacccaagaagtgcacaaagcaggcatgttattcgaggccatggttatcatactgatggattgacatgcttatcaatgactttggattcacaaacggttgttagtggctccaaggacagttctgtgcacgctgtgaatgtaaactcgggccagatcgttggctcactagtaggccacaccacttccattgagtgtgttggtatctcatcaagctatggctgggtagctacagggagcatggatcaaaagctgatcatatgggacctcacacaccagtccagccgatgcacttgtgaacatgatgagggagtgacatcactggcatggttaggttcgtcaaggtatgttgcgtcaggatgcatcgacggcaaggtgcgcatctgggacagcctctctggggattgtgccagggagttcagtgggcatgcagatgtagtacagtcgatggccatcacagctgacggcaacgccatggtctcggtctcatcagatggctccgcccgtgtgtttgacatctccatgttcaagtgaaggaaactgggacggagtagatggttgctgtgtatgctaatgcttgttcgcggtgcatgtgcatgaatgatgatggcatgccatggagagaagtaatctgttctgcacttctgcttatagtgatagaggtcaggcgggaattctgtcacgtcatcacgagggacctgctaaaattcagggttcttgatgtagaagatcctag

SEQ ID NO: 213247 - DNA, 4466 bp, Zea Mays
ccaaccctaacttcagcccctgccgcgcgcccgcgatccaccccgtttcgactgctcgcctgctgcgtgctgcctgctgtctacggcctcatacgactgccctgcgcccctcgtggcttctgcggttctgcacacgcgcacttgtccccaaacagcggcgtcggcgtcggcggcgatgagtatctcaggcgagcttcccggcgaaggatctgacggcgaggaggaggtcttcatcgacgaggaggacatcatccacgagataaccatcgacgaagaagatctccccgaccgcgacgaagaagatgacgacgtcggcgacgggattgttgattcagaagacatcattgatgattctacgtactcatttcttggccacaaagatgaagtcttctctgttgcatgcagtcctacagatgcatcacttgtggcttctggaggcaaagatgataggggatttctgtggaggatcggatcagatgagggtgccttggagctgactggacacaaggatactgtcggcacagtggctttcagttcagatgggaatttgttggcttgtggaagttttgatgggcaaataaatgtgtggaatacagctgcacgagctctcaagggaacccttgagggttctgggtcaggttttgagtggcttaaatggcatcctcggggacatttgataattgcaggatcagaggattgtaatgtatggatgtggaacgctgaccataatgccattataaatacatttgttggacatagtaacacagtgacatgtggtgattttactccagatggtaaacttatatgtactggatcagatgatgcatctttgaggatatgggacccaagaagtgcacaaagcaggcatgttattcgaggccatggttatcatactgatggattgacatgcttatcaatgactttggattcacaaacggttgttagtggctccaaggacagttctgtgcacgctgtgaatgtaaactcgggccagatcgttggctcactagtaggccacaccacttccattgagtgtgttggtatctcatcaagctatggctgggtagctacagggagcatggatcaaaagctgatcatatgggacctcacacaccagtccagccgatgcacttgtgaacatgatgagggagtgacatcactggcatggttaggttcgtcaaggtatgttgcgtcaggatgcatcgacggcaaggtgcgcatctgggacagcctctctggggattgtgccagggagttcagtgggcatgcagatgtagtacagtcgatggccatcacagctgacggcaacgccatggtctcggtctcatcagatggctccgcccgtgtgtttgacatctccatgttcaagtgaaggaaactgggacggagtagatggttgctgtgtatgctaatgcttgttcgcggtgcatgtgcatgaatgatgatggcatgccatggagagaagtaatctgttctgcacttctgcttatagtgatagaggtcaggcgggaattctgtcacgtcatcacgagggacctgctaaaattcaggtgccactgtatatgttttatattgcagctttagtccgttgcagtttttagcaggcagtctgtcatttttggttcagaaaataggaaactcgatagaaaaaaacccataaacccgatgaaatctgatttgcattgcgacatcttaatgagcttctccatatctaacttgaaccagttagatttgtctaagcttcttattgaggttgtacttgtaacttgttgcaatataaagtagatgtacttggactcagtaactcataaacaaacccatatactgccactagggttcttgatgtagaagatcctagaggctagctgagagagcctcaacggccggaagaagggtcccagcatcatgtccctcagcttggagggtctcggtctgagagccctggcccctgtgttagatgaccttatgagtacagactacagagctggctcaatttgaagtttctttctgctattgtgatctttgaaaataatgttttgccggtatccgagcatacgacctctttttttcccggacgccttaaaattccggttatgaactagtagacctatggagctgtttgattcagccattttagacctgtaaccattccctgtgacagctgatgccgttccttagagtttggttagcgcactgcgtaatggatagcagcgttatcggatacaagcatgtagaatctcattcccattccctacctatcgtcatccgataccctaaaaacagaaaatgttgcccacaacaaccaaacaaagggcggtaatcattactctgcatcggatgacaccggttgctgatcccactgccgttaccgctcctttcgtccaagcaaacagcacctatattgcatctcagttaagggtagcagcaccggggacgtatgaggggagaataagaaaggatgatagtttgccaagaaatgaacacagcaagctgttgttcctcctcctttggcatcctctgcctgtcagtaatcatgcggtcaaaatttaattagcaagtgatctctagtggacaaggtagcagagctgcctgctgttgctggtggatggacgtgtttgacttgtgcagctggacagcgactcctttccttcctgtacagtacgccacgccactaaacaagtcaaaaggatggtctcacgggcagcagcaaccaggcccaggggagggaacataatttttttcccaggggagggcgcgccactgacgactaatacgcatcactgcatcagttcacacacgcaccagttcacacgacaccctgctctgctgcttgcataatttatttagtagtcaaaggggaaaacaagaagatatggatcattttggattagatatcttgattaagacttgaatatacataaagacgtatgaacgggcgggcgaagatagtaagggaaacacggacagaaaagtaataaagatattggctcttttaatattagatatatagatattggtattgaacattgattgatatacagagacggacatgatggggtttggcgtcaataaataaaagaggaagggccaggggaaggagaacgccaaaacaaagcttttgttgtctctcacctactattcttcttgcctcctccctccaccagcatccctgagtctgccatgggcaactgctggggaaccaagattagctctgacaccgccgcctccccttccacatcaccgttccctcgcagcgagggtgagattctccggtgtgccaatgtcaggagcttcaccttgacggagctgatgacctccacccggaacttccggcccgacagcgtcctcggcgagggaggcttcggctccgtcttcaaggggtggatcgacgagaccaccttcgccccggccaggcccggcacagggatggtcatcgctgtcaagaagctcaaccagcagggattgcaggggcacagggagtggctggctgaagtcaactacctgggccagttgtctcaccccagtctcgtaaggctcgtagggtactgcctccaagacgagcagcgccttctcgtctacgagttcatgccgcgaggaagcttggagaaccatcttttcaggacctcacgtttccagccgctctcctggaacctacgaatcaaagttgccctgggagcagccaagggccttgcgttcttgcacagcgacaaggccagagttatctaccgagatttcaagacatccaacgtgctcctggattcgaactacaacgccaagctgtctgacttcggtttggcaaaggacgggccaaccggcgaccagagccacgtgtccaccagagtcatgggcacctacggatatgctgctccggaatatctcgcaacaggtcatctcacgccgaagagcgacgtctacagcttcggcgtcgtgctgctggagatgctgtcgggccgccgcgccatggacaagaaccgcccggccaccgagcacaacctcgtcgactgggcgcgcccctacctcagcagcaagcgccgcgtctcccgcatcctggacgaccgcctggccggccactacccgctgccggccgtccaaagggcggcagcgctggcgctgcagtgcctctccgaggactccaggaagaggccaaccatggaccaggtcgtcgcgtcgctgcagcaactcacagccgcccaggaccacgacgatgcccaccggtcgtcgcgcaggtacccaaaagatcaccgtcaggctgcggcgctcaacaaccggaatctgaacgctcatcgccgcctgtccgccttgcctctacccgagtgaactaccatattcatattcgatcatcttttgtatcttcacaaaagtagtatgtaaatccgtggtgaagacctgggtaattagtgataaaacacaacttgattgttgattagatgtaaatggtggcttcaacttaaccggtttatggaaga

SEQ ID NO: 213248 - DNA, 3748 bp, Zea Mays
cccacctcgacgcgcgtcgcgtctctccaggtcggaggcggaggagcggaggacgatcaccggcgcggacgcaggcgtcccgcattcccccgatccggccccgcctgacccccgctgccacggcagctcgacccgaccgaccaactcgccggccggcaggcgccacgtagaaagacacggctcttcaattgttaacgtagaagtataggatggctgtatcactatgctatttctgccccgggctcacaacacggtcccggatgcccgtgaagcggtacaagaagatccttgctgaaatcttccccaaaacacaggatgaagagcctaacgagagaaggattgggaagttgtgcgagtacgcttcgaaaaaccctcttcgagtgccaaagatcacagtttacttggagcagcacatttaccgggacttaagaagtgagcagtacggctttgcaaaagtggtgatgttgatatatcgcagactgtcggtttcctgtaaagaacagatgcctctgtttgcaagtagcctattaagcattgtgcacactcttttagaccaaaagaggcaggacgatttgcgcattgttgggtgtgaaaccttgtttgattttactgtcaatcaggtggatggtacatatcagttcaatttggaagggctggtcccaagactgtgtgaaatagcccaagaagtaggagaagatgaaagggcaagtgccctacgagcggcagccctgcaatctctttcagctatgatctggtttatgggggagctttctcatatctcgtcagagtttgacaatgttgttcaagttgtactggaaaactacaaacctcagaagatgcaaaatgatgatcaaagtaccaatgatgctgacaaccagttggtgcaggaagaccagaaggctgagcacccgccttcccctttcattatcactccggccccctcttgggagaacatagttaatgccaagggaggaatcaacctgccagaggaagatgttagggatcctaaggtttggtccagaatctgtgtgcacaatatggccaagctttctagggaggcaaccacattccgccgcatcttggaatgtttgtttcggtactttggtaacaatagttcatggttatcagaaaatggacttgctttgtgtgtcttgttggacatgcaacttttagtagaaagttcaggacaaaatatgcatttaatgttgtcacttttgataaaacatattgagcacaagacaatgttgaagcagccagacatgcagcttagcatcgtggaggtggcagctacccttgcagaacaatccagtgctatcgcttcaccagcaactgtaggtgccataagtgatcttgtgaggcatttgaaaaggacattccatattactcttggcagcaaagatatggaattagtaaaatggaacgaaaaattccggaagggcatagatgaatgcctagttcagctgtcaaagaaggtgtctgatgctgggccagttcttgacatgatggctgttatgctagaaaacattgcgagcactcctgttgtagctagatcaactgcagctgctgtttatcgcacagctcagataatcgcttctgtgccaaatttgcaatatcagaataaggtgtttcctgaagctctgtttcatcagttgctgttaacaatgatccaccccgaccatgaagctcgtgttgctgcacaccgcatatttgctattgtcttagtcccatcttctgtttcaccttcgattcaagccagtccctcaggccaggtaaagaaacatgacatgcagaggacactctctagggccgtctctgtgttttcttcttcggctgctatctttgacaagatgaaaaaggacaagcactcagaaaattcacaaggagaaagcaaggacaatagtttgcatagcgttggtgaagggaccggacaaccaaagaatcaaaaccttcatgtgtctcaaagccgacgtagtagcatgagaatttctaatttttccatgaaaagaggcccttcaatggccatgagagctccttcagtagctatcagagctccttcaatatctctgagaggtccttcaatgtcttcaagagcatcttctgtgtctgtaaaggaagaccaaatttccccaaagaaatccgacgaggaaacggaatcagtgttggtgaagctgagcgcccgtcagatcacacttttgctatcatccatttgggctcaagcaacatcccctgaaaatactcctgtgaactatgaagccattgctcatacttacagtttgcttctactgttctctggatccaaggcatcaacttttgaggctcttacccagagttttcaggttgcattttctttgaggagctatgcgctcactgaagcagattcattacaaccgtctcggcgtcggtcattgtttactctgtcgacagccatgattattttctcgtcaagagcttacaatgtgttgccactcattccaatctgtaaacaaatgatcaatgatcgcgcggccgatccattccttcgtttggtggatgagagcaaacttacagctgtcaaggattgttcaaatgatccttcaaaaatatatggatcaccagaggacaacgctaatgcactgaagtccctctcagaaatagaactgtcagaaagtcaatctcgagaatgcatagtctccacaatcatgaacaacattgcaaatatgatggatgcggagttgcataatgtgagaagccaactgctaagtgatttcactcccgatgacatgtgtcctacaagcactcagttctttgaaatgcatgttgataatccttcagggtttcatgagactggtcaccatgaagagcagggtttgctgattgacctggggaatgaccatgatgcttttggggaagcttcggaaggcgcagaagctcgcacatcttctgtacctgcatcagatcttctgagtatcgatcagctccttgaaacggttggtgcagaaccagcacctcaggctggagtagtgtcggcagacattggattcaaggatatgactagccactgcgaagccctgacgatcgggaaacagcagaaaatgtctgccttcatgagcttccagcaaagcgtgcaagctgcaggggtgccaggcagccagcccaaccagacgacggagctggaccttttccaagacctgcagttgcctcaggccggggcgcagagcacaaacccattctctgatgagagcgttcagggatacccacagtacatgaacgggcccaacggcgacaacgcacagccaggccaggacttccaacagcagtctctgaagctaccggcggcgagcccgtacgacaatttcctaagggctgctggctgttaggagtccagttacatggacgacaaccacctcacctcaagatagtcccaacggaagatcctgcaatttttccacattttgcagggaaagaagaggggtatgtccgcgtgtgaggtcttagctagagactcaaaccgggttcgacacccattctttatgtatagctgtacgtggttgggctttgagccctttgctgctgctgctgttgttttcaccaatgcaacgtgtagagagggactgtgggggagcagtgccttctaccagactgtacatgtaacatgttgcagaaatatatgaagaaaaaatgacgtttgaaggatagatctggtgtagctcgtcgagttaccagatgatgggatcaaagaagcctttcatatttgcggtggaagttcgtt

SEQ ID NO: 213249 - DNA, 2574 bp, Zea Mays
atcatgctcacggagtcgtggtttgctttgccaaggctttgatcccagatggggatctcgtcgggtgcagacttccaccagcagcccaccccacaggccgtgctgccgccacgcccccatggccgtgcgccgacgctgcagacgtctctctccctggctggttccgcctcgccggagcaggtcgggtcgcctccggacacacaggagccgctgtcgaactccgacgcggggcatgactccgccacagagagcgccagctcacgggagacttggcctggggagcccggcaagagtggtggcggcgacgctcctcccgtggcatcagcaccgataactgcactgaggatagctgataataaggagaaggaggtggttggtaatggcgtcgccgagctgcaggcctttcggagtaggatcccgagtgcaggccggatgactctcagggaggttgcttgggacagggtggacctcgttgctgagaagatgaagggtatgagcgatgagctgctggacgaaaccaaagccgagctgcagtcgattctggaagggactggcggtcagcaccagattcaggagttcatgtacctgcagaagcttcttcagggcagggttgatctcaccctgcccatccttttgatggctcaccatgtgcagctggagatcctggttgccatcaagactgggatacaggcgttcttgcacccgagcgtcgacataccccagatccgcctcgctgagattttcctgtacaagaggtgccgcaacattgcttgccagagtgctgtgcctgctgaggagtgcaagtgtaacatatgcagtaacaggaacgggttttgtaatctctgcatgtgcgtgatctgcaataagtttgattttgaggtcaatacgtgccgctgggttgggtgtgatatctgctcgcactggactcacacagactgtgcaattcgtgatggaaagattgggactgggcagacgattaagaacggcgttggccatgcagagatgcttttccggtgccaggcctgccagaggacatctgaactgtttggatgggttagggatgtctttcagcaatgtgcacccaattgggacagggatgccttgctgcgtgagcttgactatgtttgcaagatattccgtctaagtgaggactcaaaggggaggaaattgttcagaaaatgtgctgagctagttgaaagattgaggggtggttctgctgaatcaatgactcctagaattctgctacaagcgctgcaagagctggacattgattcctccaagaactttgagcaccaagagccagggcggctgatcactccccaggaggcctgcaaccggatcgctgaggtcgtccaggaagcagtgaggaagatggagatggtggccgaagagaaattgcggacgtacaaacgcgcccgcctcgctgtggaggcgtgcgacagggagctggaggagaaggcccgggaggcccaggagctgaaggtggagcggctgcggaagctgcagcaggcggaggagctggagagcatcatccggctgaagcaggcggagtcggagatgttccagctgaaggcgagcgaggcccaggaggaggccgagcggctgcggagcgtcgcgctggcgaagcggaagtcggaggcggcggggcaggactacgcgagcatgtacctcaagcggcgcctcgaggaggccgaggccgagaagcagtacatcttcgagaagatcaagctgcaggagaaccagcatgccacgagcagcagcggcgggggtgcccgcctcggcggcggagctccctccgccggggaaccctcgcaggcgatgatgctgtccaagatccaggacctgctgaagaacgtgcgcagcgtgccgtccggcaagccagatgggcagcgctccaagtagcagtagcgtcgtggggtgggctcggctgggcgggaactgccactccatcggcctgctggttgttactacttgttattagacgtagtagttgttaactagcagtgtagtaagtttacatgatatatatactgcatttttttggggggaacaaaatgttgattacctgcgcagcattgtcctaggtgtgtttagtagcgacttgttttcactgattatgtgatatgtatgaattgtatgtgcaggtgattcaagtgtaaccaaacagcgtagctgctgtacggataagtgctaaggctgtctgtagcggtaggggtactcttctcgtaaccgttctccctataaattcttctatatatccctctacacattaaatatatattttcacctaactaacataaccaacttatttttctattttctttttccttttcgacacgtccgccatgtcgccatgttggaatttattttttgttaagtaaaaaaatatttgtggtttataaattgtgcagaacatacaaacataatttaagttaaatttaattttggaaatccataacaaactttattattgtgcgtcgtctagatttttcttaaacatcgagacatgaatattgaaccaaacttccgttggaagcacacaacgaacagtcgtacgcagcaagccacggttgg

SEQ ID NO: 213250 - DNA, 917 bp, Zea Mays
tagaatctttgcctgtgtacggactaatggaaggatgaagtagtaacgaggatagaggagaggatatctgcttggacatttcttccaccagagaatggtgaagccattcagatattacactaccagaatggtgagaaatatgaaccccactacgactacttccatgacaaaaataatcaggccctgggcggccatcgcattgccactgtgctgatgtacctatcaaatgtcgagaagggtggagagaccatcttccccaatgcagaggggaagctattgcaacccaaggacgacacttggtctgattgtgcaagaaacggatatgcagttaaaccggtaaagggtgatgccctgctgttcttcagtctccaccctgattcaacaacagactctgacagcttgcacggtagctgccccgccatcgaaggccagaagtggtccgcgactaaatggatccatgtgaggtcatttgacctcaccgtcaagcagccgggtccctctgatggatgtgaggacgacaatgtcctctgcccccagtgggcggccgtgggcgagtgcgccaagaaccctaactacatggtggggaccaaggaagcacctggcttctgccggaagagctgcaaagtatgcgcagagtaaggtatcggtcctctgcgtctgatgagtaatcgtggcgtacgtgttacgtagttgctgtcaccattttaccagggtttaggtacgaccgagtacagcatgtataagacagtacaaacccggaagaaggaatcgtaagagttaggggacgagttaccagggtttaccgagttaaagctgagcaatctaatcaatggcaacagttcgagcaaatcttgtttccttcatttgtcatggtaacttgtcctgtgggaaatgaaaagcttgttggcgagggcggt

SEQ ID NO: 213251 - DNA, 1254 bp, Zea Mays
gtcatcctcagcctcagctcagtctcttccactctcccttgacctgtctccttcacctgctgattgctgtgccgctccgctccgctccggtggcatctgcatctgcatctccatccctcgatctgtcttctctcagggtggaataagcgtgacaatggaggctccacccgtggcgctgttcgacaccctcaaggcagccaaaccgttcttcttgttggctggtcccaacgtgattgaatcggaggagcacgtcctgaagatggccaaacacatcaaagcaattacgaccaagcttggaattccgctcgtgttcaagtccagctttgataaagcaaaccgtacatcatcaaaatcattccgtggtcctggtcttgaagaaggtcttaagatccttcaaaaggtgaaagcaacatatgaccttccgatagtcactgatgtgcacgaaagccaccagtgtgaagctgttggaagagttgctgacatcatacagattccagccttcctctgtcgccagactgatcttctagtggctgctgctaagactggaaaaattatcaatatcaagaaaggacaattctgtgcgccttctgtagctgatgtaacacatgctctacagcaaccagctggaagaaagcttgatggtggaggtgttgcaagcggtgggctacgagaactaataccgtgcattgcaaggacttctgttgctgttggtgttgatggtattttcatggaggtacatgatgaccccttgaatgcaccatgcgatggcccaactcaatggccgttgcgcaatctggaagagctgttggaggaattaattgcaattgctcgagttaccaagggaaagaagccattcaagatcgacctcactccgttccaggagtgatctgctttggttgatagaaagcacaatgccaccatccatggaattccacagggtggatttcaatatgaattgagtacttgctattgttgggagtatacctgcagtggatgacttagactatctctagcagattctttatctcattccgtattttatttcctttttcaaactccactccgcaaacagtgtcaaacagtgttgtcatctacagtttcgcattccctgttttaccctatctactcgagacagtcttatcaccgaacaaactattgtgttgaaacctgccggattggtttgtgttatttcaccagttgtgccatgttggactaacaatatcgctaaacaaatgcaattgttggttatgttct

SEQ ID NO: 213252 - DNA, 2262 bp, Zea Mays
gttgggcccgtcccatgccccccactaaaatactccaagccgctgggccgccgtggcccacccaccgccgtcgtcaccctcccgccccgccggccgccgcagatgggccagccgcggcggcgcggctacccgcacggccgccaccaccggtgcccgcgcggcattgcgctgccggcggccggagcgggcctgctcttcctctccgtctcgctcctctccgtctcactcctctccgcgccgccgctcgcggacccgcgcccgggcctcggcacctcctcctcctctcgacggttcctccgccgccatccgacaaacggctctgacggcgaactggagggctccgagagcggcgacgcgttcagtgttccggcacgcggtggatggactgggcaggatgatctttggggatcgaagcttgctagcaacttccacggatgcagcaactctagtagtagatttcttgattctggtattaccacacaaccagatcgatacttgattgttgttacaagtggaggtctcaatcagcagagaacagggatagttgatgctgtagttgctgcacgtatattgaatgctacacttgttgttcccaaactggatcaaacatctttctggaaagattcaagcaatttttcagaaatctttgatatggactggttcatctcatttcttgcaaaggatgtcagaattatcaaagagcctccagaaaaaggaggtaaagcaatgaaaccttataaaatgcgtgtcccccgaaaatgtactccacggtgttacttgaaccgtgtcttaccagcacttctgaagaaacatagtcaattatcattctttgagatttactgacccaatacaagaattggctgaaaagctaatacaacgaatgcgagaaaagaacagatattttattgctcttcacctgagatttgaacctgacatgcttgccttttctgggtgctattatggtggtggagaaaaggagaggagagaattagctgcaattcgcagacgatggagaaccttgcatgtacaagctgtgtgatgtgtaatcattactcgcttactgagatagaattaccttttgctaaaagttttcatattctagatacgtgacccggagaaaggaagacggcaaggcaggtgtccactaactcctgaggaggtagggttgatgctgagggcattaggctacagaagtgatgtgcacatttatgttgcttctggtgagatatatggaggggaagatacattagcatccctgaaagcgctctttcctaatttccatacaaaagaaacactatcaagccaagaggagcttgctcctttcctgaagttctcatctcgcatggctgcaatcgatttcattgtctgtgaggaaagtgatgcttttgtggctaacaacattgggaacatggccaaaattctggctgggcaaaggagatattttggacacaagagaacaatccggccaaatgctaaacagctctatcccttattcatgaagaggggaaatatgtcatgggatgcatttgcctcacaggtgcgaacaatccagaaaggatatatgggagaacccatggaaatcacaccaggaagaggcgaatttcatgcaaaccctgccgcctgtatatgtgaaaagaccagcagaaactcagcaatagtcaagtccatttctggaaataacctggaacctgtaactgacagtggaataaggaaaaccattggcattagtagaccaccatatcctgtttatactgatgaagaggcagatggatctgatacagaagaagatccggacagcagtgggagaggagaggtgattgacactgaacctgacgatgattctgcggtcagacaggaggaccctgagctagaggagatcctgtcagattagttcagttgtgcggctgtttcccccggttaagctatgctaatctgactgcatatacatgtgttgtatgtggcagcaattttatggtttgggcatcaccgaactagcttagatctgcagccgctggtgtacatagattttgtggtgtgcagctgtccaccctctttctcttagctgaatgagggcatgatcatgtttgtcacctgtgcaagccagatttgcttaccttttcttagtatcccgccatcgctcaaccctcaagcaaatgtgcaaataaaagagaataaaaaaacaagagaagttggttctccagtgccgttcaccatcttgggcattggacggcgcatatgatatggaccggaacctttgcccga

SEQ ID NO: 213253 - DNA, 2198 bp, Zea Mays
gttgggcccgtcccatgccccccactaaaatactccaagccgctgggccgccgtggcccacccaccgccgtcgtcaccctcccgccccgccggccgccgcagatgggccagccgcggcggcgcggctacccgcacggccgccaccaccggtgcccgcgcggcattgcgctgccggcggccggagcgggcctgctcttcctctccgtctcgctcctctccgtctcactcctctccgcgccgccgctcgcggacccgcgcccgggcctcggcacctcctcctcctctcgacggttcctccgccgccatccggcacgcggtggatggactgggcaggatgatctttggggatcgaagcttgctagcaacttccacggatgcagcaactctagtagtagatttcttgattctggtattaccacacaaccagatcgatacttgattgttgttacaagtggaggtctcaatcagcagagaacagggatagttgatgctgtagttgctgcacgtatattgaatgctacacttgttgttcccaaactggatcaaacatctttctggaaagattcaagcaatttttcagaaatctttgatatggactggttcatctcatttcttgcaaaggatgtcagaattatcaaagagcctccagaaaaaggaggtaaagcaatgaaaccttataaaatgcgtgtcccccgaaaatgtactccacggtgttacttgaaccgtgtcttaccagcacttctgaagaaacatgttattcgaatgactaaatatgattatagactctcaaataagttggacactgacctgcaaaaactacgttgcagagtcaattatcattctttgagatttactgacccaatacaagaattggctgaaaagctaatacaacgaatgcgagaaaagaacagatattttattgctcttcacctgagatttgaacctgacatgcttgccttttctgggtgctattatggtggtggagaaaaggagaggagagaattagctgcaattcgcagacgatggagaaccttgcatatacgtgacccggagaaaggaagacggcaaggcaggtgtccactaactcctgaggaggtagggttgatgctgagggcattaggctacagaagtgatgtgcacatttatgttgcttctggtgagatatatggaggggaagatacattagcatccctgaaagcgctctttcctaatttccatacaaaagaaacactatcaagccaagaggagcttgctcctttcctgaagttctcatctcgcatggctgcaatcgatttcattgtctgtgaggaaagtgatgcttttgtggctaacaacattgggaacatggccaaaattctggctgggcaaaggagatattttggacacaagagaacaatccggccaaatgctaaacagctctatcccttattcatgaagaggggaaatatgtcatgggatgcatttgcctcacaggtgcgaacaatccagaaaggatatatgggagaacccatggaaatcacaccaggaagaggcgaatttcatgcaaaccctgccgcctgtatatgtgaaaagaccagcagaaactcagcaatagtcaagtccatttctggaaataacctggaacctgtaactgacagtggaataaggaaaaccattggcattagtagaccaccatatcctgtttatactgatgaagaggcagatggatctgatacagaagaagatccggacagcagtgggagaggagaggtgattgacactgaacctgacgatgattctgcggtcagacaggaggaccctgagctagaggagatcctgtcagattagttcagttgtgcggctgtttcccccggttaagctatgctaatctgactgcatatacatgtgttgtatgtggcagcaattttatggtttgggcatcaccgaactagcttagatctgcagccgctggtgtacatagattttgtggtgtgcagctgtccaccctctttctcttagctgaatgagggcatgatcatgtttgtcacctgtgcaagccagatttgcttaccttttcttagtatcccgccatcgctcaaccctcaagcaaatgtgcaaataaaagagaataaaaaaacaagagaagttggttctccagtgccgttcaccatcttgggcattggacggcgcatatgatatggaccggaacctttgcccga

SEQ ID NO: 213254 - DNA, 2247 bp, Zea Mays
gttgggcccgtcccatgccccccactaaaatactccaagccgctgggccgccgtggcccacccaccgccgtcgtcaccctcccgccccgccggccgccgcagatgggccagccgcggcggcgcggctacccgcacggccgccaccaccggtgcccgcgcggcattgcgctgccggcggccggagcgggcctgctcttcctctccgtctcgctcctctccgtctcactcctctccgcgccgccgctcgcggacccgcgcccgggcctcggcacctcctcctcctctcgacggttcctccgccgccatccgacaaacggctctgacggcgaactggagggctccgagagcggcgacgcgttcagtgttccggcacgcggtggatggactgggcaggatgatctttggggatcgaagcttgctagcaacttccacggatgcagcaactctagtagtagatttcttgattctggtattaccacacaaccagatcgatacttgattgttgttacaagtggaggtctcaatcagcagagaacagggatagttgatgctgtagttgctgcacgtatattgaatgctacacttgttgttcccaaactggatcaaacatctttctggaaagattcaagaaatctttgatatggactggttcatctcatttcttgcaaaggatgtcagaattatcaaagagcctccagaaaaaggaggtaaagcaatgaaaccttataaaatgcgtgtcccccgaaaatgtactccacggtgttacttgaaccgtgtcttaccagcacttctgaagaaacatgttattcgaatgactaaatatgattatagactctcaaataagttggacactgacctgcaaaaactacgttgcagagtcaattatcattctttgagatttactgacccaatacaagaattggctgaaaagctaatacaacgaatgcgagaaaagaacagatattttattgctcttcacctgagatttgaacctgacatgcttgccttttctgggtgctattatggtggtggagaaaaggagaggagagaattagctgcaattcgcagacgatggagaaccttgcatatacgtgacccggagaaaggaagacggcaaggcaggtgtccactaactcctgaggaggtagggttgatgctgagggcattaggctacagaagtgatgtgcacatttatgttgcttctggtgagatatatggaggggaagatacattagcatccctgaaagcgctctttcctaatttccatacaaaagaaacactatcaagccaagaggagcttgctcctttcctgaagttctcatctcgcatggctgcaatcgatttcattgtctgtgaggaaagtgatgcttttgtggctaacaacattgggaacatggccaaaattctggctgggcaaaggagatattttggacacaagagaacaatccggccaaatgctaaacagctctatcccttattcatgaagaggggaaatatgtcatgggatgcatttgcctcacaggtgcgaacaatccagaaaggatatatgggagaacccatggaaatcacaccaggaagaggcgaatttcatgcaaaccctgccgcctgtatatgtgaaaagaccagcagaaactcagcaatagtcaagtccatttctggaaataacctggaacctgtaactgacagtggaataaggaaaaccattggcattagtagaccaccatatcctgtttatactgatgaagaggcagatggatctgatacagaagaagatccggacagcagtgggagaggagaggtgattgacactgaacctgacgatgattctgcggtcagacaggaggaccctgagctagaggagatcctgtcagattagttcagttgtgcggctgtttcccccggttaagctatgctaatctgactgcatatacatgtgttgtatgtggcagcaattttatggtttgggcatcaccgaactagcttagatctgcagccgctggtgtacatagattttgtggtgtgcagctgtccaccctctttctcttagctgaatgagggcatgatcatgtttgtcacctgtgcaagccagatttgcttaccttttcttagtatcccgccatcgctcaaccctcaagcaaatgtgcaaataaaagagaataaaaaaacaagagaagttggttctccagtgccgttcaccatcttgggcattggacggcgcatatgatatggaccggaacctttgcccga

SEQ ID NO: 213255 - DNA, 2365 bp, Zea Mays
aaagctccgaaactattacaggcgtcgtcgaggcggccaatcgaataacgaccccggtcaacgaaccgccgaccagggcgtgtccagggctgccaccaccttttgctgttgggcccgtcccatgccccccactaaaatactccaagccgctgggccgccgtggcccacccaccgccgtcgtcaccctcccgccccgccggccgccgcagatgggccagccgcggcggcgcggctacccgcacggccgccaccaccggtgcccgcgcggcattgcgctgccggcggccggagcgggcctgctcttcctctccgtctcgctcctctccgtctcactcctctccgcgccgccgctcgcggacccgcgcccgggcctcggcacctcctcctcctctcgacggttcctccgccgccatccgacaaacggctctgacggcgaactggagggctccgagagcggcgacgcgttcagtgttccggcacgcggtggatggactgggcaggatgatctttggggatcgaagcttgctagcaacttccacggatgcagcaactctagtagtagatttcttgattctggtattaccacacaaccagatcgatacttgattgttgttacaagtggaggtctcaatcagcagagaacagggatagttgatgctgtagttgctgcacgtatattgaatgctacacttgttgttcccaaactggatcaaacatctttctggaaagattcaagcaatttttcagaaatctttgatatggactggttcatctcatttcttgcaaaggatgtcagaattatcaaagagcctccagaaaaaggaggtaaagcaatgaaaccttataaaatgcgtgtcccccgaaaatgtactccacggtgttacttgaaccgtgtcttaccagcacttctgaagaaacatgttattcgaatgactaaatatgattatagactctcaaataagttggacactgacctgcaaaaactacgttgcagagtcaattatcattctttgagatttactgacccaatacaagaattggctgaaaagctaatacaacgaatgcgagaaaagaacagatattttattgctcttcacctgagatttgaacctgacatgcttgccttttctgggtgctattatggtggtggagaaaaggagaggagagaattagctgcaattcgcagacgatggagaaccttgcatatacgtgacccggagaaaggaagacggcaaggcaggtgtccactaactcctgaggaggtagggttgatgctgagggcattaggctacagaagtgatgtgcacatttatgttgcttctggtgagatatatggaggggaagatacattagcatccctgaaagcgctctttcctaatttccatacaaaagaaacactatcaagccaagaggagcttgctcctttcctgaagttctcatctcgcatggctgcaatcgatttcattgtctgtgaggaaagtgatgcttttgtggctaacaacattgggaacatggccaaaattctggctgggcaaaggagatattttggacacaagagaacaatccggccaaatgctaaacagctctatcccttattcatgaagaggggaaatatgtcatgggatgcatttgcctcacaggtgcgaacaatccagaaaggatatatgggagaacccatggaaatcacaccaggaagaggcgaatttcatgcaaaccctgccgcctgtatatgtgaaaagaccagcagaaactcagcaatagtcaagtccatttctggaaataacctggaacctgtaactgacagtggaataaggaaaaccattggcattagtagaccaccatatcctgtttatactgatgaagaggcagatggatctgatacagaagaagatccggacagcagtgggagaggagaggtgattgacactgaacctgacgatgattctgcggtcagacaggaggaccctgagctagaggagatcctgtcagattagttcagttgtgcggctgtttcccccggttaagctatgctaatctgactgcatatacatgtgttgtatgtggcagcaattttatggtttgggcatcaccgaactagcttagatctgcagccgctggtgtacatagattttgtggtgtgcagctgtccaccctctttctcttagctgaatgagggcatgatcatgtttgtcacctgtgcaagccagatttgcttaccttttcttagtatcccgccatcgctcaaccctcaagcaaatgtgcaaataaaagagaataaaaaaacaagagaagttggttctccagtgccgttcaccatcttgggcattggacggcgcatatgatatggaccggaacctttgcccga

SEQ ID NO: 213256 - DNA, 4275 bp, Zea Mays
cgtttctttaccctaaccttttcactgctccagcgaaggcacacacccgccgccgtttcttgattctcccatctacatcttcctcgcagcgccggcgcggcggcgctccatcttccgctccctcccttacttgcgcttggcacgcaggcgacggcggcggcgcccagtctcgtactctcagcggcggcgtcagtggcttcccctcccgcctctcgccagtcgcctcgcgccctcgcctccggtcctgcgcacgccggcctgttaccctgcgacattgttgaattctctgaagtgtgtgctcttgtaaaggcttgctaaaatggcaaatttaaacataaccaacatcttggagaagatgacagggaaagataaagactacagatatatggcaacatcagatctgcttagtgaattgaataaagaaagcttcaaagctgatcaagaccttgagccaaagttaacgattactgttcttcaacaacttgaggatgcttcgggagatgtttctggtttagctgttaaatgcttggccccactcgtcaagaaggttggtgaggacagggttgtggagatgaccaataaactttgtgataagttgataaatggaaaggaccagcatcgggataccgctagtatagccctcaagacaatcattgctgaagttactacaccgtcacttgctgaaaagatcttgctttctcttgccccgcaactcatcaagggtgtcaatactgcaaaaagtgctgaaattaaatgcgaatgtcttgatatattggcggatgtgcttcatagatttggcaacttgatcacaaaagatcatgagtacatgctcaatgcacttttatcccaattgggttctaacccagcaagcgtcagaaagaaatctatttcttgcattgcatcacttgctccaagtttatcagatgatttgttagcaaaggcaactttgcaagttgtccagttgctgaaaaatagaggtgcaaaatctgaaattacccgaacaaatatccagatgattggttctctaagtcgttctgttgggtaccgttttgggccacaccttgctgaaactgttcctttgcttataagctattgtacaagtgcatctgaaaatgatgaagagctccgtgaatacagcttgcaggctcttgagagctttatgctcaggtgcccaagggatatatccccatattgtgagggcatcttgaatcttgctttggaatatgtgagctatgatcctaatttcactgatagcatggatgaggatactgatgaggaagcgaaggaagaggatgatgacgatgagagtgcaaatgagtacacagatgatgaggatgcaagctggaaagtccgtagggcatcagcaaagtgcctatctgcaattatagtgtctcgtcctgaaatgttgtcgaagatgtttctagaggcttgtccaaagttaattgaacgatttcgggaaagagaggagaatgtaaagatggatatatttaacaccttcattgagctgttacgccaaactggtaatgttacgaaaggacaaggcgacatcgatgagtccagccctcgctggttgctgaagcaagaggtcccaaaagttgtcaagtctatcaacaggcagttacgtgaaaaatcaatcaagacaaaggttggggcattttcagtactgaaggagcttgtggttgtattaccagactgtcttgctgatcatttcgggtcacttgttcctgggattgagaaggctttgaatgacaagtcttctacctccaacctgaagattgaagcccttgtattaacaaggcttgttatggcttcacattcaccatctgtgtttcatccatacatcaaggctctttctgcacctatactgtctgctatcagagatagatattataaagtcactgctgaggctttgcgggtgtgtggagagctagtccgtgtccttcgtccaaatctcgagacaacctcagttgattttaagccatacattggtccaatctataatgcaatactgggacgtttggccaatcaagatcaggatcaggaggtaaaagaatgcgccatatcttgcatgagtttggtggtctctacttttggtgatggtcttgaaagagaattaccagcatgccttcccatactcgttgacaggatgggtaatgaaattacaagacttacagctgtcaagttattgcgaattcacctctacgtattgatctctcgtgtgtcctggatcatgttgtttctgagctcacagctttccttcgcaaggccaacagagctcttaggcaggcgacgttgggaactctaaattctttggttgtcacatatggtggtcagattggctcttcttcgtatgagacaataatcgcggaactttcaaccctcataagtgacatggatttgcatatgaccgctcttgcattggaactttgttgcacaataatggttgacagaaaatctattcaaaacgttggtttagctgttagagataaagttttgcctcaggcccttgttttgatcaggagtgccctgttgcaagggcaggcactgcaggctcttcagaggttttttgcatcacttgttcaatctgcaaatactagctttgatgctttgttggagtcccttatttctgctgctaagccatcacattcaggtagtcttgctaagcaagcactgtcttctattgctaagtgtgttgctgttctatgcttagcagctggtgaccagaagtgtgcatctacaattgaaatgcttaaaggcattttgaaagacgacagcactactaactctgctaaacaacacatggccttattatgtctgggagaaattgggaggaggaaggacctcagcaatcatgttcaaattgagaacatcgtcattgaatcgtttcaatcaccttttgaggagattaagtccgcagcatcctatgcacttggaaacattgctgttggcaacctctccaagtatttaccatttattttggatcagattgacaatcaacagaagaagcaatatctgttgctccattcacttaaagaggtaatcgtgcgacaatctgttgatcatactggccagagtgagctacaggattcaaacattgagaagatattggcattgctcttcaatcactgtgaaagtgaggaggagggagttcggaatgttgttgcagagtgtttaggaaaaatttctctaattgaaccaaaaaaactagtccctgctttggaggtacgcacgtctagcccagcagcaaatacaagagctacggttgctattgctataaaatattcaattgttgaacgacctgagaaaatagatgaaatcatgtactccaagatatctactttcttgatgttgattaaagacagcgataggcatgtgagaagagcagcagttctggctttgagcacagcagcgcacaacaagccaaatttgattaaaggtcttcttccagagatattacctcttctatacgaccaaactgttattaagcaagagttaatcaggacagttgatcttgggcctttcaaacatgttgtagatgatggtcttgaactcaggaaagctgcctttgaatgtgtggatactttattggacagttgtcttgatcaagtgaatccatcgtccttcattgtacctttcctcttgtctggtttaggtgaccattacgacgtgaaaatgccttgccatttgattctatcaaagctagcagacaagtgcccttccgccgtccttgctgtcctggactccatagttgaaccaatcgagaaaactataagccacaaacccaagggggatgcagtgaagcaggaggttgatcggaacgaggacatgatccgcagcgctctcagggcaatatcttctctaagccgcataagcggcagcgactacagcatacggttcaagaatctgatgaacaagataacggccacccccgcgctcgccgagaagtacaactcggtgcgcggcgaatgagacctgggttcttgtacatggtagaggaataggttaaacacccagagttgtcgcgcgctcgtcaatcctgttgccgcttccccgcatggttgctgaggcaaaagtctgtactctgatgatgacggtggttgatttttgactgctggacatagttgtcttgtacaaaatctggtggtaaattcagtagaattgccgccgatacatttacctggtggttctcttgtcgcagttcagtttcagttgacctatgaagcgctgatgcagatcagactattctggcatctgttcttttttctttttttccta

SEQ ID NO: 213257 - DNA, 3913 bp, Zea Mays
ccgccgccgtttcttgattctcccatctacatcttcctcgcagcgccggcgcggcggcgctccatcttccgctccctcccttacttgcgcttggcacgcaggcgacggcggcggcgcccagtctcgtactctcagcggcggcgtcagtggcttcccctcccgcctctcgccagtcgcctcgcgccctcgcctccggtcctgcgcacgccggcctgttaccctgcgacattgttgaattctctgaagtgtgtgctcttgtaaaggcttgctaaaatggcaaatttaaacataaccaacatcttggagaagatgacagggaaagataaagactacagatatatggcaacatcagatctgcttagtgaattgaataaagaaagcttcaaagctgatcaagaccttgagccaaagttaacgattactgttcttcaacaacttgaggatgcttcgggagatgtttctggtttagctgttaaatgcttggccccactcgtcaagaaggttggtgaggacagggttgtggagatgaccaataaactttgtgataagttgataaatggaaaggaccagcatcgggataccgctagtatagccctcaagacaatcattgctgaagttactacaccgtcacttgctgaaaagatcttgctttctcttgccccgcaactcatcaagggtgtcaatactgcaaaaagtgctgaaattaaatgcgaatgtcttgatatattggcggatgtgcttcatagatttggcaacttgatcacaaaagatcatgagtacatgctcaatgcacttttatcccaattgggttctaacccagcaagcgtcagaaagaaatctatttcttgcattgcatcacttgctccaagtttatcagatgatttgttagcaaaggcaactttgcaagttgtccagttgctgaaaaatagaggtgcaaaatctgaaattacccgaacaaatatccagatgattggttctctaagtcgttctgttgggtaccgttttgggccacaccttgctgaaactgttcctttgcttataagctattgtacaagtgcatctgaaaatgatgaagagctccgtgaatacagcttgcaggctcttgagagctttatgctcaggtgcccaagggatatatccccatattgtgagggcatcttgaatcttgctttggaatatgtgagctatgatcctaatttcactgatagcatggatgaggatactgatgaggaagcgaaggaagaggatgatgacgatgagagtgcaaatgagtacacagatgatgaggatgcaagctggaaagtccgtagggcatcagcaaagtgcctatctgcaattatagtgtctcgtcctgaaatgttgtcgaagatgtttctagaggcttgtccaaagttaattgaacgatttcgggaaagagaggagaatgtaaagatggatatatttaacaccttcattgagctgttacgccaaactggtaatgttacgaaaggacaaggcgacatcgatgagtccagccctcgctggttgctgaagcaagaggtcccaaaagttgtcaagtctatcaacaggcagttacgtgaaaaatcaatcaagacaaaggttggggcattttcagtactgaaggagcttgtggttgtattaccagactgtcttgctgatcatttcgggtcacttgttcctgggattgagaaggctttgaatgacaagtcttctacctccaacctgaagattgaagcccttgtattaacaaggcttgttatggcttcacattcaccatctgtgtttcatccatacatcaaggctctttctgcacctatactgtctgctatcagagatagatattataaagtcactgctgaggctttgcgggtgtgtggagagctagtccgtgtccttcgtccaaatctcgagacaacctcagttgattttaagccatacattggtccaatctataatgcaatactgggacgtttggccaatcaagatcaggatcaggaggtaaaagaatgcgccatatcttgcatgagtttggtggtctctacttttggtgatggtcttgaaagagaattaccagcatgccttcccatactcgttgacaggatgggtaatgaaattacaagacttacagctgtcaaggcattttcagttattgcgaattcacctctacgtattgatctctcgtgtgtcctggatcatgttgtttctgagctcacagctttccttcgcaaggccaacagagctcttaggcaggcgacgttgggaactctaaattctttggttgtcacatatggtggtcagattggctcttcttcgtatgagacaataatcgcggaactttcaaccctcataagctggtgaccagaagtgtgcatctacaattgaaatgcttaaaggcattttgaaagacgacagcactactaactctgctaaacaacacatggccttattatgtctgggagaaattgggaggaggaaggacctcagcaatcatgttcaaattgagaacatcgtcattgaatcgtttcaatcaccttttgaggagattaagtccgcagcatcctatgcacttggaaacattgctgttggcaacctctccaagtatttaccatttattttggatcagattgacaatcaacagaagaagcaatatctgttgctccattcacttaaagaggtaatcgtgcgacaatctgttgatcatactggccagagtgagctacaggattcaaacattgagaagatattggcattgctcttcaatcactgtgaaagtgaggaggagggagttcggaatgttgttgcagagtgtttaggaaaaatttctctaattgaaccaaaaaaactagtccctgctttggaggtacgcacgtctagcccagcagcaaatacaagagctacggttgctattgctataaaatattcaattgttgaacgacctgagaaaatagatgaaatcatgtactccaagatatctactttcttgatgttgattaaagacagcgataggcatgtgagaagagcagcagttctggctttgagcacagcagcgcacaacaagccaaatttgattaaaggtcttcttccagagatattacctcttctatacgaccaaactgttattaagcaagagttaatcaggacagttgatcttgggcctttcaaacatgttgtagatgatggtcttgaactcaggaaagctgcctttgaatgtgtggatactttattggacagttgtcttgatcaagtgaatccatcgtccttcattgtacctttcctcttgtctggtttaggtgaccattacgacgtgaaaatgccttgccatttgattctatcaaagctagcagacaagtgcccttccgccgtccttgctgtcctggactccatagttgaaccaatcgagaaaactataagccacaaacccaagggggatgcagtgaagcaggaggttgatcggaacgaggacatgatccgcagcgctctcagggcaatatcttctctaagccgcataagcggcagcgactacagcatacggttcaagaatctgatgaacaagataacggccacccccgcgctcgccgagaagtacaactcggtgcgcggcgaatgagacctgggttcttgtacatggtagaggaataggttaaacacccagagttgtcgcgcgctcgtcaatcctgttgccgcttccccgcatggttgctgaggcaaaagtctgtactctgatgatgacggtggttgatttttgactgctggacatagttgtcttgtacaaaatctggtggtaaattcagtagaattgccgccgatacatttacctggtggttctcttgtcgcagttcagtttcagttgacctatgaagcgctgatgcagatcagactattctggcatctgttcttttttctttttttccta

SEQ ID NO: 213258 - DNA, 4284 bp, Zea Mays
ccgccgccgtttcttgattctcccatctacatcttcctcgcagcgccggcgcggcggcgctccatcttccgctccctcccttacttgcgcttggcacgcaggcgacggcggcggcgcccagtctcgtactctcagcggcggcgtcagtggcttcccctcccgcctctcgccagtcgcctcgcgccctcgcctccggtcctgcgcacgccggcctgttaccctgcgtgcgtgcctctctctctcctcccgcctcctaatctcgttacctattttgttttccagcaggacattgttgaattctctgaagtgtgtgctcttgtaaaggcttgctaaaatggcaaatttaaacataaccaacatcttggagaagatgacagggaaagataaagactacagatatatggcaacatcagatctgcttagtgaattgaataaagaaagcttcaaagctgatcaagaccttgagccaaagttaacgattactgttcttcaacaacttgaggatgcttcgggagatgtttctggtttagctgttaaatgcttggccccactcgtcaagaaggttggtgaggacagggttgtggagatgaccaataaactttgtgataagttgataaatggaaaggaccagcatcgggataccgctagtatagccctcaagacaatcattgctgaagttactacaccgtcacttgctgaaaagatcttgctttctcttgccccgcaactcatcaagggtgtcaatactgcaaaaagtgctgaaattaaatgcgaatgtcttgatatattggcggatgtgcttcatagatttggcaacttgatcacaaaagatcatgagtacatgctcaatgcacttttatcccaattgggttctaacccagcaagcgtcagaaagaaatctatttcttgcattgcatcacttgctccaagtttatcagatgatttgttagcaaaggcaactttgcaagttgtccagttgctgaaaaatagaggtgcaaaatctgaaattacccgaacaaatatccagatgattggttctctaagtcgttctgttgggtaccgttttgggccacaccttgctgaaactgttcctttgcttataagctattgtacaagtgcatctgaaaatgatgaagagctccgtgaatacagcttgcaggctcttgagagctttatgctcaggtgcccaagggatatatccccatattgtgagggcatcttgaatcttgctttggaatatgtgagctatgatcctaatttcactgatagcatggatgaggatactgatgaggaagcgaaggaagaggatgatgacgatgagagtgcaaatgagtacacagatgatgaggatgcaagctggaaagtccgtagggcatcagcaaagtgcctatctgcaattatagtgtctcgtcctgaaatgttgtcgaagatgtttctagaggcttgtccaaagttaattgaacgatttcgggaaagagaggagaatgtaaagatggatatatttaacaccttcattgagctgttacgccaaactggtaatgttacgaaaggacaaggcgacatcgatgagtccagccctcgctggttgctgaagcaagaggtcccaaaagttgtcaagtctatcaacaggcagttacgtgaaaaatcaatcaagacaaagtactgaaggagcttgtggttgtattaccagactgtcttgctgatcatttcgggtcacttgttcctgggattgagaaggctttgaatgacaagtcttctacctccaacctgaagattgaagcccttgtattaacaaggcttgttatggcttcacattcaccatctgtgtttcatccatacatcaaggctctttctgcacctatactgtctgctatcagagatagatattataaagtcactgctgaggctttgcgggtgtgtggagagctagtccgtgtccttcgtccaaatctcgagacaacctcagttgattttaagccatacattggtccaatctataatgcaatactgggacgtttggccaatcaagatcaggatcaggaggtaaaagaatgcgccatatcttgcatgagtttggtggtctctacttttggtgatggtcttgaaagagaattaccagcatgccttcccatactcgttgacaggatgggtaatgaaattacaagacttacagctgtcaaggcattttcagttattgcgaattcacctctacgtattgatctctcgtgtgtcctggatcatgttgtttctgagctcacagctttccttcgcaaggccaacagagctcttaggcaggcgacgttgggaactctaaattctttggttgtcacatatggtggtcagattggctcttcttcgtatgagacaataatcgcggaactttcaaccctcataagtgacatggatttgcatatgaccgctcttgcattggaactttgttgcacaataatggttgacagaaaatctattcaaaacgttggtttagctgttagagataaagttttgcctcaggcccttgttttgatcaggagtgccctgttgcaagggcaggcactgcaggctcttcagaggttttttgcatcacttgttcaatctgcaaatactagctttgatgctttgttggagtcccttatttctgctgctaagccatcacattcaggtagtcttgctaagcaagcactgtcttctattgctaagtgtgttgctgttctatgcttagcagctggtgaccagaagtgtgcatctacaattgaaatgcttaaaggcattttgaaagacgacagcactactaactctgctaaacaacacatggccttattatgtctgggagaaattgggaggaggaaggacctcagcaatcatgttcaaattgagaacatcgtcattgaatcgtttcaatcaccttttgaggagattaagtccgcagcatcctatgcacttggaaacattgctgttggcaacctctccaagtatttaccatttattttggatcagattgacaatcaacagaagaagcaatatctgttgctccattcacttaaagaggtaatcgtgcgacaatctgttgatcatactggccagagtgagctacaggattcaaacattgagaagatattggcattgctcttcaatcactgtgaaagtgaggaggagggagttcggaatgttgttgcagagtgtttaggaaaaatttctctaattgaaccaaaaaaactagtccctgctttggaggtacgcacgtctagcccagcagcaaatacaagagctacggttgctattgctataaaatattcaattgttgaacgacctgagaaaatagatgaaatcatgtactccaagatatctactttcttgatgttgattaaagacagcgataggcatgtgagaagagcagcagttctggctttgagcacagcagcgcacaacaagccaaatttgattaaaggtcttcttccagagatattacctcttctatacgaccaaactgttattaagcaagagttaatcaggacagttgatcttgggcctttcaaacatgttgtagatgatggtcttgaactcaggaaagctgcctttgaatgtgtggatactttattggacagttgtcttgatcaagtgaatccatcgtccttcattgtacctttcctcttgtctggtttaggtgaccattacgacgtgaaaatgccttgccatttgattctatcaaagctagcagacaagtgcccttccgccgtccttgctgtcctggactccatagttgaaccaatcgagaaaactataagccacaaacccaagggggatgcagtgaagcaggaggttgatcggaacgaggacatgatccgcagcgctctcagggcaatatcttctctaagccgcataagcggcagcgactacagcatacggttcaagaatctgatgaacaagataacggccacccccgcgctcgccgagaagtacaactcggtgcgcggcgaatgagacctgggttcttgtacatggtagaggaataggttaaacacccagagttgtcgcgcgctcgtcaatcctgttgccgcttccccgcatggttgctgaggcaaaagtctgtactctgatgatgacggtggttgatttttgactgctggacatagttgtcttgtacaaaatctggtggtaaattcagtagaattgccgccgatacatttacctggtggttctcttgtcgcagttcagtttcagttgacctatgaagcgctgatgcagatcagactattctggcatctgttcttttttctttttttccta

SEQ ID NO: 213259 - DNA, 3683 bp, Zea Mays
ccgccgccgtttcttgattctcccatctacatcttcctcgcagcgccggcgcggcggcgctccatcttccgctccctcccttacttgcgcttggcacgcaggcgacggcggcggcgcccagtctcgtactctcagcggcggcgtcagtggcttcccctcccgcctctcgccagtcgcctcgcgccctcgcctccggtcctgcgcacgccggcctgttaccctgcgtgcgtgcctctctctctcctcccgcctcctaatctcgttacctattttgttttccagcaggacattgttgaattctctgaagtgtgtgctcttgtaaaggcttgctaaaatggcaaatttaaacataaccaacatcttggagaagatgacagggaaagataaagactacagatatatggcaacatcagatctgcttagtgaattgaataaagaaagcttcaaagctgatcaagaccttgagccaaagttaacgattactgttcttcaacaacttgaggatgcttcgggagatgtttctggtttagctgttaaatgcttggccccactcgtcaagaaggttggtgaggacagggttgtggagatgaccaataaactttgtgataagttgataaatggaaaggaccagcatcgggataccgctagtatagccctcaagacaatcattgctgaagttactacaccgtcacttgctgaaaagatcttgctttctcttgccccgcaactcatcaagggtgtcaatactgcaaaaagtgctgaaattaaatgcgaatgtcttgatatattggcggatgtgcttcatagatttggcaacttgatcacaaaagatcatgagtacatgctcaatgcacttttatcccaattgggttctaacccagcaagcgtcagaaagaaatctatttcttgcattgcatcacttgctccaagtttatcagatgatttgttagcaaaggcaactttgcaagttgtccagttgctgaaaaatagaggtgcaaaatctgaaattacccgaacaaatatccagatgattggttctctaagtcgttctgttgggtaccgttttgggccacaccttgctgaaactgttcctttgcttataagctattgtacaagtgcatctgaaaatgatgaagagctccgtgaatacagcttgcaggctcttgagagctttatgctcaggtgcccaagggatatatccccatattgtgagggcatcttgaatcttgctttggaatatgtgagctatgatcctaatttcactgatagcatggatgaggatactgatgaggaagcgaaggaagaggatgatgacgatgagagtgcaaatgagtacacagatgatgaggatgcaagctggaaagtccgtagggcatcagcaaagtgcctatctgcaattatagtgtctcgtcctgaaatgttgtcgaagatgtttctagaggcttgtccaaagttaattgaacgatttcgggaaagagaggagaatgtaaagatggatatatttaacaccttcattgagctgttacgccaaactggtaatgttacgaaaggacaaggcgacatcgatgagtccagccctcgctggttgctgaagcaagaggtcccaaaagttgtcaagtctatcaacaggcagttacgtgaaaaatcaatcaagacaaaggttggggcattttcagtactgaaggagcttgtggttgtattaccagactgtcttgctgatcatttcgggtcacttgttcctgggattgagaaggctttgaatgacaagtcttctacctccaacctgaagattgaagcccttgtattaacaaggcttgttatggcttcacattcaccatctgtgtttcatccatacatcaaggctctttctgcacctatactgtctgctatcagagatagatattataaagtcactgctgaggctttgcgggtgtgtggagagctagtccgtgtccttcgtccaaatctcgagacaacctcagttgattttaagccatacattggtccaatctataatgcaatactgggacgtttggccaatcaagatcaggatcaggaggtaaaagaatgcgccatatcttgcatgagtttggtggtctctacttttggtgatggtcttgaaagagaattaccagcatgccttcccatactcgttgacaggatgggtaatgaaattacaagacttacagctgtcaaggcattttcagttattgcgaattcacctctacgtattgatctctcgtgtgtcctggatcatgttgtttctgagctcacagctttccttcgcaaggccaacagagctcttaggcaggcgacgttgggaactctaaattctttggttgtcacatatggtggtcagattggctcttcttcgtatgagacaataatcgcggaactttcaaccctcataagctggtgaccagaagtgtgcatctacaattgaaatgcttaaaggcattttgaaagacgacagcactactaactctgctaaacaacacatggccttattatgtctgggagaaattgggaggaggaaggacctcagcaatcatgttcaaattgagaacatcgtcattgaatcgtttcaatcaccttttgaggagattaagtccgcagcatcctatgcacttggaaacattgctgttggcaacctctccaagtatttaccatttattttggatcagattgacaatcaacagaagaagcaatatctgttgctccattcacttaaagaggtaatcgtgcgacaatctgttgatcatactggccagagtgagctacaggattcaaacattgagaagatattggcattgctcttcaatcactgtgaaagtgaggaggagggagttcggaatgttgttgcagagtgtttaggaaaaatttctctaattgaaccaaaaaaactagtccctgctttggaggtacgcacgtctagcccagcagcaaatacaagagctacggttgctattgctataaaatattcaattgttgaacgacctgagaaaatagatgaaatcatgtactccaagatatctactttcttgatgttgattaaagacagcgataggcatgtgagaagagcagcagttctggctttgagcacagcagcgcacaacaagccaaatttgattaaaggtcttcttccagagatattacctcttctatacgaccaaactgttattaagcaagagttaatcaggacagttgatcttgggcctttcaaacatgttgtagatgatggtcttgaactcaggaaagctgcctttgaatgtgtggatactttattggacagttgtcttgatcaagtgaatccatcgtccttcattgtacctttcctcttgtctggtttaggtgaccattacgacgtgaaaatgccttgccatttgattctatcaaagctagcagacaagtgcccttccgccgtccttgctgtcctggactccatagttgaaccaatcgagaaaactataagccacaaacccaagggggatgcagtgaagcaggaggttgatcggaacgaggacatgatccgcagcgctctcagggcaatatcttctctaagccgcataaggtttcagtcattgttgaccaccacacttgcacttctagtggtcgaaggaagaccacaacaccaaccagctcatgggttgcctccttagcgcttcccatccttaccaacaaac

SEQ ID NO: 213260 - DNA, 4119 bp, Zea Mays
cactgctcactgcaccgagccgagcgcaggttaggcgggcgcgcgatcaccgaagccgacgcggcgcccgcacgcgccaacggccgaacgcactctctctctctctctctctctctctctctctcccctctccgttgtgctccccgacccaaccctacgcgctcctgccgcccccccgcaggccgcagctacatctctcctcccacctcgccagtcgccaccgcgcggtgggagctcgctgaagtgcttccccccgctttgcggcagcgtcagctcagaccccttgcccgcgctctcgttgtctggcgggctcagctggtttggtcagcgtggcgaggttgtcctggccagatcctgctcccgcccgcgcacgactgggtgtgggcggtggattggctgcgcgggtcatcagatctatgccggagatctagggcgccaggtgccgaggtggaggccgtgagccggtggcgatcggagggccgaggacagggatggcgtggtggtccgggaaggtgtcgctcggcggcctgcaggacatcgctggagccgtcaacaagatcagcgagagcgtgaagaacatcgaaaagaacttcgacagcgcgctcggcctagaggagaagcgtgacgatgaagatgcatcaggatcacagacatccaactctgatagaataggattcttcaatcctgtcatggctttcatgggacacaatggtgaggaggatggcactgaagtatcagaaaagccacaatctctgaagaatctgtcagcagaggaaggaattaatagcacaccaactaagaaacatatatctgaggtagatccttcggaagtatcaggaacaacatctccaaaactgccttcaaaatcggaagaagttcatagtatttccaatgggtcacctgtttctaaggcagatgtttctgagcaatccataacaccacaaactccaacacatccttcagtagcagaagaaaagcttgatagctctactgaggcacctgcatctaaggtgggtgatgctgaagcatcagaaacatcacaatctgcaggacatccttcaacagtggaagaaaaccagcaccatcaagttagcaaacattctgatcctagtgatgaagcagagccgaatcagcttagagagtctgttcgagacttacctgatggtagtgcatcttcttcgcctactaaaatacatcaatcaggtgacaccgaaacaggggaatctattcacacaggaaaggaagatacgtctgataggaacatcttgcagtcacaaccagcagagtctgcgctagctagttcagatgatataacggaagctgaggacaatattgctcaagaatatgatgccccaaaagaacttagtggcccacaggagagtagtgatatggtagacaaaggtactcatcttgaagttaaattacatgatagcaatattaatactgaaaaaagtgaggaagaaagcaataagatggagtcaggggaatcatctgttgttgtacaggaggataatgcaatggagcaacctcaagacttaacgttgaagtccttaactgcagagcatgactcaaattcgcagaacgagtcagtgatcaattcgactgatatacctgttggactaggtgaaggtcctccaaatgattttacaaaagaagaaaagattctagaatctgttagaggcacagattctcagactctggactctgttgtttctgtcgatgagctagagaaattaagacgtgaattgaagatgatggaagctgcattgcaaggtgctgcaagacagtcacagtccaaagctgatgaaattgcaaggttgataaatgagaatgagcaactaaaatcaacaatcgatgatctcaagagtaagtcatctgaagcagaaatggattcactgaaggatgaatatcaccaaagagtagcaactcttgaaaggaaggtatatgcactaaccaaagagcgtgatacactaaggagagaacagaataaaaaaagtgatgcagctgcccttttgaaagaaaaggatgagatcatcaatcagattcgtgagtttgaagaagaaaaacaacgcctgaactcaaagatccaggttgaggaggctaaggttgagagcatcaagagagacaaagcagcaactgagaagttgcttcaagaaacaatagaaagaaatcagactgaacttgcagctcaaaaggagttctacaccaatgctcttaatgcggctaaagaggctgaggcattggctgaagcaagagtcaacagtgaagccaaaattgaactggagaatcttttaggagaagctggtgaaaaagaaaatatgctgattaagacaatcgaggagttgaggcattttctcacccggcaagaacaggaggctgctttcagggaaaaaagactaaaaggggactatgatgatcttcaaaagcggtatcaagccagtgaacttcgttataatgaactggtaacgcaagttcctgagtctaccagaccgcttctaagacaaattgaagccatgcaggagacaactgctcgaagggaagatgcttgggctggtgtggagagaaccttaaactctcgccttcaggaagcagaagctaaagctgcttcttcagaagaaaaggagcgatctgtaaatgagagattgtcacaaagtttatcccggataactgtccttgagacccagattacaattcttagaacagagcagacacagctgagccgatctcttgaaaaggagaggcagagagcatctgaaagtagacaggagtacctagcaatcaaagaggaggcagcaatacaagaagggcgagctaaacagtttgaagaagagatgaaggagcttagagctaggcacaaggaggagctgcaagaagcagcagaacacagggacctgcttgagaaggaccttgaaagggaaaaggctgccagggcagaaattgagaaaacatcttcccgtgaagcgcctaaagctccacttcccgatcaaacaagaaatgcccctctcagaaagctgtctagttctggcagtataaatagtctagaagaaagccattttcttcaagcatcgttggatttatctgacaatgcttcattagagaggcgaatgtcttcagaaagtaatatgtcgtattatctgaagaccatgactccaagtgcttttgaatcagcacttcgtcaaaaagatggagagctggcttcttacatgtcacgcttggcctcattggaatctattcggaattcactagcagaggagttggtaaaactgacagaacaatgtgaaaagttacggactgaagccactgctgtgcctggcttaagggctgaattggaagctctgaaacaaaggcactttcaagctctagaactcatgggggaacgtgatgaagagttggaggagctaagaaatgatattgttgacttaaaagagatgtacagagagcaggtggatcttcttgttagccagctccagtcattgggtgctcgtgtatagcgctgcctgcgctggtatgaatttgtcataccatctaattctcgtccagtgcatcgcggccaggccaagataccaggtccgtgacttgagcatgttttgtttcaaattttgtaacaccatacaacggcactgaatgttttcgtttgtatacatcggaacacagttgttgggtttaggaggatacgttgttgtatactagtaggttgagtagtttcacagctttacgtgtattctttgtgatttgtttccgttgaaatgtatcaaatttgaatccatttgcaagtgtacctcagaggaatgcaatcaataatatcgagagctccttttgtccctttttgtatgttttattctcagtttcattcatagagatcatgtgggagctgtggaaggcaaatagccaaacaatgttccataataacgatcgttcagttctttttatcgccgatttgttcaggccattcgagttcccgcccttttctcttgtttccttccctatcttaagtttgtaaccaaagatataaaagaagttacagaagttctgtttggaattagaatgaaagatttgccatgctcatgcactcatgctacagcagttcagtgcgcagctctgcagaagaacaaagcgaag

SEQ ID NO: 213261 - DNA, 4298 bp, Zea Mays
ccacaacttcggtagcattcgggcgaaacgccgcagacgggacctccgcaggcccagcgcacctccccgcggatagatggttcttcttcgttcaggccgagatccactgctcactgcaccgagccgagcgcaggttaggcgggcgcgcgatcaccgaagccgacgcggcgcccgcacgcgccaacggccgaacgcactctctctctctctctctctctctctctctctcccctctccgttgtgctccccgacccaaccctacgcgctcctgccgcccccccgcaggccgcagctacatctctcctcccacctcgccagtcgccaccgcgcggtgggagctcgctgaagtgcttccccccgctttgcggcagcgtcagctcagaccccttgcccgcgctctcgttgtctggcgggctcagctggtttggtcagcgtggcgaggttgtcctggccagatcctgctcccgcccgcgcacgactgggtgtgggcggtggattggctgcgcgggtcatcagatctatgccggagatctagggcgccaggtgccgaggtggaggccgtgagccggtggcgatcggagggccgaggacagggatggcgtggtggtccgggaaggtgtcgctcggcggcctgcaggacatcgctggagccgtcaacaagatcagcgagagcgtgaagaacatcgaaaagaacttcgacagcgcgctcggcctagaggagaagcgtgacgatgaagatgcatcaggatcacagacatccaactctgatagaataggattcttcaatcctgtcatggctttcatgggacacaatggtgaggaggatggcactgaagtatcagaaaagccacaatctctgaagaatctgtcagcagaggaaggaattaatagcacaccaactaagaaacatatatctgaggtagatccttcggaagtatcaggaacaacatctccaaaactgccttcaaaatcggaagaagttcatagtatttccaatgggtcacctgtttctaaggcagatgtttctgagcaatccataacaccacaaactccaacacatccttcagtagcagaagaaaagcttgatagctctactgaggcacctgcatctaaggtgggtgatgctgaagcatcagaaacatcacaatctgcaggacatccttcaacagtggaagaaaaccagcaccatcaagttagcaaacattctgatcctagtgatgaagcagagccgaatcagcttagagagtctgttcgagacttacctgatggtagtgcatcttcttcgcctactaaaatacatcaatcaggtgacaccgaaacaggggaatctattcacacaggaaaggaagatacgtctgataggaacatcttgcagtcacaaccagcagagtctgcgctagctagttcagatgatataacggaagctgaggacaatattgctcaagaatatgatgccccaaaagaacttagtggcccacaggagagtagtgatatggtagacaaaggtactcatcttgaagttaaattacatgatagcaatattaatactgaaaaaagtgaggaagaaagcaataagatggagtcaggggaatcatctgttgttgtacaggaggataatgcaatggagcaacctcaagacttaacgttgaagtccttaactgcagagcatgactcaaattcgcagaacgagtcagtgatcaattcgactgatatacctgttggactaggtgaaggtcctccaaatgattttacaaaagaagaaaagattctagaatctgttagaggcacagattctcagactctggactctgttgtttctgtcgatgagctagagaaattaagacgtgaattgaagatgatggaagctgcattgcaaggtgctgcaagacagtcacagtccaaagctgatgaaattgcaaggttgataaatgagaatgagcaactaaaatcaacaatcgatgatctcaagagtaagtcatctgaagcagaaatggattcactgaaggatgaatatcaccaaagagtagcaactcttgaaaggaaggtatatgcactaaccaaagagcgtgatacactaaggagagaacagaataaaaaaagtgatgcagctgcccttttgaaagaaaaggatgagatcatcaatcaggtcatggctgaaggtgaagaactatccaaaaaacaagctgctcaagaagctacaatacgaaaactgagagcacagattcgtgagtttgaagaagaaaaacaacgcctgaactcaaagatccaggttgaggaggctaaggttgagagcatcaagagagacaaagcagcaactgagaagttgcttcaagaaacaatagaaagaaatcagactgaacttgcagctcaaaaggagttctacaccaatgctcttaatgcggctaaagaggctgaggcattggctgaagcaagagtcaacagtgaagccaaaattgaactggagaatcttttaggagaagctggtgaaaaagaaaatatgctgattaagacaatcgaggagttgaggcattttctcacccggcaagaacaggaggctgctttcagggaaaaaagactaaaaggggactatgatgatcttcaaaagcggtatcaagccagtgaacttcgttataatgaactggtaacgcaagttcctgagtctaccagaccgcttctaagacaaattgaagccatgcaggagacaactgctcgaagggaagatgcttgggctggtgtggagagaaccttaaactctcgccttcaggaagcagaagctaaagctgcttcttcagaagaaaaggagcgatctgtaaatgagagattgtcacaaagtttatcccggataactgtccttgagacccagattacaattcttagaacagagcagacacagctgagccgatctcttgaaaaggagaggcagagagcatctgaaagtagacaggagtacctagcaatcaaagaggaggcagcaatacaagaagggcgagctaaacagtttgaagaagagatgaaggagcttagagctaggcacaaggaggagctgcaagaagcagcagaacacagggacctgcttgagaaggaccttgaaagggaaaaggctgccagggcagaaattgagaaaacatcttcccgtgaagcgcctaaagctccacttcccgatcaaacaagaaatgcccctctcagaaagctgtctagttctggcagtataaatagtctagaagaaagccattttcttcaagcatcgttggatttatctgacaatgcttcattagagaggcgaatgtcttcagaaagtaatatgtcgtattatctgaagaccatgactccaagtgcttttgaatcagcacttcgtcaaaaagatggagagctggcttcttacatgtcacgcttggcctcattggaatctattcggaattcactagcagaggagttggtaaaactgacagaacaatgtgaaaagttacggactgaagccactgctgtgcctggcttaagggctgaattggaagctctgaaacaaaggcactttcaagctctagaactcatgggggaacgtgatgaagagttggaggagctaagaaatgatattgttgacttaaaagagatgtacagagagcaggtggatcttcttgttagccagctccagtcattgggtgctcgtgtatagcgctgcctgcgctggtatgaatttgtcataccatctaattctcgtccagtgcatcgcggccaggccaagataccaggtccgtgacttgagcatgttttgtttcaaattttgtaacaccatacaacggcactgaatgttttcgtttgtatacatcggaacacagttgttgggtttaggaggatacgttgttgtatactagtaggttgagtagtttcacagctttacgtgtattctttgtgatttgtttccgttgaaatgtatcaaatttgaatccatttgcaagtgtacctcagaggaatgcaatcaataatatcgagagctccttttgtccctttttgtatgttttattctcagtttcattcatagagatcatgtgggagctgtggaaggcaaatagccaaacaatgttccataataacgatcgttcagttctttttatcgccgatttgttcaggccattcgagttcccgcccttttctcttgtttccttccctatcttaagtttgtaaccaaagatataaaagaagttacagaagttctgtttggaattagaatgaaagatttgccatgctcatgcactcatgctacagcagttcagtgcgcagctctgcagaagaacaaagcgaag

SEQ ID NO: 213262 - DNA, 3172 bp, Zea Mays
ggcgaaacgccgcagacgggacctccgcaggcccagcgcacctccccgcggatagatggttcttcttcgttcaggccgagatccactgctcactgcaccgagccgagcgcaggttaggcgggcgcgcgatcaccgaagccgacgcggcgcccgcacgcgccaacggccgaacgcactctctctctctctctctctctctctctctctcccctctccgttgtgctccccgacccaaccctacgcgctcctgccgcccccccgcaggccgcagctacatctctcctcccacctcgccagtcgccaccgcgcggtgggagctcgctgaagtgcttccccccgctttgcggcagcgtcagctcagaccccttgcccgcgctctcgttgtctggcgggctcagctggtttggtcagcgtggcgaggttgtcctggccagatcctgctcccgcccgcgcacgactgggtgtgggcggtggattggctgcgcgggtcatcagatctatgccggagatctagggcgccaggtgccgaggtggaggccgtgagccggtggcgatcggagggccgaggacagggatggcgtggtggtccgggaaggtgtcgctcggcggcctgcaggacatcgctggagccgtcaacaagatcagcgagagcgtgaagaacatcgaaaagaacttcgacagcgcgctcggcctagaggagaagcgtgacgatgaagatgcatcaggatcacagacatccaactctgatagaataggattcttcaatcctgtcatggctttcatgggacacaatggtgaggaggatggcactgaagtatcagaaaagccacaatctctgaagaatctgtcagcagaggaaggaattaatagcacaccaactaagaaacatatatctgaggtagatccttcggaagtatcaggaacaacatctccaaaactgccttcaaaatcggaagaagttcatagtatttccaatgggtcacctgtttctaaggcagatgtttctgagcaatccataacaccacaaactccaacacatccttcagtagcagaagaaaagcttgatagctctactgaggcacctgcatctaaggtgggtgatgctgaagcatcagaaacatcacaatctgcaggacatccttcaacagtggaagaaaaccagcaccatcaagttagcaaacattctgatcctagtgatgaagcagagccgaatcagcttagagagtctgttcgagacttacctgatggtagtgcatcttcttcgcctactaaaatacatcaatcaggtgacaccgaaacaggggaatctattcacacaggaaaggaagatacgtctgataggaacatcttgcagtcacaaccagcagagtctgcgctagctagttcagatgatataacggaagctgaggacaatattgctcaagaatatgatgccccaaaagaacttagtggcccacaggagagtagtgatatggtagacaaaggtactcatcttgaagttaaattacatgatagcaatattaatactgaaaaaagtgaggaagaaagcaataagatggagtcaggggaatcatctgttgttgtacaggaggataatgcaatggagcaacctcaagacttaacgttgaagtccttaactgcagagcatgactcaaattcgcagaacgagtcagtgatcaattcgactgatatacctgttggactaggtgaaggtcctccaaatgattttacaaaagaagaaaagattctagaatctgttagaggcacagattctcagactctggactctgttgtttctgtcgatgagctagagaaattaagacgtgaattgaagatgatggaagctgcattgcaaggtgctgcaagacagtcacagtccaaagctgatgaaattgcaaggttgataaatgagaatgagcaactaaaatcaacaatcgatgatctcaagagtaagtcatctgaagcagaaatggattcactgaaggatgaatatcaccaaagagtagcaactcttgaaaggaaggtatatgcactaaccaaagagcgtgatacactaaggagagaacagaataaaaaaagtgatgcagctgcccttttgaaagaaaaggatgagatcatcaatcagattcgtgagtttgaagaagaaaaacaacgcctgaactcaaagatccaggttgaggaggctaaggttgagagcatcaagagagacaaagcagcaactgagaagttgcttcaagaaacaatagaaagaaatcagactgaacttgcagctcaaaaggagttctacaccaatgctcttaatgcggctaaagaggctgaggcattggctgaagcaagagtcaacagtgaagccaaaattgaactggagaatcttttaggagaagctggtgaaaaagaaaatatgctgattaagacaatcgaggagttgaggcattttctcacccggcaagaacaggaggctgctttcagggaaaaaagactaaaaggggactatgatgatcttcaaaagcggtatcaagccagtgaacttcgttataatgaactggtaacgcaagttcctgagtctaccagaccgcttctaagacaaattgaagccatgcaggagacaactgctcgaagggaagatgcttgggctggtgtggagagaaccttaaactctcgccttcaggaagcagaagctaaagctgcttcttcagaagaaaaggagcgatctgtaaatgagagattgtcacaaagtttatcccggataactgtccttgagacccagattacaattcttagaacagagcagacacagctgagccgatctcttgaaaaggagaggcagagagcatctgaaagtagacaggagtacctagcaatcaaagaggaggcagcaatacaagaagggcgagctaaacagtttgaagaagagatgaaggagcttagagctaggcacaaggaggagctgcaagaagcagcagaacacagggacctgcttgagaagggttctaggccttgtgttcaaaatgtggtgttagcaagtggtcgaggaagggcgcacttggtgcttggctgggtcttcagccctccaagacctgctgtgtcagctcccctcggggtctccaccgtaattcggtgaagctagtggtcgttctctaccttgtgtgtggcgcgctgttcttagccgcgg

SEQ ID NO: 213263 - DNA, 3268 bp, Zea Mays
ccacaacttcggtagcattcgggcgaaacgccgcagacgggacctccgcaggcccagcgcacctccccgcggatagatggttcttcttcgttcaggccgagatccactgctcactgcaccgagccgagcgcaggttaggcgggcgcgcgatcaccgaagccgacgcggcgcccgcacgcgccaacggccgaacgcactctctctctctctctctctctctctctctctcccctctccgttgtgctccccgacccaaccctacgcgctcctgccgcccccccgcaggccgcagctacatctctcctcccacctcgccagtcgccaccgcgcggtgggagctcgctgaagtgcttccccccgctttgcggcagcgtcagctcagaccccttgcccgcgctctcgttgtctggcgggctcagctggtttggtcagcgtggcgaggttgtcctggccagatcctgctcccgcccgcgcacgactgggtgtgggcggtggattggctgcgcgggtcatcagatctatgccggagatctagggcgccaggtgccgaggtggaggccgtgagccggtggcgatcggagggccgaggacagggatggcgtggtggtccgggaaggtgtcgctcggcggcctgcaggacatcgctggagccgtcaacaagatcagcgagagcgtgaagaacatcgaaaagaacttcgacagcgcgctcggcctagaggagaagcgtgacgatgaagatgcatcaggatcacagacatccaactctgatagaataggattcttcaatcctgtcatggctttcatgggacacaatggtgaggaggatggcactgaagtatcagaaaagccacaatctctgaagaatctgtcagcagaggaaggaattaatagcacaccaactaagaaacatatatctgaggtagatccttcggaagtatcaggaacaacatctccaaaactgccttcaaaatcggaagaagttcatagtatttccaatgggtcacctgtttctaaggcagatgtttctgagcaatccataacaccacaaactccaacacatccttcagtagcagaagaaaagcttgatagctctactgaggcacctgcatctaaggtgggtgatgctgaagcatcagaaacatcacaatctgcaggacatccttcaacagtggaagaaaaccagcaccatcaagttagcaaacattctgatcctagtgatgaagcagagccgaatcagcttagagagtctgttcgagacttacctgatggtagtgcatcttcttcgcctactaaaatacatcaatcaggtgacaccgaaacaggggaatctattcacacaggaaaggaagatacgtctgataggaacatcttgcagtcacaaccagcagagtctgcgctagctagttcagatgatataacggaagctgaggacaatattgctcaagaatatgatgccccaaaagaacttagtggcccacaggagagtagtgatatggtagacaaaggtactcatcttgaagttaaattacatgatagcaatattaatactgaaaaaagtgaggaagaaagcaataagatggagtcaggggaatcatctgttgttgtacaggaggataatgcaatggagcaacctcaagacttaacgttgaagtccttaactgcagagcatgactcaaattcgcagaacgagtcagtgatcaattcgactgatatacctgttggactaggtgaaggtcctccaaatgattttacaaaagaagaaaagattctagaatctgttagaggcacagattctcagactctggactctgttgtttctgtcgatgagctagagaaattaagacgtgaattgaagatgatggaagctgcattgcaaggtgctgcaagacagtcacagtccaaagctgatgaaattgcaaggttgataaatgagaatgagcaactaaaatcaacaatcgatgatctcaagagtaagtcatctgaagcagaaatggattcactgaaggatgaatatcaccaaagagtagcaactcttgaaaggaaggtatatgcactaaccaaagagcgtgatacactaaggagagaacagaataaaaaaagtgatgcagctgcccttttgaaagaaaaggatgagatcatcaatcaggtcatggctgaaggtgaagaactatccaaaaaacaagctgctcaagaagctacaatacgaaaactgagagcacagattcgtgagtttgaagaagaaaaacaacgcctgaactcaaagatccaggttgaggaggctaaggttgagagcatcaagagagacaaagcagcaactgagaagttgcttcaagaaacaatagaaagaaatcagactgaacttgcagctcaaaaggagttctacaccaatgctcttaatgcggctaaagaggctgaggcattggctgaagcaagagtcaacagtgaagccaaaattgaactggagaatcttttaggagaagctggtgaaaaagaaaatatgctgattaagacaatcgaggagttgaggcattttctcacccggcaagaacaggaggctgctttcagggaaaaaagactaaaaggggactatgatgatcttcaaaagcggtatcaagccagtgaacttcgttataatgaactggtaacgcaagttcctgagtctaccagaccgcttctaagacaaattgaagccatgcaggagacaactgctcgaagggaagatgcttgggctggtgtggagagaaccttaaactctcgccttcaggaagcagaagctaaagctgcttcttcagaagaaaaggagcgatctgtaaatgagagattgtcacaaagtttatcccggataactgtccttgagacccagattacaattcttagaacagagcagacacagctgagccgatctcttgaaaaggagaggcagagagcatctgaaagtagacaggagtacctagcaatcaaagaggaggcagcaatacaagaagggcgagctaaacagtttgaagaagagatgaaggagcttagagctaggcacaaggaggagctgcaagaagcagcagaacacagggacctgcttgagaagggttctaggccttgtgttcaaaatgtggtgttagcaagtggtcgaggaagggcgcacttggtgcttggctgggtcttcagccctccaagacctgctgtgtcagctcccctcggggtctccaccgtaattcggtgaagctagtggtcgttctctaccttgtgtgtggcgcgctgttcttagccgcgg

SEQ ID NO: 213264 - DNA, 3272 bp, Zea Mays
ccacaacttcggtagcattcgggcgaaacgccgcagacgggacctccgcaggcccagcgcacctccccgcggatagatggttcttcttcgttcaggccgagatccactgctcactgcaccgagccgagcgcaggttaggcgggcgcgcgatcaccgaagccgacgcggcgcccgcacgcgccaacggccgaacgcactctctctctctctctctctctctctctctctcccctctccgttgtgctccccgacccaaccctacgcgctcctgccgcccccccgcaggccgcagctacatctctcctcccacctcgccagtcgccaccgcgcggtgggagctcgctgaagtgcttccccccgctttgcggcagcgtcagctcagaccccttgcccgcgctctcgttgtctggcgggctcagctggtttggtcagcgtggcgaggttgtcctggccagatcctgctcccgcccgcgcacgactgggtgtgggcggtggattggctgcgcgggtcatcagatctatgccggagatctagggcgccaggtgccgaggtggaggccgtgagccggtggcgatcggagggccgaggacagggatggcgtggtggtccgggaaggtgtcgctcggcggcctgcaggacatcgctggagccgtcaacaagatcagcgagagcgtgaagaacatcgaaaagaacttcgacagcgcgctcggcctagaggagaagcgtgacgatgaagatgcatcaggatcacagacatccaactctgatagaataggattcttcaatcctgtcatggctttcatgggacacaatggtgaggaggatggcactgaagtatcagaaaagccacaatctctgaagaatctgtcagcagaggaaggaattaatagcacaccaactaagaaacatatatctgaggtagatccttcggaagtatcaggaacaacatctccaaaactgccttcaaaatcggaagaagttcatagtatttccaatgggtcacctgtttctaaggcagatgtttctgagcaatccataacaccacaaactccaacacatccttcagtagcagaagaaaagcttgatagctctactgaggcacctgcatctaaggtgggtgatgctgaagcatcagaaacatcacaatctgcaggacatccttcaacagtggaagaaaaccagcaccatcaagttagcaaacattctgatcctagtgatgaagcagagccgaatcagcttagagagtctgttcgagacttacctgatggtagtgcatcttcttcgcctactaaaatacatcaatcaggtgacaccgaaacaggggaatctattcacacaggaaaggaagatacgtctgataggaacatcttgcagtcacaaccagcagagtctgcgctagctagttcagatgatataacggaagctgaggacaatattgctcaagaatatgatgccccaaaagaacttagtggcccacaggagagtagtgatatggtagacaaaggtactcatcttgaagttaaattacatgatagcaatattaatactgaaaaaagtgaggaagaaagcaataagatggagtcaggggaatcatctgttgttgtacaggaggataatgcaatggagcaacctcaagacttaacgttgaagtccttaactgcagagcatgactcaaattcgcagaacgagtcagtgatcaattcgactgatatacctgttggactaggtgaaggtcctccaaatgattttacaaaagaagaaaagattctagaatctgttagaggcacagattctcagactctggactctgttgtttctgtcgatgagctagagaaattaagacgtgaattgaagatgatggaagctgcattgcaaggtgctgcaagacagtcacagtccaaagctgatgaaattgcaaggttgataaatgagaatgagcaactaaaatcaacaatcgatgatctcaagagtaagtcatctgaagcagaaatggattcactgaaggatgaatatcaccaaagagtagcaactcttgaaaggaaggtatatgcactaaccaaagagcgtgatacactaaggagagaacagaataaaaaaagtgatgcagctgcccttttgaaagaaaaggatgagatcatcaatcaggtcatggctgaaggtgaagaactatccaaaaaacaagctgctcaagaagctacaatacgaaaactgagagcacagttagattcgtgagtttgaagaagaaaaacaacgcctgaactcaaagatccaggttgaggaggctaaggttgagagcatcaagagagacaaagcagcaactgagaagttgcttcaagaaacaatagaaagaaatcagactgaacttgcagctcaaaaggagttctacaccaatgctcttaatgcggctaaagaggctgaggcattggctgaagcaagagtcaacagtgaagccaaaattgaactggagaatcttttaggagaagctggtgaaaaagaaaatatgctgattaagacaatcgaggagttgaggcattttctcacccggcaagaacaggaggctgctttcagggaaaaaagactaaaaggggactatgatgatcttcaaaagcggtatcaagccagtgaacttcgttataatgaactggtaacgcaagttcctgagtctaccagaccgcttctaagacaaattgaagccatgcaggagacaactgctcgaagggaagatgcttgggctggtgtggagagaaccttaaactctcgccttcaggaagcagaagctaaagctgcttcttcagaagaaaaggagcgatctgtaaatgagagattgtcacaaagtttatcccggataactgtccttgagacccagattacaattcttagaacagagcagacacagctgagccgatctcttgaaaaggagaggcagagagcatctgaaagtagacaggagtacctagcaatcaaagaggaggcagcaatacaagaagggcgagctaaacagtttgaagaagagatgaaggagcttagagctaggcacaaggaggagctgcaagaagcagcagaacacagggacctgcttgagaagggttctaggccttgtgttcaaaatgtggtgttagcaagtggtcgaggaagggcgcacttggtgcttggctgggtcttcagccctccaagacctgctgtgtcagctcccctcggggtctccaccgtaattcggtgaagctagtggtcgttctctaccttgtgtgtggcgcgctgttcttagccgcgg

SEQ ID NO: 213265 - DNA, 1951 bp, Zea Mays
tctgcggggcagccgacctcaccgacggcggaatgacaaaaaggacaatatcaacgacgccgcgcgcttcaacgccacagcccatcctctgagacaaaataggataaggagacccacccggcacgactgctctccgcacccgcaacgcccatggcgttcgccgccgtcctccgcgcccgcctcctcccggtgcccactccgctatccagctcctcgccgccgccattcttcgccccttcggcctacgtccgcgtaccgcgcctcacagcagcagcagcgcgcaccgtacggtaccgacgacggggcgggcggcctcaccgcgcggccgcggcgattacagcgtcactcgacctgaccgaggacaacgtccgggtggccctagacgaagccaaatccgagctagggcagctgttcgacacgtcggtgggcatcacagggcaagttgacctcgcggagttggacgggccgttcgtgaagctccggctcaagggcaagttctggcacacccgcgccaccgtggtcgcgcggatcggaaactacctcaagaaccgcattccggaaattttggaggtggagatcgaggacgagaaacagctggatgatagtcccgctgctttctgaggggtaccgcacgatcaccaatttagttcaatgctgtgtgtgattcatcagtatgtgccaattgtgaggttcaggagaagggacacgttttcagttttcagaattagtactggttcagggagaattcttatcggaggctacctttcgtacacagttaagtatggtactccttactctgctaatgtcaaaactacagacttatgaacacatgaattccaatcaacattttctggctgacatgacaagagcattcatcatcctcgatgtgtaaagctgaatctatggatctgagtctgaaggagcgaatatacagacctgaattttctgtatttcccataatcacagctccagcttcggggaatttgcagttgcctttgtggtttgcattatagcatatgcacattgattgcagatatccaatatttggaggtgcttgttctattattacgaagaagctgcatggtattacaaagaaacaaaatgacaagactatggctgacactagtcatactcaattcttgcatttgagcgccatccatgatttgtgaagacttccatcgctaccacttccaaagcttgacaaacatcgttgttgtgattcctccttttgtagaaatctctaaaatctgaaccagtgagtacatctaaaaataacctgcacaactgatggggaagctgccctaagtgtccgtttggttggatttttggggctgttttcgcttctcaaaacccaaaagttgaaccaaataccaaaggagcgagctgtttttggcttcctgcttttttgaaataggcggagtgaagaactttttcacggttgtttcaagagagacatagatagaaggtacttgttataactaaacggctaaacccgagaggctccatgccgttatagacactcgctctatagcggtagtattgacttaccagccaactaccgtttgcgaggctcacaaattagcgaggaaaaatcatcacttgcttggtgaagtttcttgagtcgacgtgcggctgtggtgtcgctgatcgtctcacgtgtgcttggccggatcgaagactgggagatagccctctctgtgctctgtaattgcatcatagaatctgaagtgtgaggagttagccttccttgaccggatcgatactcgtgcacaatcctaaagacacttcctcgccgaaatgcgctcttgctaaaagcttccagtctaggaggcacattgttgtatcactcacatgtacttgatatcgacagattgtccggtgaatgctagtatcatggtttggtttcccccaaaacaaaatccgaaacctgcacggatggttgaaactctta

SEQ ID NO: 213266 - DNA, 628 bp, Zea Mays
ttccaccatctctttacttacattctggtctgcggggcagccgacctcaccgacggcggaatgacaaaaaggacaatatcaacgacgccgcgcgcttcaacgccacagcccatcctctgagacaaaataggataaggagacccacccggcacgactgctctccgcacccgcaacgcccatggcgttcgccgccgtcctccgcgcccgcctcctcccggtgcccactccgctatccagctcctcgccgccgccattcttcgccccttcggcctacgtccgcgtaccgcgcctcacagcagcagcagcgcgcaccgtacggtaccgacgacggggcgggcggcctcaccgcgcggccgcggcgattacagcgtcactcgacctgaccgaggacaacgtccgggtggccctagacgaagccaaatccgagctagggcagctgttcgacacgtcggtgggcatcacagggcaagttgacctcgcggagttggacgggccgttcgtgaagctccggctcaagggcaagttctggcacacccgcgccaccgtggtcgcgcggatcggaaactacctcaagaaccgcattccggaaatggggagagtgttgtttaatcaaggtgtaacatggggc

SEQ ID NO: 213267 - DNA, 1329 bp, Zea Mays
ctccaactccaactgtcgcccgccggtagccgcgctcgcggcagtggacctcgcctcctgcgcggctgtgcccagactgctgtgctgtttcggtctcttcggttggcagcagccacgccgggaacaagatggcggcggcgttgccgcagctggacgacgagatcgtccacggcatggccatcggcgctgtcttcacggactataccgggaagatcaattgcctcgacttccaccgcacggaagatctcatgatcacctctagcgaggacgactccatccgcctatacaacatcaccagcgcgacgttgttaaagactacgtatcacaggaaacatggtgctgaccgtgtctgttttagtcatcatccaagttctatcttatgctcttcacggtacaacctagagtctatagagtcacttcgttatctgtcattgtatgacaaccgttgcttaagatacttcaaaggacacaaagacagctttatgtcaggatcacttgatcacagtgtcagaatatgggatcttcgggtaaatgcttgtcagggcatactaaggctgcgtggtagaccttctgttgcatatgatcaacagggacttgtttttgctgtagcaatggaaggtggtgctattaatttatttgattcccgatcttatgacaagggtccattcgacactttcttggttggtggagatacagctgaagtttctgacatcaaatttagcaatgatggcaagtctatgcttttgacaacaactaacaaccatatatatgttctggatgcatatgttggggataagaggtgtggttttagtttagagccatctcccaatgtaacaaatgaagctgctttcactccagatggtcaatatgtaatttcaggatcaggtgatggaacactgcacgcttggaacatcaatacagtacaagaggttgcttgttggaacagtcgcattggtcctattacagcattgaagtgggcccctcgtcgagccatgtttgcaaccgcatcaactgccctaactttctggattcccaaccgatcgaattaggatcaggtgcctggaaaaacaaggggtggaatttcatatatgttaacttggcaaatgtttatgctctgttgttttctccaaaagatagatgccatgtatgaaatcacttcattaccatttacggaggcaatggcatagttccaggcagataccggttaaattgttgtgttagcactcataaaggtttttttggtgatttactctggacttgtgcttcgaaaaacaggcgcttgtaacttctggaaaccactgatttaatatggacatgttggagaatcat

SEQ ID NO: 213268 - DNA, 7359 bp, Zea Mays
gaaaaggatgaaaaacagaattctttggaactattgttaagacggattgaagggctacaatatgaaatggatgaaaaagtagatcttgttgaagtgttaactcgtcaagttgaaaatctgcagcgagagcgtgatgagctcagaaaagatattgagcaattatgtatgcaacaagctgggcctggttatgtttctgttgcaactcgaatgcttactcagagctttggaacaggatattgagaacctccagaaaaagttaggtggttgcttaagagagaatcaaaatttgcaagaggagcttgctgaagcttatcgaattaagagccagcttgctgagttacatggtgctgcactatcaaagaacaaggatcttgaaaagcaagtaagatttttccagagcagtgtcgctcaagcgtttgctgaacgggacagttcattaatggagtgtgagaaagcaaaagagcgggaagaagcagtgtcaagaaagtttgctgattttgaggaaaggatgagagaatatcaatcagagattgatgaacagaaacacttaaatgatgacttgcagagagaactgacagaactgaaggcacatacagaattgtccttgaaagttattctaaaattctatgaccttcgttgcagagactctggatgttcttcaagccttactattgaagagaagtgttcaatccttcttggtgattctgctgacaattggagttttagctctgatggcggaacctcaactttgaagtacattgtaaaccacccttatccattataaagaatgattcatatttaagtatgcgatctgtttttttttttgcatttgtattgcaagatacaaattctctgtggcactaaacatcatctggcgcagagccagaaaattatagatatggggacgaaatgctaaaaaataaattattagaaggcaaaatcagcattttcattgaattttatgtgcataagaggaacttatctatcataacagagtgcttgatcctccctccttccgcccctgaacatgttaatgcattgttggctaattggcttgttcagttttattctgggaactaaatgaatgcagaaggtaggaaatgatgaaactttgctggcatctgtttcaggacttatgcagttatgctttgttcccagtttctcattcaacatactgctcaatacatggatagaaaacatccgtattattgatggaagtcataaatttagtgctaatcttctcatttgtcctattcagtaagttatagttcagtatgattgtcatgttctatttgacctaattgtgtcatgtacttgagtaatacaacatgacttgcaggccctaatttgttttcaagaactgtttattgattttttttccagttgatttggtcctaaaccaaagtgctttgcatagttaaggcgagtgtttgacccccgccttaccttcgaagcggtaaagtgtaaggcgagacaacaccttaatcatatataaatataggaaaatatagaaaattagtcttgaatagaagtacgaaagtaccaaacagaagtctataagttcaatataagcaaacataataggctaaaagtccaacataagtaggttctgatactctcatctctcaagttctgatacatcatcaaactcatcaaaaatgggaggattactgtcttcttcgcgttctctcccaccggatatatcatcatcttcactcacattcaagtcatctttcgcatgattggttgccgcgtcctacccgcccagactcgcggcatgcgttggccgggcgcgagcgagtgtttggttgccgcacccacgccctccggactgcatgtgcgcatgcagtttagtgctttttttcgccgttctgcctgcaagcgtggagaagccggaaattaccttcgctgggggaccaggcccgcacgaggcaggcacgtgacagaccggcaaccaatcagcccccttgtggatctggctcaaagtcttcgtccatggcacctccctcttcttcttacggcctcattcttgcatgctttctctatgtaaggccagaactttgtctctgactagcttgccttggaaggttgtgccctcgaagcgactccgatgctctagtagcaacatcaacatgatccatcatgtgaggtcaacaatattatcattgtccctgctggggtgtaccactgatgagtatccactcgttgtcccaatcaaaatcctcaataattaatgggtcatagcttgtgccggctttctccctcatttgaaacctacttcgcatcttttgattgtatgaaacatagaccaagtcattcaaccttttatgcaacaacaagtttctcttctttgtatgtatagtaagtaacaaacccaacctaaataagtagcaagaaatagattgaagctagtaaacataagcgaagtagcaaaaaatggacttacaaattcaaatgtgcttcaattcctctcacaaccggatgaggaagcacaaagtctaaccagtaaccacacgcttggcaaacctttgaaattcatatgctcggccgccatatgaacgttatcaatcaactacgcagatgcaaacagcgacacggtcacacacataggtatacaacagcaggaaagaataaaaaaagatgtgctgaaattagcaatcagccaagcatatagtactttagagggctctttgcttgaatgttttcaagtgccaacttgtttgaaaaatagaccctctatgatcttcataatgcatggcatgctcattaatcttcgaccgtatttcttcattggactccattcttgctagcacataattgaaacaactcctcagctttacaacatatctatcatctccctttggatggcaaagaattttcccaggttcaaataaagtgcagcaccatacgatggatggtccatttgtttcatccaacgaccctcaataatgtccataattttttcagcaatgcttgcttgttttgtgtagggaagctaagccttttctcttttgcaacatccattagtgctgcaatttatgtcatgtatgttttttcatctccatcaactgccctaagcactataagaagtgccaaagctctgaggcaatcttcaactgaagaccaaaaagtcttagctagaataatattacaccccccttccagcctctgtctttgccaacttgttgcagttccatgcatctcacaaaaagtgctctcaaggcatcttgatgtttatgtagacttttcaaagtaaggaatgtggcaaaacgagtggctgctggtcttaaaggatccccctcctatcttctccctcattgcacttagaattcctccatgcctataaataaaagtggtgactcttttggcttgtgcaattagtctttcaaatatccaatatcctccaccatgaggtccaaacaatgtgcagtacaaggaccctagaacaatgttaaaatactatccattagaagcctacccactgccttatatttttttctcgaatacgcaggagagctgcgtatcaattcattaatagtagaggagaaatatatatacaagaaaaaggcccacacacttgcacacacccactaggaacagaactgcaagaacatttgcgcctgttacagcacagaaacgaccctacacaacaactaaaatcggtatgccgtagcctccagaagctgcagatccttggcccctgctgcactccaacacaaaatctcatcaccagccaagcacaaggcagcagccaatcgtggaggtttgcgaccaaagacattcatttctgtgtctccacaaggtccatgcccctaagattatgagagagttaaaacctttctgaatggagcttcgcatagagctggaagaactgctccaccaatccaaaaaggaggtcgcctcaggctgaggggcaagaagtgccaaacccattcggctaagaaaaaagaaccagaactgacacgaaaagagacaggagacaagaaggcgatatagcgtttcacgttcttggtcacacaacacacaagcttcagggtgtggcagattcgtcctttcaagtcgatcagatgtccaacacctattgtgggcagccaaccacatgaagaaggcacatttaggcggcacccacaatttccagatacgctcccatggttcaaagaacaacgagctctgcatgagagcatcatatgccgatcttgctgaatatgccctgacggagagaggctccaaaaatgtctatccggcatttccagcacccctggctgaagctgcaccacgtgtatagcctctcaaataccaagaaactcttgctaactctgccaagaaataactccatggatatcgtggacccatcttgaatctgttagagcatctaggaccatccttcgattagctattctggtgggaatcatactatgtataagtggtgctagttcctttaaccgctgcctcatcaaccatctatcctcccaaaacaaggtggtgctaccatcgcctagttcagtagtcacggccatgttgaaaattccttgcacctgtttatttgcttgtagcttgaaggcagcccatggtctctgtcagcctttggctttgtggaagcagcctccttagtggtttggtatgaacctgaagaccgcctatcatccacaacctattcagggattctctggagcatgcttgcgaccttcccaaccacttttggcatgttttgggcttagttgtagctggttgcctaaactgaaaggcggctctcctccgtttagcagctgtcccggaacttggctgcacaacggagcaatcagattcattctgtcctagcctctgcccctgcacctgcccatgtactggaccaatgttataaggaaaataggcctgttcctcttcttctccaagtaagctgtcatctcttttctaatctcagtggtggtgttgaaacacatgactgtcctcatatcccccggcaaggtgttctttataccttttaattccttctttgttaccatgttgcatcggatgcatgtcaccttatcctgattccctatttctgtccaataaccgtacttccagcctgggtcattgaattttgcctctggatcttgcatggggtgataaggatcaacatcaatgggagcagcagcagcggatgcggatcagacactctccatgacaatggcttactctgtacaggtggatagtaagaaaaaggcaaaggttcagctcactaattaacatcagagagtggggaacagagcagcacggaggcccattatcttgcaccggatttaaagcagagggctgctgctaggatgctggcctgcccgccctgtctggctgcgccagcgccacccctcctgcgtggccacaccccactcctccctgtctgcgcctgcatgccttgcttggcccgtgccgcccacctcgctgtgccgcccgtcctgcctggtcacgccactcctcacccctccttcgaacagaacaggcgcaccgcgcaactcagcctttgaacagagcagcctccgcccacaaccagccgccttttcattcccttattcccataatgcgacaccctagaaccgctttacggacgtctgaggtgccagagcgactagacggtaaggaagatgccttagtgtcaatcttaaggcgggtaaatcacctcattttttctgaccgccttaccgcctaagggacgccttaatagtttgcattagagattttcccttcaatgtatttgacattttttgtaggcatctttagaagaggagaaagagtcacttaaagctaaaatatcgaagctgcaaagcaacctaagaatgggccttgaaattgaacaacatttgcaaagaaatgcacgaatattagagaaaagacaggcactgtatgatggattcctgagaaatggattgtccgaacttcaaaagttctacacatgtcaaaaggctgaaattatgaaaatattggaagaagaatcgttgcggttgatgaaagttgttgcagagattcaggataaactaactgaaatttgtatcaacactgaagttagtgaccaccctgccgatgagattcaatgttgtgacagcagttgtaaagatgtgcatgttactaaagatatcagtcctagcacatgtcgtaagagtgattatcctgctgatcttaactccgtgtcgtttgatgaatctaaagcacttgcacaagccttacaggagaagatggaagcacttatgctcttctcacaggaacaagaaagatacctattagagaaacagagagacctgattgttatcgaggaactccagaagaacttatctcaagttaaagatgaaaaggtgaaggtcctgatggaattaacaaaactaaaagaacaatatttgctattgaagggctctgctgtcaaggaaggtcatgatactggtgattcatctaaactcattcctgggcatgaccaacaagggatgctgaagactatgctgaagaggacatctttaagacactggatgaggaaagaaagtaatactattggacatgggagctctgatggaaatgatcatacagtttgcaaagaacattcagtggatgttgcaagattaagagttgaaaatgctatgcttcttgaaggtgttggtactgttgagcatctcacttcttcagtgcatagactgcatattgtgcttttgaaggcagggcaggattttttttggttgtattactaggtgataactttcataccaacaaacatgtcaggcttatgatgatatcaagtcagctgatcctttggagagtacctttgaagcgctcaacagtcttataactgaagcaaaccttatgaagacagctcttaatgtggttcttcctgtaagctggtccggggattcatcagatgcaattaaatatgaagctatgtgcgatccatctgattcacctaaatcgaagtctgggaaagtagacccgctctcttctgcaggcatggagatggtggagctactaatattggctgctgagattctcaaggagagctttctggtgaagaaataaggcctccatgtaaggacgagtatggctctccttgtttgtttagaagcatgcaatttaatccttaatttttttgggtgtatatacttaaactgattgctaaaagtgcactactagattatttcggatgtagagaaagagccgaatgtgcactgtaatttacggttcgctgctattgatgtgtcttgtgttggtagactaaaggatttaagagccatgtgtacaaaattcagtttacaagcaaagatcaaagaatagacatgaactagggaaagagaaagaaaaacaaactgaaagttccatacctaaaagcgtcggcactggttgtcg

SEQ ID NO: 213269 - DNA, 7211 bp, Zea Mays
ctttctctctctctctctctctctctcgttgcccccgcatactctctgtcttgggcgctctctgtctctggtggcggcgagtagcatactctctgtcttgggcgctctgtctctggtggcgacgactcgccgccgccgccgccgcgataggccacgcctcctggtcgccatttccggatccttaccgacgacgcgcacccaccaccccatctttttccgttcctgctgtgcgacacacaaaccctagctgtatcgggtgggctgtgaaatggaccaagctgcagattcctctgaactgcttcgtcgcatcgaggagctccagcgcgaaaaggatgaaaaacagaattctttggaactattgttaagacggattgaagggctacaatatgaaatggatgaaaaagtagatcttgttgaagtgttaactcgtcaagttgaaaatctgcagcgagagcgtgatgagctcagaaaagatattgagcaattatgtatgcaacaagctgggcctggttatgtttctgttgcaactcgaatgcttactcagagctttggaacaggatattgagaacctccagaaaaagttaggtggttgcttaagagagaatcaaaatttgcaagaggagcttgctgaagcttatcgaattaagagccagcttgctgagttacatggtgctgcactatcaaagaacaaggatcttgaaaagcaagtaagatttttccagagcagtgtcgctcaagcgtttgctgaacgggacagttcattaatggagtgtgagaaagcaaaagagcgggaagaagcagtgtcaagaaagtttgctgattttgaggaaaggatgagagaatatcaatcagagattgatgaacagaaacacttaaatgatgacttgcagagagaactgacagaactgaaggcacatacagaattgtccttgaaaagactctggatgttcttcaagccttactattgaagagaagtgttcaatccttcttggtgattctgctgacaattggagttttagctctgatggcggaacctcaactttgaagacttatgcagttatgctttgttcccagtttctcattcaacatactgctcaatacatggatagaaaacatccgtattattgatggaagtcataaatttagtgctaatcttctcatttgtcctattcagtaagttatagttcagtatgattgtcatgttctatttgacctaattgtgtcatgtacttgagtaatacaacatgacttgcaggccctaatttgttttcaagaactgtttattgattttttttccagttgatttggtcctaaaccaaagtgctttgcatagttaaggcgagtgtttgacccccgccttaccttcgaagcggtaaagtgtaaggcgagacaacaccttaatcatatataaatataggaaaatatagaaaattagtcttgaatagaagtacgaaagtaccaaacagaagtctataagttcaatataagcaaacataataggctaaaagtccaacataagtaggttctgatactctcatctctcaagttctgatacatcatcaaactcatcaaaaatgggaggattactgtcttcttcgcgttctctcccaccggatatatcatcatcttcactcacattcaagtcatctttcgcatgattggttgccgcgtcctacccgcccagactcgcggcatgcgttggccgggcgcgagcgagtgtttggttgccgcacccacgccctccggactgcatgtgcgcatgcagtttagtgctttttttcgccgttctgcctgcaagcgtggagaagccggaaattaccttcgctgggggaccaggcccgcacgaggcaggcacgtgacagaccggcaaccaatcagcccccttgtggatctggctcaaagtcttcgtccatggcacctccctcttcttcttacggcctcattcttgcatgctttctctatgtaaggccagaactttgtctctgactagcttgccttggaaggttgtgccctcgaagcgactccgatgctctagtagcaacatcaacatgatccatcatgtgaggtcaacaatattatcattgtccctgctggggtgtaccactgatgagtatccactcgttgtcccaatcaaaatcctcaataattaatgggtcatagcttgtgccggctttctccctcatttgaaacctacttcgcatcttttgattgtatgaaacatagaccaagtcattcaaccttttatgcaacaacaagtttctcttctttgtatgtatagtaagtaacaaacccaacctaaataagtagcaagaaatagattgaagctagtaaacataagcgaagtagcaaaaaatggacttacaaattcaaatgtgcttcaattcctctcacaaccggatgaggaagcacaaagtctaaccagtaaccacacgcttggcaaacctttgaaattcatatgctcggccgccatatgaacgttatcaatcaactacgcagatgcaaacagcgacacggtcacacacataggtatacaacagcaggaaagaataaaaaaagatgtgctgaaattagcaatcagccaagcatatagtactttagagggctctttgcttgaatgttttcaagtgccaacttgtttgaaaaatagaccctctatgatcttcataatgcatggcatgctcattaatcttcgaccgtatttcttcattggactccattcttgctagcacataattgaaacaactcctcagctttacaacatatctatcatctccctttggatggcaaagaattttcccaggttcaaataaagtgcagcaccatacgatggatggtccatttgtttcatccaacgaccctcaataatgtccataattttttcagcaatgcttgcttgttttgtgtagggaagctaagccttttctcttttgcaacatccattagtgctgcaatttatgtcatgtatgttttttcatctccatcaactgccctaagcactataagaagtgccaaagctctgaggcaatcttcaactgaagaccaaaaagtcttagctagaataatattacaccccccttccagcctctgtctttgccaacttgttgcagttccatgcatctcacaaaaagtgctctcaaggcatcttgatgtttatgtagacttttcaaagtaaggaatgtggcaaaacgagtggctgctggtcttaaaggatccccctcctatcttctccctcattgcacttagaattcctccatgcctataaataaaagtggtgactcttttggcttgtgcaattagtctttcaaatatccaatatcctccaccatgaggtccaaacaatgtgcagtacaaggaccctagaacaatgttaaaatactatccattagaagcctacccactgccttatatttttttctcgaatacgcaggagagctgcgtatcaattcattaatagtagaggagaaatatatatacaagaaaaaggcccacacacttgcacacacccactaggaacagaactgcaagaacatttgcgcctgttacagcacagaaacgaccctacacaacaactaaaatcggtatgccgtagcctccagaagctgcagatccttggcccctgctgcactccaacacaaaatctcatcaccagccaagcacaaggcagcagccaatcgtggaggtttgcgaccaaagacattcatttctgtgtctccacaaggtccatgcccctaagattatgagagagttaaaacctttctgaatggagcttcgcatagagctggaagaactgctccaccaatccaaaaaggaggtcgcctcaggctgaggggcaagaagtgccaaacccattcggctaagaaaaaagaaccagaactgacacgaaaagagacaggagacaagaaggcgatatagcgtttcacgttcttggtcacacaacacacaagcttcagggtgtggcagattcgtcctttcaagtcgatcagatgtccaacacctattgtgggcagccaaccacatgaagaaggcacatttaggcggcacccacaatttccagatacgctcccatggttcaaagaacaacgagctctgcatgagagcatcatatgccgatcttgctgaatatgccctgacggagagaggctccaaaaatgtctatccggcatttccagcacccctggctgaagctgcaccacgtgtatagcctctcaaataccaagaaactcttgctaactctgccaagaaataactccatggatatcgtggacccatcttgaatctgttagagcatctaggaccatccttcgattagctattctggtgggaatcatactatgtataagtggtgctagttcctttaaccgctgcctcatcaaccatctatcctcccaaaacaaggtggtgctaccatcgcctagttcagtagtcacggccatgttgaaaattccttgcacctgtttatttgcttgtagcttgaaggcagcccatggtctctgtcagcctttggctttgtggaagcagcctccttagtggtttggtatgaacctgaagaccgcctatcatccacaacctattcagggattctctggagcatgcttgcgaccttcccaaccacttttggcatgttttgggcttagttgtagctggttgcctaaactgaaaggcggctctcctccgtttagcagctgtcccggaacttggctgcacaacggagcaatcagattcattctgtcctagcctctgcccctgcacctgcccatgtactggaccaatgttataaggaaaataggcctgttcctcttcttctccaagtaagctgtcatctcttttctaatctcagtggtggtgttgaaacacatgactgtcctcatatcccccggcaaggtgttctttataccttttaattccttctttgttaccatgttgcatcggatgcatgtcaccttatcctgattccctatttctgtccaataaccgtacttccagcctgggtcattgaattttgcctctggatcttgcatggggtgataaggatcaacatcaatgggagcagcagcagcggatgcggatcagacactctccatgacaatggcttactctgtacaggtggatagtaagaaaaaggcaaaggttcagctcactaattaacatcagagagtggggaacagagcagcacggaggcccattatcttgcaccggatttaaagcagagggctgctgctaggatgctggcctgcccgccctgtctggctgcgccagcgccacccctcctgcgtggccacaccccactcctccctgtctgcgcctgcatgccttgcttggcccgtgccgcccacctcgctgtgccgcccgtcctgcctggtcacgccactcctcacccctccttcgaacagaacaggcgcaccgcgcaactcagcctttgaacagagcagcctccgcccacaaccagccgccttttcattcccttattcccataatgcgacaccctagaaccgctttacggacgtctgaggtgccagagcgactagacggtaaggaagatgccttagtgtcaatcttaaggcgggtaaatcacctcattttttctgaccgccttaccgcctaagggacgccttaatagtttgcattagagattttcccttcaatgtatttgacattttttgtaggcatctttagaagaggagaaagagtcacttaaagctaaaatatcgaagctgcaaagcaacctaagaatgggccttgaaattgaacaacatttgcaaagaaatgcacgaatattagagaaaagacaggcactgtatgatggattcctgagaaatggattgtccgaacttcaaaagttctacacatgtcaaaaggctgaaattatgaaaatattggaagaagaatcgttgcggttgatgaaagttgttgcagagattcaggataaactaactgaaatttgtatcaacactgaagttagtgaccaccctgccgatgagattcaatgttgtgacagcagttgtaaagatgtgcatgttactaaagatatcagtcctagcacatgtcgtaagagtgattatcctgctgatcttaactccgtgtcgtttgatgaatctaaagcacttgcacaagccttacaggagaagatggaagcacttatgctcttctcacaggaacaagaaagatacctattagagaaacagagagacctgattgttatcgaggaactccagaagaacttatctcaagttaaagatgaaaaggtgaaggtcctgatggaattaacaaaactaaaagaacaatatttgctattgaagggctctgctgtcaaggaaggtcatgatactggtgattcatctaaactcattcctgggcatgaccaacaagggatgctgaagactatgctgaagaggacatctttaagacactggatgaggaaagaaagtaatactattggacatgggagctctgatggaaatgatcatacagtttgcaaagaacattcagtggatgttgcaagattaagagttgaaaatgctatgcttcttgaaggtgttggtactgttgagcatctcacttcttcagtgcatagactgcatattgtgcttttgaaggcttatgatgatatcaagtcagctgatcctttggagagtacctttgaagcgctcaacagtcttataactgaagcaaaccttatgaagacagctcttaatgtggttcttcctgtaagctggtccggggattcatcagatgcaattaaatatgaagctatgtgcgatccatctgattcacctaaatcgaagtctgggaaagtagacccgctctcttctgcaggcatggagatggtggagctactaatattggctgctgagattctcaaggagagctttctggtgaagaaataaggcctccatgtaaggacgagtatggctctccttgtttgtttagaagcatgcaatttaatccttaatttttttgggtgtatatacttaaactgattgctaaaagtgcactactagattatttcggatgtagagaaagagccgaatgtgcactgtaatttacggttcgctgctattgatgtgtcttgtgttggtagactaaaggatttaagagccatgtgtacaaaattcagtttacaagcaaagatcaaagaatagacatgaactagggaaagagaaagaaaaacaaactgaaagttccatacctaaaagcgtcggcactggttgtcg

SEQ ID NO: 213270 - DNA, 7240 bp, Zea Mays
ctttctctctctctctctctctctctcgttgcccccgcatactctctgtcttgggcgctctctgtctctggtggcggcgagtagcatactctctgtcttgggcgctctgtctctggtggcgacgactcgccgccgccgccgccgcgataggccacgcctcctggtcgccatttccggatccttaccgacgacgcgcacccaccaccccatctttttccgttcctgctgtgcgacacacaaaccctagctgtatcgggtgggctgtgaaatggaccaagctgcagattcctctgaactgcttcgtcgcatcgaggagctccagcgcgaaaaggatgaaaaacagaattctttggaactattgttaagacggattgaagggctacaatatgaaatggatgaaaaagtagatcttgttgaagtgttaactcgtcaagttgaaaatctgcagcgagagcgtgatgagctcagaaaagatattgagcaattatgtatgcaacaagctgggcctggttatgtttctgttgcaactcgaatgcttactcagaggacagcagctttggaacaggatattgagaacctccagaaaaagttaggtggttgcttaagagagaatcaaaatttgcaagaggagcttgctgaagcttatcgaattaagagccagcttgctgagttacatggtgctgcactatcaaagaacaaggatcttgaaaagcaagtaagatttttccagagcagtgtcgctcaagcgtttgctgaacgggacagttcattaatggagtgtgagaaagcaaaagagcgggaagaagcagtgtcaagaaagtttgctgattttgaggaaaggatgagagaatatcaatcagagattgatgaacagaaacacttaaatgatgacttgcagagagaactgacagaactgaaggcacatacagaattgtccttgaaagttattctaaaattctatgaccttcgttgcagagactctggatgttcttcaagccttactattgaagagaagtgttcaatccttcttggtgattctgctgacaattggagttttagctctgatggcggaacctcaactttgaagacttatgcagttatgctttgttcccagtttctcattcaacatactgctcaatacatggatagaaaacatccgtattattgatggaagtcataaatttagtgctaatcttctcatttgtcctattcagtaagttatagttcagtatgattgtcatgttctatttgacctaattgtgtcatgtacttgagtaatacaacatgacttgcaggccctaatttgttttcaagaactgtttattgattttttttccagttgatttggtcctaaaccaaagtgctttgcatagttaaggcgagtgtttgacccccgccttaccttcgaagcggtaaagtgtaaggcgagacaacaccttaatcatatataaatataggaaaatatagaaaattagtcttgaatagaagtacgaaagtaccaaacagaagtctataagttcaatataagcaaacataataggctaaaagtccaacataagtaggttctgatactctcatctctcaagttctgatacatcatcaaactcatcaaaaatgggaggattactgtcttcttcgcgttctctcccaccggatatatcatcatcttcactcacattcaagtcatctttcgcatgattggttgccgcgtcctacccgcccagactcgcggcatgcgttggccgggcgcgagcgagtgtttggttgccgcacccacgccctccggactgcatgtgcgcatgcagtttagtgctttttttcgccgttctgcctgcaagcgtggagaagccggaaattaccttcgctgggggaccaggcccgcacgaggcaggcacgtgacagaccggcaaccaatcagcccccttgtggatctggctcaaagtcttcgtccatggcacctccctcttcttcttacggcctcattcttgcatgctttctctatgtaaggccagaactttgtctctgactagcttgccttggaaggttgtgccctcgaagcgactccgatgctctagtagcaacatcaacatgatccatcatgtgaggtcaacaatattatcattgtccctgctggggtgtaccactgatgagtatccactcgttgtcccaatcaaaatcctcaataattaatgggtcatagcttgtgccggctttctccctcatttgaaacctacttcgcatcttttgattgtatgaaacatagaccaagtcattcaaccttttatgcaacaacaagtttctcttctttgtatgtatagtaagtaacaaacccaacctaaataagtagcaagaaatagattgaagctagtaaacataagcgaagtagcaaaaaatggacttacaaattcaaatgtgcttcaattcctctcacaaccggatgaggaagcacaaagtctaaccagtaaccacacgcttggcaaacctttgaaattcatatgctcggccgccatatgaacgttatcaatcaactacgcagatgcaaacagcgacacggtcacacacataggtatacaacagcaggaaagaataaaaaaagatgtgctgaaattagcaatcagccaagcatatagtactttagagggctctttgcttgaatgttttcaagtgccaacttgtttgaaaaatagaccctctatgatcttcataatgcatggcatgctcattaatcttcgaccgtatttcttcattggactccattcttgctagcacataattgaaacaactcctcagctttacaacatatctatcatctccctttggatggcaaagaattttcccaggttcaaataaagtgcagcaccatacgatggatggtccatttgtttcatccaacgaccctcaataatgtccataattttttcagcaatgcttgcttgttttgtgtagggaagctaagccttttctcttttgcaacatccattagtgctgcaatttatgtcatgtatgttttttcatctccatcaactgccctaagcactataagaagtgccaaagctctgaggcaatcttcaactgaagaccaaaaagtcttagctagaataatattacaccccccttccagcctctgtctttgccaacttgttgcagttccatgcatctcacaaaaagtgctctcaaggcatcttgatgtttatgtagacttttcaaagtaaggaatgtggcaaaacgagtggctgctggtcttaaaggatccccctcctatcttctccctcattgcacttagaattcctccatgcctataaataaaagtggtgactcttttggcttgtgcaattagtctttcaaatatccaatatcctccaccatgaggtccaaacaatgtgcagtacaaggaccctagaacaatgttaaaatactatccattagaagcctacccactgccttatatttttttctcgaatacgcaggagagctgcgtatcaattcattaatagtagaggagaaatatatatacaagaaaaaggcccacacacttgcacacacccactaggaacagaactgcaagaacatttgcgcctgttacagcacagaaacgaccctacacaacaactaaaatcggtatgccgtagcctccagaagctgcagatccttggcccctgctgcactccaacacaaaatctcatcaccagccaagcacaaggcagcagccaatcgtggaggtttgcgaccaaagacattcatttctgtgtctccacaaggtccatgcccctaagattatgagagagttaaaacctttctgaatggagcttcgcatagagctggaagaactgctccaccaatccaaaaaggaggtcgcctcaggctgaggggcaagaagtgccaaacccattcggctaagaaaaaagaaccagaactgacacgaaaagagacaggagacaagaaggcgatatagcgtttcacgttcttggtcacacaacacacaagcttcagggtgtggcagattcgtcctttcaagtcgatcagatgtccaacacctattgtgggcagccaaccacatgaagaaggcacatttaggcggcacccacaatttccagatacgctcccatggttcaaagaacaacgagctctgcatgagagcatcatatgccgatcttgctgaatatgccctgacggagagaggctccaaaaatgtctatccggcatttccagcacccctggctgaagctgcaccacgtgtatagcctctcaaataccaagaaactcttgctaactctgccaagaaataactccatggatatcgtggacccatcttgaatctgttagagcatctaggaccatccttcgattagctattctggtgggaatcatactatgtataagtggtgctagttcctttaaccgctgcctcatcaaccatctatcctcccaaaacaaggtggtgctaccatcgcctagttcagtagtcacggccatgttgaaaattccttgcacctgtttatttgcttgtagcttgaaggcagcccatggtctctgtcagcctttggctttgtggaagcagcctccttagtggtttggtatgaacctgaagaccgcctatcatccacaacctattcagggattctctggagcatgcttgcgaccttcccaaccacttttggcatgttttgggcttagttgtagctggttgcctaaactgaaaggcggctctcctccgtttagcagctgtcccggaacttggctgcacaacggagcaatcagattcattctgtcctagcctctgcccctgcacctgcccatgtactggaccaatgttataaggaaaataggcctgttcctcttcttctccaagtaagctgtcatctcttttctaatctcagtggtggtgttgaaacacatgactgtcctcatatcccccggcaaggtgttctttataccttttaattccttctttgttaccatgttgcatcggatgcatgtcaccttatcctgattccctatttctgtccaataaccgtacttccagcctgggtcattgaattttgcctctggatcttgcatggggtgataaggatcaacatcaatgggagcagcagcagcggatgcggatcagacactctccatgacaatggcttactctgtacaggtggatagtaagaaaaaggcaaaggttcagctcactaattaacatcagagagtggggaacagagcagcacggaggcccattatcttgcaccggatttaaagcagagggctgctgctaggatgctggcctgcccgccctgtctggctgcgccagcgccacccctcctgcgtggccacaccccactcctccctgtctgcgcctgcatgccttgcttggcccgtgccgcccacctcgctgtgccgcccgtcctgcctggtcacgccactcctcacccctccttcgaacagaacaggcgcaccgcgcaactcagcctttgaacagagcagcctccgcccacaaccagccgccttttcattcccttattcccataatgcgacaccctagaaccgctttacggacgtctgaggtgccagagcgactagacggtaaggaagatgccttagtgtcaatcttaaggcgggtaaatcacctcattttttctgaccgccttaccgcctaagggacgccttaatagtttgcattagagattttcccttcaatgtatttgacattttttgtaggcatctttagaagaggagaaagagtcacttaaagctaaaatatcgaagctgcaaagcaacctaagaatgggccttgaaattgaacaacatttgcaaagaaatgcacgaatattagagaaaagacaggcactgtatgatggattcctgagaaatggattgtccgaacttcaaaagttctacacatgtcaaaaggctgaaattatgaaaatattggaagaagaatcgttgcggttgatgaaagttgttgcagagattcaggataaactaactgaaatttgtatcaacactgaagttagtgaccaccctgccgatgagattcaatgttgtgacagcagttgtaaagatgtgcatgttactaaagatatcagtcctagcacatgtcgtaagatggaagcacttatgctcttctcacaggaacaagaaagatacctattagagaaacagagagacctgattgttatcgaggaactccagaagaacttatctcaagttaaagatgaaaaggtgaaggtcctgatggaattaacaaaactaaaagaacaatatttgctattgaagggctctgctgtcaaggaaggtcatgatactggtgattcatctaaactcattcctgggcatgaccaacaagggatgctgaagactatgctgaagaggacatctttaagacactggatgaggaaagaaagtaatactattggacatgggagctctgatggaaatgatcatacagtttgcaaagaacattcagtggatgttgcaagattaagagttgaaaatgctatgcttcttgaaggtgttggtactgttgagcatctcacttcttcagtgcatagactgcatattgtgcttttgaaggcagggcaggattttttttggttgtattactaggtgataactttcataccaacaaacatgtcaggcttatgatgatatcaagtcagctgatcctttggagagtacctttgaagcgctcaacagtcttataactgaagcaaaccttatgaagacagctcttaatgtggttcttcctgtaagctggtccggggattcatcagatgcaattaaatatgaagctatgtgcgatccatctgattcacctaaatcgaagtctgggaaagtagacccgctctcttctgcaggcatggagatggtggagctactaatattggctgctgagattctcaaggagagctttctggtgaagaaataaggcctccatgtaaggacgagtatggctctccttgtttgtttagaagcatgcaatttaatccttaatttttttgggtgtatatacttaaactgattgctaaaagtgcactactagattatttcggatgtagagaaagagccgaatgtgcactgtaatttacggttcgctgctattgatgtgtcttgtgttggtagactaaaggatttaagagccatgtgtacaaaattcagtttacaagcaaagatcaaagaatagacatgaactagggaaagagaaagaaaaacaaactgaaagttccatacctaaaagcgtcggcactggttgtcg

SEQ ID NO: 213271 - DNA, 7544 bp, Zea Mays
ctttctctctctctctctctctctctcgttgcccccgcatactctctgtcttgggcgctctctgtctctggtggcggcgagtagcatactctctgtcttgggcgctctgtctctggtggcgacgactcgccgccgccgccgccgcgataggccacgcctcctggtcgccatttccggatccttaccgacgacgcgcacccaccaccccatctttttccgttcctgctgtgcgacacacaaaccctagctgtatcgggtgggctgtgaaatggaccaagctgcagattcctctgaactgcttcgtcgcatcgaggagctccagcgcgaaaaggatgaaaaacagaattctttggaactattgttaagacggattgaagggctacaatatgaaatggatgaaaaagtagatcttgttgaagtgttaactcgtcaagttgaaaatctgcagcgagagcgtgatgagctcagaaaagatattgagcaattatgtatgcaacaagctgggcctggttatgtttctgttgcaactcgaatgcttactcagaggacagcagctttggaacaggatattgagaacctccagaaaaagttaggtggttgcttaagagagaatcaaaatttgcaagaggagcttgctgaagcttatcgaattaagagccagcttgctgagttacatggtgctgcactatcaaagtgtgagaaagcaaaagagcgggaagaagcagtgtcaagaaagtttgctgattttgaggaaaggatgagagaatatcaatcagagattgatgaacagaaacacttaaatgatgacttgcagagagaactgacagaactgaaggcacatacagaattgtccttgaaagttattctaaaattctatgaccttcgttgcagagactctggatgttcttcaagccttactattgaagagaagtgttcaatccttcttggtgattctgctgacaattggagttttagctctgatggcggaacctcaactttgaagtacattgtaaaccacccttatccattataaagaatgattcatatttaagtatgcgatctgtttttttttttgcatttgtattgcaagatacaaattctctgtggcactaaacatcatctggcgcagagccagaaaattatagatatggggacgaaatgctaaaaaataaattattagaaggcaaaatcagcattttcattgaattttatgtgcataagaggaacttatctatcataacagagtgcttgatcctccctccttccgcccctgaacatgttaatgcattgttggctaattggcttgttcagttttattctgggaactaaatgaatgcagaaggtaggaaatgatgaaactttgctggcatctgtttcaggacttatgcagttatgctttgttcccagtttctcattcaacatactgctcaatacatggatagaaaacatccgtattattgatggaagtcataaatttagtgctaatcttctcatttgtcctattcagtaagttatagttcagtatgattgtcatgttctatttgacctaattgtgtcatgtacttgagtaatacaacatgacttgcaggccctaatttgttttcaagaactgtttattgattttttttccagttgatttggtcctaaaccaaagtgctttgcatagttaaggcgagtgtttgacccccgccttaccttcgaagcggtaaagtgtaaggcgagacaacaccttaatcatatataaatataggaaaatatagaaaattagtcttgaatagaagtacgaaagtaccaaacagaagtctataagttcaatataagcaaacataataggctaaaagtccaacataagtaggttctgatactctcatctctcaagttctgatacatcatcaaactcatcaaaaatgggaggattactgtcttcttcgcgttctctcccaccggatatatcatcatcttcactcacattcaagtcatctttcgcatgattggttgccgcgtcctacccgcccagactcgcggcatgcgttggccgggcgcgagcgagtgtttggttgccgcacccacgccctccggactgcatgtgcgcatgcagtttagtgctttttttcgccgttctgcctgcaagcgtggagaagccggaaattaccttcgctgggggaccaggcccgcacgaggcaggcacgtgacagaccggcaaccaatcagcccccttgtggatctggctcaaagtcttcgtccatggcacctccctcttcttcttacggcctcattcttgcatgctttctctatgtaaggccagaactttgtctctgactagcttgccttggaaggttgtgccctcgaagcgactccgatgctctagtagcaacatcaacatgatccatcatgtgaggtcaacaatattatcattgtccctgctggggtgtaccactgatgagtatccactcgttgtcccaatcaaaatcctcaataattaatgggtcatagcttgtgccggctttctccctcatttgaaacctacttcgcatcttttgattgtatgaaacatagaccaagtcattcaaccttttatgcaacaacaagtttctcttctttgtatgtatagtaagtaacaaacccaacctaaataagtagcaagaaatagattgaagctagtaaacataagcgaagtagcaaaaaatggacttacaaattcaaatgtgcttcaattcctctcacaaccggatgaggaagcacaaagtctaaccagtaaccacacgcttggcaaacctttgaaattcatatgctcggccgccatatgaacgttatcaatcaactacgcagatgcaaacagcgacacggtcacacacataggtatacaacagcaggaaagaataaaaaaagatgtgctgaaattagcaatcagccaagcatatagtactttagagggctctttgcttgaatgttttcaagtgccaacttgtttgaaaaatagaccctctatgatcttcataatgcatggcatgctcattaatcttcgaccgtatttcttcattggactccattcttgctagcacataattgaaacaactcctcagctttacaacatatctatcatctccctttggatggcaaagaattttcccaggttcaaataaagtgcagcaccatacgatggatggtccatttgtttcatccaacgaccctcaataatgtccataattttttcagcaatgcttgcttgttttgtgtagggaagctaagccttttctcttttgcaacatccattagtgctgcaatttatgtcatgtatgttttttcatctccatcaactgccctaagcactataagaagtgccaaagctctgaggcaatcttcaactgaagaccaaaaagtcttagctagaataatattacaccccccttccagcctctgtctttgccaacttgttgcagttccatgcatctcacaaaaagtgctctcaaggcatcttgatgtttatgtagacttttcaaagtaaggaatgtggcaaaacgagtggctgctggtcttaaaggatccccctcctatcttctccctcattgcacttagaattcctccatgcctataaataaaagtggtgactcttttggcttgtgcaattagtctttcaaatatccaatatcctccaccatgaggtccaaacaatgtgcagtacaaggaccctagaacaatgttaaaatactatccattagaagcctacccactgccttatatttttttctcgaatacgcaggagagctgcgtatcaattcattaatagtagaggagaaatatatatacaagaaaaaggcccacacacttgcacacacccactaggaacagaactgcaagaacatttgcgcctgttacagcacagaaacgaccctacacaacaactaaaatcggtatgccgtagcctccagaagctgcagatccttggcccctgctgcactccaacacaaaatctcatcaccagccaagcacaaggcagcagccaatcgtggaggtttgcgaccaaagacattcatttctgtgtctccacaaggtccatgcccctaagattatgagagagttaaaacctttctgaatggagcttcgcatagagctggaagaactgctccaccaatccaaaaaggaggtcgcctcaggctgaggggcaagaagtgccaaacccattcggctaagaaaaaagaaccagaactgacacgaaaagagacaggagacaagaaggcgatatagcgtttcacgttcttggtcacacaacacacaagcttcagggtgtggcagattcgtcctttcaagtcgatcagatgtccaacacctattgtgggcagccaaccacatgaagaaggcacatttaggcggcacccacaatttccagatacgctcccatggttcaaagaacaacgagctctgcatgagagcatcatatgccgatcttgctgaatatgccctgacggagagaggctccaaaaatgtctatccggcatttccagcacccctggctgaagctgcaccacgtgtatagcctctcaaataccaagaaactcttgctaactctgccaagaaataactccatggatatcgtggacccatcttgaatctgttagagcatctaggaccatccttcgattagctattctggtgggaatcatactatgtataagtggtgctagttcctttaaccgctgcctcatcaaccatctatcctcccaaaacaaggtggtgctaccatcgcctagttcagtagtcacggccatgttgaaaattccttgcacctgtttatttgcttgtagcttgaaggcagcccatggtctctgtcagcctttggctttgtggaagcagcctccttagtggtttggtatgaacctgaagaccgcctatcatccacaacctattcagggattctctggagcatgcttgcgaccttcccaaccacttttggcatgttttgggcttagttgtagctggttgcctaaactgaaaggcggctctcctccgtttagcagctgtcccggaacttggctgcacaacggagcaatcagattcattctgtcctagcctctgcccctgcacctgcccatgtactggaccaatgttataaggaaaataggcctgttcctcttcttctccaagtaagctgtcatctcttttctaatctcagtggtggtgttgaaacacatgactgtcctcatatcccccggcaaggtgttctttataccttttaattccttctttgttaccatgttgcatcggatgcatgtcaccttatcctgattccctatttctgtccaataaccgtacttccagcctgggtcattgaattttgcctctggatcttgcatggggtgataaggatcaacatcaatgggagcagcagcagcggatgcggatcagacactctccatgacaatggcttactctgtacaggtggatagtaagaaaaaggcaaaggttcagctcactaattaacatcagagagtggggaacagagcagcacggaggcccattatcttgcaccggatttaaagcagagggctgctgctaggatgctggcctgcccgccctgtctggctgcgccagcgccacccctcctgcgtggccacaccccactcctccctgtctgcgcctgcatgccttgcttggcccgtgccgcccacctcgctgtgccgcccgtcctgcctggtcacgccactcctcacccctccttcgaacagaacaggcgcaccgcgcaactcagcctttgaacagagcagcctccgcccacaaccagccgccttttcattcccttattcccataatgcgacaccctagaaccgctttacggacgtctgaggtgccagagcgactagacggtaaggaagatgccttagtgtcaatcttaaggcgggtaaatcacctcattttttctgaccgccttaccgcctaagggacgccttaatagtttgcattagagattttcccttcaatgtatttgacattttttgtaggcatctttagaagaggagaaagagtcacttaaagctaaaatatcgaagctgcaaagcaacctaagaatgggccttgaaattgaacaacatttgcaaagaaatgcacgaatattagagaaaagacaggcactgtatgatggattcctgagaaatggattgtccgaacttcaaaagttctacacatgtcaaaaggctgaaattatgaaaatattggaagaagaatcgttgcggttgatgaaagttgttgcagagattcaggataaactaactgaaatttgtatcaacactgaagttagtgaccaccctgccgatgagattcaatgttgtgacagcagttgtaaagatgtgcatgttactaaagatatcagtcctagcacatgtcgtaagagtgattatcctgctgatcttaactccgtgtcgtttgatgaatctaaagcacttgcacaagccttacaggagaagatggaagcacttatgctcttctcacaggaacaagaaagatacctattagagaaacagagagacctgattgttatcgaggaactccagaagaacttatctcaagttaaagatgaaaaggtgaaggtcctgatggaattaacaaaactaaaagaacaatatttgctattgaagggctctgctgtcaaggaaggtcatgatactggtgattcatctaaactcattcctgggcatgaccaacaagggatgctgaagactatgctgaagaggacatctttaagacactggatgaggaaagaaagtaatactattggacatgggagctctgatggaaatgatcatacagtttgcaaagaacattcagtggatgttgcaagattaagagttgaaaatgctatgcttcttgaaggtgttggtactgttgagcatctcacttcttcagtgcatagactgcatattgtgcttttgaaggcttatgatgatatcaagtcagctgatcctttggagagtacctttgaagcgctcaacagtcttataactgaagcaaaccttatgaagacagctcttaatgtggttcttcctgtaagctggtccggggattcatcagatgcaattaaatatgaagctatgtgcgatccatctgattcacctaaatcgaagtctgggaaagtagacccgctctcttctgcaggcatggagatggtggagctactaatattggctgctgagattctcaaggagagctttctggtgaagaaataaggcctccatgtaaggacgagtatggctctccttgtttgtttagaagcatgcaatttaatccttaatttttttgggtgtatatacttaaactgattgctaaaagtgcactactagattatttcggatgtagagaaagagccgaatgtgcactgtaatttacggttcgctgctattgatgtgtcttgtgttggtagactaaaggatttaagagccatgtgtacaaaattcagtttacaagcaaagatcaaagaatagacatgaactagggaaagagaaagaaaaacaaactgaaagttccatacctaaaagcgtcggcactggttgtcg

SEQ ID NO: 213272 - DNA, 7620 bp, Zea Mays
ctttctctctctctctctctctctctcgttgcccccgcatactctctgtcttgggcgctctctgtctctggtggcggcgagtagcatactctctgtcttgggcgctctgtctctggtggcgacgactcgccgccgccgccgccgcgataggccacgcctcctggtcgccatttccggatccttaccgacgacgcgcacccaccaccccatctttttccgttcctgctgtgcgacacacaaaccctagctgtatcgggtgggctgtgaaatggaccaagctgcagattcctctgaactgcttcgtcgcatcgaggagctccagcgcgaaaaggatgaaaaacagaattctttggaactattgttaagacggattgaagggctacaatatgaaatggatgaaaaagtagatcttgttgaagtgttaactcgtcaagttgaaaatctgcagcgagagcgtgatgagctcagaaaagatattgagcaattatgtatgcaacaagctgggcctggttatgtttctgttgcaactcgaatgcttactcagagctttggaacaggatattgagaacctccagaaaaagttaggtggttgcttaagagagaatcaaaatttgcaagaggagcttgctgaagcttatcgaattaagagccagcttgctgagttacatggtgctgcactatcaaagaacaaggatcttgaaaagcaagtaagatttttccagagcagtgtcgctcaagcgtttgctgaacgggacagttcattaatggagtgtgagaaagcaaaagagcgggaagaagcagtgtcaagaaagtttgctgattttgaggaaaggatgagagaatatcaatcagagattgatgaacagaaacacttaaatgatgacttgcagagagaactgacagaactgaaggcacatacagaattgtccttgaaagttattctaaaattctatgaccttcgttgcagagactctggatgttcttcaagccttactattgaagagaagtgttcaatccttcttggtgattctgctgacaattggagttttagctctgatggcggaacctcaactttgaagtacattgtaaaccacccttatccattataaagaatgattcatatttaagtatgcgatctgtttttttttttgcatttgtattgcaagatacaaattctctgtggcactaaacatcatctggcgcagagccagaaaattatagatatggggacgaaatgctaaaaaataaattattagaaggcaaaatcagcattttcattgaattttatgtgcataagaggaacttatctatcataacagagtgcttgatcctccctccttccgcccctgaacatgttaatgcattgttggctaattggcttgttcagttttattctgggaactaaatgaatgcagaaggtaggaaatgatgaaactttgctggcatctgtttcaggacttatgcagttatgctttgttcccagtttctcattcaacatactgctcaatacatggatagaaaacatccgtattattgatggaagtcataaatttagtgctaatcttctcatttgtcctattcagtaagttatagttcagtatgattgtcatgttctatttgacctaattgtgtcatgtacttgagtaatacaacatgacttgcaggccctaatttgttttcaagaactgtttattgattttttttccagttgatttggtcctaaaccaaagtgctttgcatagttaaggcgagtgtttgacccccgccttaccttcgaagcggtaaagtgtaaggcgagacaacaccttaatcatatataaatataggaaaatatagaaaattagtcttgaatagaagtacgaaagtaccaaacagaagtctataagttcaatataagcaaacataataggctaaaagtccaacataagtaggttctgatactctcatctctcaagttctgatacatcatcaaactcatcaaaaatgggaggattactgtcttcttcgcgttctctcccaccggatatatcatcatcttcactcacattcaagtcatctttcgcatgattggttgccgcgtcctacccgcccagactcgcggcatgcgttggccgggcgcgagcgagtgtttggttgccgcacccacgccctccggactgcatgtgcgcatgcagtttagtgctttttttcgccgttctgcctgcaagcgtggagaagccggaaattaccttcgctgggggaccaggcccgcacgaggcaggcacgtgacagaccggcaaccaatcagcccccttgtggatctggctcaaagtcttcgtccatggcacctccctcttcttcttacggcctcattcttgcatgctttctctatgtaaggccagaactttgtctctgactagcttgccttggaaggttgtgccctcgaagcgactccgatgctctagtagcaacatcaacatgatccatcatgtgaggtcaacaatattatcattgtccctgctggggtgtaccactgatgagtatccactcgttgtcccaatcaaaatcctcaataattaatgggtcatagcttgtgccggctttctccctcatttgaaacctacttcgcatcttttgattgtatgaaacatagaccaagtcattcaaccttttatgcaacaacaagtttctcttctttgtatgtatagtaagtaacaaacccaacctaaataagtagcaagaaatagattgaagctagtaaacataagcgaagtagcaaaaaatggacttacaaattcaaatgtgcttcaattcctctcacaaccggatgaggaagcacaaagtctaaccagtaaccacacgcttggcaaacctttgaaattcatatgctcggccgccatatgaacgttatcaatcaactacgcagatgcaaacagcgacacggtcacacacataggtatacaacagcaggaaagaataaaaaaagatgtgctgaaattagcaatcagccaagcatatagtactttagagggctctttgcttgaatgttttcaagtgccaacttgtttgaaaaatagaccctctatgatcttcataatgcatggcatgctcattaatcttcgaccgtatttcttcattggactccattcttgctagcacataattgaaacaactcctcagctttacaacatatctatcatctccctttggatggcaaagaattttcccaggttcaaataaagtgcagcaccatacgatggatggtccatttgtttcatccaacgaccctcaataatgtccataattttttcagcaatgcttgcttgttttgtgtagggaagctaagccttttctcttttgcaacatccattagtgctgcaatttatgtcatgtatgttttttcatctccatcaactgccctaagcactataagaagtgccaaagctctgaggcaatcttcaactgaagaccaaaaagtcttagctagaataatattacaccccccttccagcctctgtctttgccaacttgttgcagttccatgcatctcacaaaaagtgctctcaaggcatcttgatgtttatgtagacttttcaaagtaaggaatgtggcaaaacgagtggctgctggtcttaaaggatccccctcctatcttctccctcattgcacttagaattcctccatgcctataaataaaagtggtgactcttttggcttgtgcaattagtctttcaaatatccaatatcctccaccatgaggtccaaacaatgtgcagtacaaggaccctagaacaatgttaaaatactatccattagaagcctacccactgccttatatttttttctcgaatacgcaggagagctgcgtatcaattcattaatagtagaggagaaatatatatacaagaaaaaggcccacacacttgcacacacccactaggaacagaactgcaagaacatttgcgcctgttacagcacagaaacgaccctacacaacaactaaaatcggtatgccgtagcctccagaagctgcagatccttggcccctgctgcactccaacacaaaatctcatcaccagccaagcacaaggcagcagccaatcgtggaggtttgcgaccaaagacattcatttctgtgtctccacaaggtccatgcccctaagattatgagagagttaaaacctttctgaatggagcttcgcatagagctggaagaactgctccaccaatccaaaaaggaggtcgcctcaggctgaggggcaagaagtgccaaacccattcggctaagaaaaaagaaccagaactgacacgaaaagagacaggagacaagaaggcgatatagcgtttcacgttcttggtcacacaacacacaagcttcagggtgtggcagattcgtcctttcaagtcgatcagatgtccaacacctattgtgggcagccaaccacatgaagaaggcacatttaggcggcacccacaatttccagatacgctcccatggttcaaagaacaacgagctctgcatgagagcatcatatgccgatcttgctgaatatgccctgacggagagaggctccaaaaatgtctatccggcatttccagcacccctggctgaagctgcaccacgtgtatagcctctcaaataccaagaaactcttgctaactctgccaagaaataactccatggatatcgtggacccatcttgaatctgttagagcatctaggaccatccttcgattagctattctggtgggaatcatactatgtataagtggtgctagttcctttaaccgctgcctcatcaaccatctatcctcccaaaacaaggtggtgctaccatcgcctagttcagtagtcacggccatgttgaaaattccttgcacctgtttatttgcttgtagcttgaaggcagcccatggtctctgtcagcctttggctttgtggaagcagcctccttagtggtttggtatgaacctgaagaccgcctatcatccacaacctattcagggattctctggagcatgcttgcgaccttcccaaccacttttggcatgttttgggcttagttgtagctggttgcctaaactgaaaggcggctctcctccgtttagcagctgtcccggaacttggctgcacaacggagcaatcagattcattctgtcctagcctctgcccctgcacctgcccatgtactggaccaatgttataaggaaaataggcctgttcctcttcttctccaagtaagctgtcatctcttttctaatctcagtggtggtgttgaaacacatgactgtcctcatatcccccggcaaggtgttctttataccttttaattccttctttgttaccatgttgcatcggatgcatgtcaccttatcctgattccctatttctgtccaataaccgtacttccagcctgggtcattgaattttgcctctggatcttgcatggggtgataaggatcaacatcaatgggagcagcagcagcggatgcggatcagacactctccatgacaatggcttactctgtacaggtggatagtaagaaaaaggcaaaggttcagctcactaattaacatcagagagtggggaacagagcagcacggaggcccattatcttgcaccggatttaaagcagagggctgctgctaggatgctggcctgcccgccctgtctggctgcgccagcgccacccctcctgcgtggccacaccccactcctccctgtctgcgcctgcatgccttgcttggcccgtgccgcccacctcgctgtgccgcccgtcctgcctggtcacgccactcctcacccctccttcgaacagaacaggcgcaccgcgcaactcagcctttgaacagagcagcctccgcccacaaccagccgccttttcattcccttattcccataatgcgacaccctagaaccgctttacggacgtctgaggtgccagagcgactagacggtaaggaagatgccttagtgtcaatcttaaggcgggtaaatcacctcattttttctgaccgccttaccgcctaagggacgccttaatagtttgcattagagattttcccttcaatgtatttgacattttttgtaggcatctttagaagaggagaaagagtcacttaaagctaaaatatcgaagctgcaaagcaacctaagaatgggccttgaaattgaacaacatttgcaaagaaatgcacgaatattagagaaaagacaggcactgtatgatggattcctgagaaatggattgtccgaacttcaaaagttctacacatgtcaaaaggctgaaattatgaaaatattggaagaagaatcgttgcggttgatgaaagttgttgcagagattcaggataaactaactgaaatttgtatcaacactgaagttagtgaccaccctgccgatgagattcaatgttgtgacagcagttgtaaagatgtgcatgttactaaagatatcagtcctagcacatgtcgtaagagtgattatcctgctgatcttaactccgtgtcgtttgatgaatctaaagcacttgcacaagccttacaggagaagatggaagcacttatgctcttctcacaggaacaagaaagatacctattagagaaacagagagacctgattgttatcgaggaactccagaagaacttatctcaagttaaagatgaaaaggtgaaggtcctgatggaattaacaaaactaaaagaacaatatttgctattgaagggctctgctgtcaaggaaggtcatgatactggtgattcatctaaactcattcctgggcatgaccaacaagggatgctgaagactatgctgaagaggacatctttaagacactggatgaggaaagaaagtaatactattggacatgggagctctgatggaaatgatcatacagtttgcaaagaacattcagtggatgttgcaagattaagagttgaaaatgctatgcttcttgaaggtgttggtactgttgagcatctcacttcttcagtgcatagactgcatattgtgcttttgaaggcttatgatgatatcaagtcagctgatcctttggagagtacctttgaagcgctcaacagtcttataactgaagcaaaccttatgaagacagctcttaatgtggttcttcctgtaagctggtccggggattcatcagatgcaattaaatatgaagctatgtgcgatccatctgattcacctaaatcgaagtctgggaaagtagacccgctctcttctgcaggcatggagatggtggagctactaatattggctgctgagattctcaaggagagctttctggtgaagaaataaggcctccatgtaaggacgagtatggctctccttgtttgtttagaagcatgcaatttaatccttaatttttttgggtgtatatacttaaactgattgctaaaagtgcactactagattatttcggatgtagagaaagagccgaatgtgcactgtaatttacggttcgctgctattgatgtgtcttgtgttggtagactaaaggatttaagagccatgtgtacaaaattcagtttacaagcaaagatcaaagaatagacatgaactagggaaagagaaagaaaaacaaactgaaagttccatacctaaaagcgtcggcactggttgtcg

SEQ ID NO: 213273 - DNA, 7558 bp, Zea Mays
gtctactttctctctctctctctctctctctcgttgcccccgcatactctctgtcttgggcgctctctgtctctggtggcggcgagtagcatactctctgtcttgggcgctctgtctctggtggcgacgactcgccgccgccgccgccgcgataggccacgcctcctggtcgccatttccggatccttaccgacgacgcgcacccaccaccccatctttttccgttcctgctgtgcgacacacaaaccctagctgtatcgggtgggctgtgaaatggaccaagctgcagattcctctgaactgcttcgtcgcatcgaggagctccagcgcgaaaaggatgaaaaacagaattctttggaactattgttaagacggattgaagggctacaatatgaaatggatgaaaaagtagatcttgttgaagtgttaactcgtcaagttgaaaatctgcagcgagagcgtgatgagctcagaaaagatattgagcaattatgtatgcaacaagctgggcctggttatgtttctgttgcaactcgaatgcttactcagaggacagcagctttggaacaggatattgagaacctccagaaaaagttaggtggttgcttaagagagaatcaaaatttgcaagaggagcttgctgaagcttatcgaattaagagccagcttgctgagttacatggtgctgcactatcaaagaacaaggatcttgaaaagcaagtaagatttttccagagcagtgtcgctcaagcgtttgctgaacgggacagttcattaatggagtgtgagaaagcaaaagagcgggaagaagcagtgtcaagaaagtttgctgattttgaggaaaggatgagagaatatcaatcagagattgatgaacagaaacacttaaatgatgacttgcagagagaactgacagaactgaaggcacatacagaattgtccttgaaagttattctaaaattctatgaccttcgttgcagagactctggatgttcttcaagccttactattgaagagaagtgttcaatccttcttggtgattctgctgacaattggagttttagctctgatggcggaacctcaactttgaagtacattgtaaaccacccttatccattataaagaatgattcatatttaagtatgcgatctgtttttttttttgcatttgtattgcaagatacaaattctctgtggcactaaacatcatctggcgcagagccagaaaattatagatatggggacgaaatgctaaaaaataaattattagaaggcaaaatcagcattttcattgaattttatgtgcataagaggaacttatctatcataacagagtgcttgatcctccctccttccgcccctgaacatgttaatgcattgttggctaattggcttgttcagttttattctgggaactaaatgaatgcagaaggtaggaaatgatgaaactttgctggcatctgtttcaggacttatgcagttatgctttgttcccagtttctcattcaacatactgctcaatacatggatagaaaacatccgtattattgatggaagtcataaatttagtgctaatcttctcatttgtcctattcagtaagttatagttcagtatgattgtcatgttctatttgacctaattgtgtcatgtacttgagtaatacaacatgacttgcaggccctaatttgttttcaagaactgtttattgattttttttccagttgatttggtcctaaaccaaagtgctttgcatagttaaggcgagtgtttgacccccgccttaccttcgaagcggtaaagtgtaaggcgagacaacaccttaatcatatataaatataggaaaatatagaaaattagtcttgaatagaagtacgaaagtaccaaacagaagtctataagttcaatataagcaaacataataggctaaaagtccaacataagtaggttctgatactctcatctctcaagttctgatacatcatcaaactcatcaaaaatgggaggattactgtcttcttcgcgttctctcccaccggatatatcatcatcttcactcacattcaagtcatctttcgcatgattggttgccgcgtcctacccgcccagactcgcggcatgcgttggccgggcgcgagcgagtgtttggttgccgcacccacgccctccggactgcatgtgcgcatgcagtttagtgctttttttcgccgttctgcctgcaagcgtggagaagccggaaattaccttcgctgggggaccaggcccgcacgaggcaggcacgtgacagaccggcaaccaatcagcccccttgtggatctggctcaaagtcttcgtccatggcacctccctcttcttcttacggcctcattcttgcatgctttctctatgtaaggccagaactttgtctctgactagcttgccttggaaggttgtgccctcgaagcgactccgatgctctagtagcaacatcaacatgatccatcatgtgaggtcaacaatattatcattgtccctgctggggtgtaccactgatgagtatccactcgttgtcccaatcaaaatcctcaataattaatgggtcatagcttgtgccggctttctccctcatttgaaacctacttcgcatcttttgattgtatgaaacatagaccaagtcattcaaccttttatgcaacaacaagtttctcttctttgtatgtatagtaagtaacaaacccaacctaaataagtagcaagaaatagattgaagctagtaaacataagcgaagtagcaaaaaatggacttacaaattcaaatgtgcttcaattcctctcacaaccggatgaggaagcacaaagtctaaccagtaaccacacgcttggcaaacctttgaaattcatatgctcggccgccatatgaacgttatcaatcaactacgcagatgcaaacagcgacacggtcacacacataggtatacaacagcaggaaagaataaaaaaagatgtgctgaaattagcaatcagccaagcatatagtactttagagggctctttgcttgaatgttttcaagtgccaacttgtttgaaaaatagaccctctatgatcttcataatgcatggcatgctcattaatcttcgaccgtatttcttcattggactccattcttgctagcacataattgaaacaactcctcagctttacaacatatctatcatctccctttggatggcaaagaattttcccaggttcaaataaagtgcagcaccatacgatggatggtccatttgtttcatccaacgaccctcaataatgtccataattttttcagcaatgcttgcttgttttgtgtagggaagctaagccttttctcttttgcaacatccattagtgctgcaatttatgtcatgtatgttttttcatctccatcaactgccctaagcactataagaagtgccaaagctctgaggcaatcttcaactgaagaccaaaaagtcttagctagaataatattacaccccccttccagcctctgtctttgccaacttgttgcagttccatgcatctcacaaaaagtgctctcaaggcatcttgatgtttatgtagacttttcaaagtaaggaatgtggcaaaacgagtggctgctggtcttaaaggatccccctcctatcttctccctcattgcacttagaattcctccatgcctataaataaaagtggtgactcttttggcttgtgcaattagtctttcaaatatccaatatcctccaccatgaggtccaaacaatgtgcagtacaaggaccctagaacaatgttaaaatactatccattagaagcctacccactgccttatatttttttctcgaatacgcaggagagctgcgtatcaattcattaatagtagaggagaaatatatatacaagaaaaaggcccacacacttgcacacacccactaggaacagaactgcaagaacatttgcgcctgttacagcacagaaacgaccctacacaacaactaaaatcggtatgccgtagcctccagaagctgcagatccttggcccctgctgcactccaacacaaaatctcatcaccagccaagcacaaggcagcagccaatcgtggaggtttgcgaccaaagacattcatttctgtgtctccacaaggtccatgcccctaagattatgagagagttaaaacctttctgaatggagcttcgcatagagctggaagaactgctccaccaatccaaaaaggaggtcgcctcaggctgaggggcaagaagtgccaaacccattcggctaagaaaaaagaaccagaactgacacgaaaagagacaggagacaagaaggcgatatagcgtttcacgttcttggtcacacaacacacaagcttcagggtgtggcagattcgtcctttcaagtcgatcagatgtccaacacctattgtgggcagccaaccacatgaagaaggcacatttaggcggcacccacaatttccagatacgctcccatggttcaaagaacaacgagctctgcatgagagcatcatatgccgatcttgctgaatatgccctgacggagagaggctccaaaaatgtctatccggcatttccagcacccctggctgaagctgcaccacgtgtatagcctctcaaataccaagaaactcttgctaactctgccaagaaataactccatggatatcgtggacccatcttgaatctgttagagcatctaggaccatccttcgattagctattctggtgggaatcatactatgtataagtggtgctagttcctttaaccgctgcctcatcaaccatctatcctcccaaaacaaggtggtgctaccatcgcctagttcagtagtcacggccatgttgaaaattccttgcacctgtttatttgcttgtagcttgaaggcagcccatggtctctgtcagcctttggctttgtggaagcagcctccttagtggtttggtatgaacctgaagaccgcctatcatccacaacctattcagggattctctggagcatgcttgcgaccttcccaaccacttttggcatgttttgggcttagttgtagctggttgcctaaactgaaaggcggctctcctccgtttagcagctgtcccggaacttggctgcacaacggagcaatcagattcattctgtcctagcctctgcccctgcacctgcccatgtactggaccaatgttataaggaaaataggcctgttcctcttcttctccaagtaagctgtcatctcttttctaatctcagtggtggtgttgaaacacatgactgtcctcatatcccccggcaaggtgttctttataccttttaattccttctttgttaccatgttgcatcggatgcatgtcaccttatcctgattccctatttctgtccaataaccgtacttccagcctgggtcattgaattttgcctctggatcttgcatggggtgataaggatcaacatcaatgggagcagcagcagcggatgcggatcagacactctccatgacaatggcttactctgtacaggtggatagtaagaaaaaggcaaaggttcagctcactaattaacatcagagagtggggaacagagcagcacggaggcccattatcttgcaccggatttaaagcagagggctgctgctaggatgctggcctgcccgccctgtctggctgcgccagcgccacccctcctgcgtggccacaccccactcctccctgtctgcgcctgcatgccttgcttggcccgtgccgcccacctcgctgtgccgcccgtcctgcctggtcacgccactcctcacccctccttcgaacagaacaggcgcaccgcgcaactcagcctttgaacagagcagcctccgcccacaaccagccgccttttcattcccttattcccataatgcgacaccctagaaccgctttacggacgtctgaggtgccagagcgactagacggtaaggaagatgccttagtgtcaatcttaaggcgggtaaatcacctcattttttctgaccgccttaccgcctaagggacgccttaatagtttgcattagagattttcccttcaatgtatttgacattttttgtaggcatctttagaagaggagaaagagtcacttaaagctaaaatatcgaagctgcaaagcaacctaagaatgggccttgaaattgaacaacatttgcaaagaaatgcacgaatattagagaaaagacaggcactgtatgatggattcctgagaaatggattgtccgaacttcaaaagttctacacatgtcaaaaggctgaaattatgaaaatattggaagaagaatcgttgcggttgatgaaagttgttgcagagattcaggataaactaactgaaatttgtatcaacactgaagttagtgaccaccctgccgatgagattcaatgttgtgacagcagttgtaaagatgtgcatgttactaaagatatcagtcctagcacatgtcgtaagatggaagcacttatgctcttctcacaggaacaagaaagatacctattagagaaacagagagacctgattgttatcgaggaactccagaagaacttatctcaagttaaagatgaaaaggtgaaggtcctgatggaattaacaaaactaaaagaacaatatttgctattgaagggctctgctgtcaaggaaggtcatgatactggtgattcatctaaactcattcctgggcatgaccaacaagggatgctgaagactatgctgaagaggacatctttaagacactggatgaggaaagaaagtaatactattggacatgggagctctgatggaaatgatcatacagtttgcaaagaacattcagtggatgttgcaagattaagagttgaaaatgctatgcttcttgaaggtgttggtactgttgagcatctcacttcttcagtgcatagactgcatattgtgcttttgaaggcttatgatgatatcaagtcagctgatcctttggagagtacctttgaagcgctcaacagtcttataactgaagcaaaccttatgaagacagctcttaatgtggttcttcctgtaagctggtccggggattcatcagatgcaattaaatatgaagctatgtgcgatccatctgattcacctaaatcgaagtctgggaaagtagacccgctctcttctgcaggcatggagatggtggagctactaatattggctgctgagattctcaaggagagctttctggtgaagaaataaggcctccatgtaaggacgagtatggctctccttgtttgtttagaagcatgcaatttaatccttaatttttttgggtgtatatacttaaactgattgctaaaagtgcactactagattatttcggatgtagagaaagagccgaatgtgcactgtaatttacggttcgctgctattgatgtgtcttgtgttggtagactaaaggatttaagagccatgtgtacaaaattcagtttacaagcaaagatcaaagaatagacatgaactagggaaagagaaagaaaaacaaactgaaagttccatacctaaaagcgtcggcactggttgtcg

SEQ ID NO: 213274 - DNA, 3165 bp, Zea Mays
caagcgtctactttctctctctctctctctctctctcgttgcccccgcatactctctgtcttgggcgctctctgtctctggtggcggcgagtagcatactctctgtcttgggcgctctgtctctggtggcgacgactcgccgccgccgccgccgcgataggccacgcctcctggtcgccatttccggatccttaccgacgacgcgcacccaccaccccatctttttccgttcctgctgtgcgacacacaaaccctagctgtatcgggtgggctgtgaaatggaccaagctgcagattcctctgaactgcttcgtcgcatcgaggagctccagcgcgaaaaggatgaaaaacagaattctttggaactattgttaagacggattgaagggctacaatatgaaatggatgaaaaagtagatcttgttgaagtgttaactcgtcaagttgaaaatctgcagcgagagcgtgatgagctcagaaaagatattgagcaattatgtatgcaacaagctgggcctggttatgtttctgttgcaactcgaatgcttactcagaggacagcagctttggaacaggatattgagaacctccagaaaaagttaggtggttgcttaagagagaatcaaaatttgcaagaggagcttgctgaagcttatcgaattaagagccagcttgctgagttacatggtgctgcactatcaaagaacaaggatcttgaaaagcaagtaagatttttccagagcagtgtcgctcaagcgtttgctgaacgggacagttcattaatggagtgtgagaaagcaaaagagcgggaagaagcagtgtcaagaaagtttgctgattttgaggaaaggatgagagaatatcaatcagagattgatgaacagaaacacttaaatgatgacttgcagagagaactgacagaactgaaggcacatacagaattgtccttgaaagttattctaaaattctatgaccttcgttgcagagactctggatgttcttcaagccttactattgaagagaagtgttcaatccttcttggtgattctgctgacaattggagttttagctctgatggcggaacctcaactttgaagtacattgcatctttagaagaggagaaagagtcacttaaagctaaaatatcgaagctgcaaagcaacctaagaatgggccttgaaattgaacaacatttgcaaagaaatgcacgaatattagagaaaagacaggcactgtatgatggattcctgagaaatggattgtccgaacttcaaaagttctacacatgtcaaaaggctgaaattatgaaaatattggaagaagaatcgttgcggttgatgaaagttgttgcagagattcaggataaactaactgaaatttgtatcaacactgaagttagtgaccaccctgccgatgagattcaatgttgtgacagcagttgtaaagatgtgcatgttactaaagatatcagtcctagcacatgtcgtaagagtgattatcctgctgatcttaactccgtgtcgtttgatgaatctaaagcacttgcacaagccttacaggagaagatggaagcacttatgctcttctcacaggaacaagaaagatacctattagagaaacagagagacctgattgttatcgaggaactccagaagaacttatctcaagtagtacctctagaattcctacttgtcattatttttcaatcacaacgtactatatgacgagtgttctaaatagtacaagtatggtttgtcatgaagttgatacttcataccattactattttgtgcattttgctcctagctgttggaaaggtaaaactgaaccatatgattcttttcgaaagtatggattaaatgactagagttagttttgaagtttgaacttggatttttcttagggaagttcgtcaatatattatggacttgactattcacactgctaacactggtggtttgccagtagtgtcatccttgataagttgatatacagtaattagtcacatttacttctttagtatatgacctatttttaggtgtgagtttctgttgcacatcagcacactttagtgttggatgagtgtgtcgcttgactacttcatcttatgtgtacaggttaaagatgaaaaggtgaaggtcctgatggaattaacaaaactaaaagaacaatatttgctattgaagggctctgctgtcaaggaaggtcatgatactggtgattcatctaaactcattcctgggcatgaccaacaagggatgctgaagactatgctgaagaggacatctttaagacactggatgaggaaagaaagtaatactattggacatgggagctctgatggaaatgatcatacagtttgcaaagaacattcagtggatgttgcaagattaagagttgaaaatgctatgcttcttgaaggtgttggtactgttgagcatctcacttcttcagtgcatagactgcatattgtgcttttgaaggcagggcaggattttttttggttgtattactaggtgataactttcataccaacaaacatgtcaggcttatgatgatatcaagtcagctgatcctttggagagtacctttgaagcgctcaacagtcttataactgaagcaaaccttatgaagacagctcttaatgtggttcttcctgtaagctggtccggggattcatcagatgcaattaaatatgaagctatgtgcgatccatctgattcacctaaatcgaagtctgggaaagtagacccgctctcttctgcaggcatggagatggtggagctactaatattggctgctgagattctcaaggagagctttctggtgaagaaataaggcctccatgtaaggacgagtatggctctccttgtttgtttagaagcatgcaatttaatccttaatttttttgggtgtatatacttaaactgattgctaaaagtgcactactagattatttcggatgtagagaaagagccgaatgtgcactgtaatttacggttcgctgctattgatgtgtcttgtgttggtagactaaaggatttaagagccatgtgtacaaaattcagtttacaagcaaagatcaaagaatagacatgaactagggaaagagaaagaaaaacaaactgaaagttccatacctaaaagcgtcggcactggttgtcg

SEQ ID NO: 213275 - DNA, 8122 bp, Zea Mays
caagcgtctactttctctctctctctctctctctctcgttgcccccgcatactctctgtcttgggcgctctctgtctctggtggcggcgagtagcatactctctgtcttgggcgctctgtctctggtggcgacgactcgccgccgccgccgccgcgataggccacgcctcctggtcgccatttccggatccttaccgacgacgcgcacccaccaccccatctttttccgttcctgctgtgcgacacacaaaccctagctgtatcgggtgggctgtgaaatggaccaagctgcagattcctctgaactgcttcgtcgcatcgaggagctccagcgcgaaaaggatgaaaaacagaattctttggaactattgttaagacggattgaagggctacaatatgaaatggatgaaaaagtagatcttgttgaagtgttaactcgtcaagttgaaaatctgcagcgagagcgtgatgagctcagaaaagatattgagcaattatgtatgcaacaagctgggcctggttatgtttctgttgcaactcgaatgcttactcagaggacagcagctttggaacaggatattgagaacctccagaaaaagttaggtggttgcttaagagagaatcaaaatttgcaagaggagcttgctgaagcttatcgaattaagagccagcttgctgagttacatggtgctgcactatcaaagaacaaggatcttgaaaagcaagtaagatttttccagagcagtgtcgctcaagcgtttgctgaacgggacagttcattaatggagtgtgagaaagcaaaagagcgggaagaagcagtgtcaagaaagtttgctgattttgaggaaaggatgagagaatatcaatcagagattgatgaacagaaacacttaaatgatgacttgcagagagaactgacagaactgaaggcacatacagaattgtccttgaaaagactctggatgttcttcaagccttactattgaagagaagtgttcaatccttcttggtgattctgctgacaattggagttttagctctgatggcggaacctcaactttgaagtacattgtaaaccacccttatccattataaagaatgattcatatttaagtatgcgatctgtttttttttttgcatttgtattgcaagatacaaattctctgtggcactaaacatcatctggcgcagagccagaaaattatagatatggggacgaaatgctaaaaaataaattattagaaggcaaaatcagcattttcattgaattttatgtgcataagaggaacttatctatcataacagagtgcttgatcctccctccttccgcccctgaacatgttaatgcattgttggctaattggcttgttcagttttattctgggaactaaatgaatgcagaaggtaggaaatgatgaaactttgctggcatctgtttcaggacttatgcagttatgctttgttcccagtttctcattcaacatactgctcaatacatggatagaaaacatccgtattattgatggaagtcataaatttagtgctaatcttctcatttgtcctattcagtaagttatagttcagtatgattgtcatgttctatttgacctaattgtgtcatgtacttgagtaatacaacatgacttgcaggccctaatttgttttcaagaactgtttattgattttttttccagttgatttggtcctaaaccaaagtgctttgcatagttaaggcgagtgtttgacccccgccttaccttcgaagcggtaaagtgtaaggcgagacaacaccttaatcatatataaatataggaaaatatagaaaattagtcttgaatagaagtacgaaagtaccaaacagaagtctataagttcaatataagcaaacataataggctaaaagtccaacataagtaggttctgatactctcatctctcaagttctgatacatcatcaaactcatcaaaaatgggaggattactgtcttcttcgcgttctctcccaccggatatatcatcatcttcactcacattcaagtcatctttcgcatgattggttgccgcgtcctacccgcccagactcgcggcatgcgttggccgggcgcgagcgagtgtttggttgccgcacccacgccctccggactgcatgtgcgcatgcagtttagtgctttttttcgccgttctgcctgcaagcgtggagaagccggaaattaccttcgctgggggaccaggcccgcacgaggcaggcacgtgacagaccggcaaccaatcagcccccttgtggatctggctcaaagtcttcgtccatggcacctccctcttcttcttacggcctcattcttgcatgctttctctatgtaaggccagaactttgtctctgactagcttgccttggaaggttgtgccctcgaagcgactccgatgctctagtagcaacatcaacatgatccatcatgtgaggtcaacaatattatcattgtccctgctggggtgtaccactgatgagtatccactcgttgtcccaatcaaaatcctcaataattaatgggtcatagcttgtgccggctttctccctcatttgaaacctacttcgcatcttttgattgtatgaaacatagaccaagtcattcaaccttttatgcaacaacaagtttctcttctttgtatgtatagtaagtaacaaacccaacctaaataagtagcaagaaatagattgaagctagtaaacataagcgaagtagcaaaaaatggacttacaaattcaaatgtgcttcaattcctctcacaaccggatgaggaagcacaaagtctaaccagtaaccacacgcttggcaaacctttgaaattcatatgctcggccgccatatgaacgttatcaatcaactacgcagatgcaaacagcgacacggtcacacacataggtatacaacagcaggaaagaataaaaaaagatgtgctgaaattagcaatcagccaagcatatagtactttagagggctctttgcttgaatgttttcaagtgccaacttgtttgaaaaatagaccctctatgatcttcataatgcatggcatgctcattaatcttcgaccgtatttcttcattggactccattcttgctagcacataattgaaacaactcctcagctttacaacatatctatcatctccctttggatggcaaagaattttcccaggttcaaataaagtgcagcaccatacgatggatggtccatttgtttcatccaacgaccctcaataatgtccataattttttcagcaatgcttgcttgttttgtgtagggaagctaagccttttctcttttgcaacatccattagtgctgcaatttatgtcatgtatgttttttcatctccatcaactgccctaagcactataagaagtgccaaagctctgaggcaatcttcaactgaagaccaaaaagtcttagctagaataatattacaccccccttccagcctctgtctttgccaacttgttgcagttccatgcatctcacaaaaagtgctctcaaggcatcttgatgtttatgtagacttttcaaagtaaggaatgtggcaaaacgagtggctgctggtcttaaaggatccccctcctatcttctccctcattgcacttagaattcctccatgcctataaataaaagtggtgactcttttggcttgtgcaattagtctttcaaatatccaatatcctccaccatgaggtccaaacaatgtgcagtacaaggaccctagaacaatgttaaaatactatccattagaagcctacccactgccttatatttttttctcgaatacgcaggagagctgcgtatcaattcattaatagtagaggagaaatatatatacaagaaaaaggcccacacacttgcacacacccactaggaacagaactgcaagaacatttgcgcctgttacagcacagaaacgaccctacacaacaactaaaatcggtatgccgtagcctccagaagctgcagatccttggcccctgctgcactccaacacaaaatctcatcaccagccaagcacaaggcagcagccaatcgtggaggtttgcgaccaaagacattcatttctgtgtctccacaaggtccatgcccctaagattatgagagagttaaaacctttctgaatggagcttcgcatagagctggaagaactgctccaccaatccaaaaaggaggtcgcctcaggctgaggggcaagaagtgccaaacccattcggctaagaaaaaagaaccagaactgacacgaaaagagacaggagacaagaaggcgatatagcgtttcacgttcttggtcacacaacacacaagcttcagggtgtggcagattcgtcctttcaagtcgatcagatgtccaacacctattgtgggcagccaaccacatgaagaaggcacatttaggcggcacccacaatttccagatacgctcccatggttcaaagaacaacgagctctgcatgagagcatcatatgccgatcttgctgaatatgccctgacggagagaggctccaaaaatgtctatccggcatttccagcacccctggctgaagctgcaccacgtgtatagcctctcaaataccaagaaactcttgctaactctgccaagaaataactccatggatatcgtggacccatcttgaatctgttagagcatctaggaccatccttcgattagctattctggtgggaatcatactatgtataagtggtgctagttcctttaaccgctgcctcatcaaccatctatcctcccaaaacaaggtggtgctaccatcgcctagttcagtagtcacggccatgttgaaaattccttgcacctgtttatttgcttgtagcttgaaggcagcccatggtctctgtcagcctttggctttgtggaagcagcctccttagtggtttggtatgaacctgaagaccgcctatcatccacaacctattcagggattctctggagcatgcttgcgaccttcccaaccacttttggcatgttttgggcttagttgtagctggttgcctaaactgaaaggcggctctcctccgtttagcagctgtcccggaacttggctgcacaacggagcaatcagattcattctgtcctagcctctgcccctgcacctgcccatgtactggaccaatgttataaggaaaataggcctgttcctcttcttctccaagtaagctgtcatctcttttctaatctcagtggtggtgttgaaacacatgactgtcctcatatcccccggcaaggtgttctttataccttttaattccttctttgttaccatgttgcatcggatgcatgtcaccttatcctgattccctatttctgtccaataaccgtacttccagcctgggtcattgaattttgcctctggatcttgcatggggtgataaggatcaacatcaatgggagcagcagcagcggatgcggatcagacactctccatgacaatggcttactctgtacaggtggatagtaagaaaaaggcaaaggttcagctcactaattaacatcagagagtggggaacagagcagcacggaggcccattatcttgcaccggatttaaagcagagggctgctgctaggatgctggcctgcccgccctgtctggctgcgccagcgccacccctcctgcgtggccacaccccactcctccctgtctgcgcctgcatgccttgcttggcccgtgccgcccacctcgctgtgccgcccgtcctgcctggtcacgccactcctcacccctccttcgaacagaacaggcgcaccgcgcaactcagcctttgaacagagcagcctccgcccacaaccagccgccttttcattcccttattcccataatgcgacaccctagaaccgctttacggacgtctgaggtgccagagcgactagacggtaaggaagatgccttagtgtcaatcttaaggcgggtaaatcacctcattttttctgaccgccttaccgcctaagggacgccttaatagtttgcattagagattttcccttcaatgtatttgacattttttgtaggcatctttagaagaggagaaagagtcacttaaagctaaaatatcgaagctgcaaagcaacctaagaatgggccttgaaattgaacaacatttgcaaagaaatgcacgaatattagagaaaagacaggtacaattctgaagtattgtattgttctttctcatgacctctttaattgtatactttggagtgcaggcactgtatgatggattcctgagaaatggattgtccgaacttcaaaagttctacacatgtcaaaaggctgaaattatgaaaatattggaagaagaatcgttgcggttgatgaaagttgttgcagagattcaggataaactaactgaaatttgtatcaacactgaagttagtgaccaccctgccgatgagattcaatgttgtgacagcagttgtaaagatgtgcatgttactaaagatatcagtcctagcacatgtcgtaagagtgattatcctgctgatcttaactccgtgtcgtttgatgaatctaaagcacttgcacaagccttacaggagaagatggaagcacttatgctcttctcacaggaacaagaaagatacctattagagaaacagagagacctgattgttatcgaggaactccagaagaacttatctcaagtagtacctctagaattcctacttgtcattatttttcaatcacaacgtactatatgacgagtgttctaaatagtacaagtatggtttgtcatgaagttgatacttcataccattactattttgtgcattttgctcctagctgttggaaaggtaaaactgaaccatatgattcttttcgaaagtatggattaaatgactagagttagttttgaagtttgaacttggatttttcttagggaagttcgtcaatatattatggacttgactattcacactgctaacactggtggtttgccagtagtgtcatccttgataagttgatatacagtaattagtcacatttacttctttagtatatgacctatttttaggtgtgagtttctgttgcacatcagcacactttagtgttggatgagtgtgtcgcttgactacttcatcttatgtgtacaggttaaagatgaaaaggtgaaggtcctgatggaattaacaaaactaaaagaacaatatttgctattgaagggctctgctgtcaaggaaggtcatgatactggtgattcatctaaactcattcctgggcatgaccaacaagggatgctgaagactatgctgaagaggacatctttaagacactggatgaggaaagaaagtaatactattggacatgggagctctgatggaaatgatcatacagtttgcaaagaacattcagtggatgttgcaagattaagagttgaaaatgctatgcttcttgaaggtgttggtactgttgagcatctcacttcttcagtgcatagactgcatattgtgcttttgaaggcttatgatgatatcaagtcagctgatcctttggagagtacctttgaagcgctcaacagtcttataactgaagcaaaccttatgaagacagctcttaatgtggttcttcctgtaagctggtccggggattcatcagatgcaattaaatatgaagctatgtgcgatccatctgattcacctaaatcgaagtctgggaaagtagacccgctctcttctgcaggcatggagatggtggagctactaatattggctgctgagattctcaaggagagctttctggtgaagaaataaggcctccatgtaaggacgagtatggctctccttgtttgtttagaagcatgcaatttaatccttaatttttttgggtgtatatacttaaactgattgctaaaagtgcactactagattatttcggatgtagagaaagagccgaatgtgcactgtaatttacggttcgctgctattgatgtgtcttgtgttggtagactaaaggatttaagagccatgtgtacaaaattcagtttacaagcaaagatcaaagaatagacatgaactagggaaagagaaagaaaaacaaactgaaagttccatacctaaaagcgtcggcactggttgtcg

SEQ ID NO: 213276 - DNA, 2659 bp, Zea Mays
cttcattgcaagcgtctactttctctctctctctctctctctctcgttgcccccgcatactctctgtcttgggcgctctctgtctctggtggcggcgagtagcatactctctgtcttgggcgctctgtctctggtggcgacgactcgccgccgccgccgccgcgataggccacgcctcctggtcgccatttccggatccttaccgacgacgcgcacccaccaccccatctttttccgttcctgctgtgcgacacacaaaccctagctgtatcgggtgggctgtgaaatggaccaagctgcagattcctctgaactgcttcgtcgcatcgaggagctccagcgcgaaaaggatgaaaaacagaattctttggaactattgttaagacggattgaagggctacaatatgaaatggatgaaaaagtagatcttgttgaagtgttaactcgtcaagttgaaaatctgcagcgagagcgtgatgagctcagaaaagatattgagcaattatgtatgcaacaagctgggcctggttatgtttctgttgcaactcgaatgcttactcagaggacagcagctttggaacaggatattgagaacctccagaaaaagttaggtggttgcttaagagagaatcaaaatttgcaagaggagcttgctgaagcttatcgaattaagagccagcttgctgagttacatggtgctgcactatcaaagaacaaggatcttgaaaagcaagtaagatttttccagagcagtgtcgctcaagcgtttgctgaacgggacagttcattaatggagtgtgagaaagcaaaagagcgggaagaagcagtgtcaagaaagtttgctgattttgaggaaaggatgagagaatatcaatcagagattgatgaacagaaacacttaaatgatgacttgcagagagaactgacagaactgaaggcacatacagaattgtccttgaaagttattctaaaattctatgaccttcgttgcagagactctggatgttcttcaagccttactattgaagagaagtgttcaatccttcttggtgattctgctgacaattggagttttagctctgatggcggaacctcaactttgaagtacattgcatctttagaagaggagaaagagtcacttaaagctaaaatatcgaagctgcaaagcaacctaagaatgggccttgaaattgaacaacatttgcaaagaaatgcacgaatattagagaaaagacaggcactgtatgatggattcctgagaaatggattgtccgaacttcaaaagttctacacatgtcaaaaggctgaaattatgaaaatattggaagaagaatcgttgcggttgatgaaagttgttgcagagattcaggataaactaactgaaatttgtatcaacactgaagttagtgaccaccctgccgatgagattcaatgttgtgacagcagttgtaaagatgtgcatgttactaaagatatcagtcctagcacatgtcgtaagagtgattatcctgctgatcttaactccgtgtcgtttgatgaatctaaagcacttgcacaagccttacaggagaagatggaagcacttatgctcttctcacaggaacaagaaagatacctattagagaaacagagagacctgattgttatcgaggaactccagaagaacttatctcaagttaaagatgaaaaggtgaaggtcctgatggaattaacaaaactaaaagaacaatatttgctattgaagggctctgctgtcaaggaaggtcatgatactggtgattcatctaaactcattcctgggcatgaccaacaagggatgctgaagactatgctgaagaggacatctttaagacactggatgaggaaagaaagtaatactattggacatgggagctctgatggaaatgatcatacagtttgcaaagaacattcagtggatgttgcaagattaagagttgaaaatgctatgcttcttgaaggtgttggtactgttgagcatctcacttcttcagtgcatagactgcatattgtgcttttgaaggcttatgatgatatcaagtcagctgatcctttggagagtacctttgaagcgctcaacagtcttataactgaagcaaaccttatgaagacagctcttaatgtggttcttcctgtaagctggtccggggattcatcagatgcaattaaatatgaagctatgtgcgatccatctgattcacctaaatcgaagtctgggaaagtagacccgctctcttctgcaggcatggagatggtggagctactaatattggctgctgagattctcaaggagagctttctggtgaagaaataaggcctccatgtaaggacgagtatggctctccttgtttgtttagaagcatgcaatttaatccttaatttttttgggtgtatatacttaaactgattgctaaaagtgcactactagattatttcggatgtagagaaagagccgaatgtgcactgtaatttacggttcgctgctattgatgtgtcttgtgttggtagactaaaggatttaagagccatgtgtacaaaattcagtttacaagcaaagatcaaagaatagacatgaactagggaaagagaaagaaaaacaaactgaaagttccatacctaaaagcgtcggcactggttgtcg

SEQ ID NO: 213277 - DNA, 7710 bp, Zea Mays
cttcattgcaagcgtctactttctctctctctctctctctctctcgttgcccccgcatactctctgtcttgggcgctctctgtctctggtggcggcgagtagcatactctctgtcttgggcgctctgtctctggtggcgacgactcgccgccgccgccgccgcgataggccacgcctcctggtcgccatttccggatccttaccgacgacgcgcacccaccaccccatctttttccgttcctgctgtgcgacacacaaaccctagctgtatcgggtgggctgtgaaatggaccaagctgcagattcctctgaactgcttcgtcgcatcgaggagctccagcgcgaaaaggatgaaaaacagaattctttggaactattgttaagacggattgaagggctacaatatgaaatggatgaaaaagtagatcttgttgaagtgttaactcgtcaagttgaaaatctgcagcgagagcgtgatgagctcagaaaagatattgagcaattatgtatgcaacaagctgggcctggttatgtttctgttgcaactcgaatgcttactcagaggacagcagctttggaacaggatattgagaacctccagaaaaagttaggtggttgcttaagagagaatcaaaatttgcaagaggagcttgctgaagcttatcgaattaagagccagcttgctgagttacatggtgctgcactatcaaagaacaaggatcttgaaaagcaagtaagatttttccagagcagtgtcgctcaagcgtttgctgaacgggacagttcattaatggagtgtgagaaagcaaaagagcgggaagaagcagtgtcaagaaagtttgctgattttgaggaaaggatgagagaatatcaatcagagattgatgaacagaaacacttaaatgatgacttgcagagagaactgacagaactgaaggcacatacagaattgtccttgaaagttattctaaaattctatgaccttcgttgcagagactctggatgttcttcaagccttactattgaagagaagtgttcaatccttcttggtgattctgctgacaattggagttttagctctgatggcggaacctcaactttgaagtacattgtaaaccacccttatccattataaagaatgattcatatttaagtatgcgatctgtttttttttttgcatttgtattgcaagatacaaattctctgtggcactaaacatcatctggcgcagagccagaaaattatagatatggggacgaaatgctaaaaaataaattattagaaggcaaaatcagcattttcattgaattttatgtgcataagaggaacttatctatcataacagagtgcttgatcctccctccttccgcccctgaacatgttaatgcattgttggctaattggcttgttcagttttattctgggaactaaatgaatgcagaaggtaggaaatgatgaaactttgctggcatctgtttcaggacttatgcagttatgctttgttcccagtttctcattcaacatactgctcaatacatggatagaaaacatccgtattattgatggaagtcataaatttagtgctaatcttctcatttgtcctattcagtaagttatagttcagtatgattgtcatgttctatttgacctaattgtgtcatgtacttgagtaatacaacatgacttgcaggccctaatttgttttcaagaactgtttattgattttttttccagttgatttggtcctaaaccaaagtgctttgcatagttaaggcgagtgtttgacccccgccttaccttcgaagcggtaaagtgtaaggcgagacaacaccttaatcatatataaatataggaaaatatagaaaattagtcttgaatagaagtacgaaagtaccaaacagaagtctataagttcaatataagcaaacataataggctaaaagtccaacataagtaggttctgatactctcatctctcaagttctgatacatcatcaaactcatcaaaaatgggaggattactgtcttcttcgcgttctctcccaccggatatatcatcatcttcactcacattcaagtcatctttcgcatgattggttgccgcgtcctacccgcccagactcgcggcatgcgttggccgggcgcgagcgagtgtttggttgccgcacccacgccctccggactgcatgtgcgcatgcagtttagtgctttttttcgccgttctgcctgcaagcgtggagaagccggaaattaccttcgctgggggaccaggcccgcacgaggcaggcacgtgacagaccggcaaccaatcagcccccttgtggatctggctcaaagtcttcgtccatggcacctccctcttcttcttacggcctcattcttgcatgctttctctatgtaaggccagaactttgtctctgactagcttgccttggaaggttgtgccctcgaagcgactccgatgctctagtagcaacatcaacatgatccatcatgtgaggtcaacaatattatcattgtccctgctggggtgtaccactgatgagtatccactcgttgtcccaatcaaaatcctcaataattaatgggtcatagcttgtgccggctttctccctcatttgaaacctacttcgcatcttttgattgtatgaaacatagaccaagtcattcaaccttttatgcaacaacaagtttctcttctttgtatgtatagtaagtaacaaacccaacctaaataagtagcaagaaatagattgaagctagtaaacataagcgaagtagcaaaaaatggacttacaaattcaaatgtgcttcaattcctctcacaaccggatgaggaagcacaaagtctaaccagtaaccacacgcttggcaaacctttgaaattcatatgctcggccgccatatgaacgttatcaatcaactacgcagatgcaaacagcgacacggtcacacacataggtatacaacagcaggaaagaataaaaaaagatgtgctgaaattagcaatcagccaagcatatagtactttagagggctctttgcttgaatgttttcaagtgccaacttgtttgaaaaatagaccctctatgatcttcataatgcatggcatgctcattaatcttcgaccgtatttcttcattggactccattcttgctagcacataattgaaacaactcctcagctttacaacatatctatcatctccctttggatggcaaagaattttcccaggttcaaataaagtgcagcaccatacgatggatggtccatttgtttcatccaacgaccctcaataatgtccataattttttcagcaatgcttgcttgttttgtgtagggaagctaagccttttctcttttgcaacatccattagtgctgcaatttatgtcatgtatgttttttcatctccatcaactgccctaagcactataagaagtgccaaagctctgaggcaatcttcaactgaagaccaaaaagtcttagctagaataatattacaccccccttccagcctctgtctttgccaacttgttgcagttccatgcatctcacaaaaagtgctctcaaggcatcttgatgtttatgtagacttttcaaagtaaggaatgtggcaaaacgagtggctgctggtcttaaaggatccccctcctatcttctccctcattgcacttagaattcctccatgcctataaataaaagtggtgactcttttggcttgtgcaattagtctttcaaatatccaatatcctccaccatgaggtccaaacaatgtgcagtacaaggaccctagaacaatgttaaaatactatccattagaagcctacccactgccttatatttttttctcgaatacgcaggagagctgcgtatcaattcattaatagtagaggagaaatatatatacaagaaaaaggcccacacacttgcacacacccactaggaacagaactgcaagaacatttgcgcctgttacagcacagaaacgaccctacacaacaactaaaatcggtatgccgtagcctccagaagctgcagatccttggcccctgctgcactccaacacaaaatctcatcaccagccaagcacaaggcagcagccaatcgtggaggtttgcgaccaaagacattcatttctgtgtctccacaaggtccatgcccctaagattatgagagagttaaaacctttctgaatggagcttcgcatagagctggaagaactgctccaccaatccaaaaaggaggtcgcctcaggctgaggggcaagaagtgccaaacccattcggctaagaaaaaagaaccagaactgacacgaaaagagacaggagacaagaaggcgatatagcgtttcacgttcttggtcacacaacacacaagcttcagggtgtggcagattcgtcctttcaagtcgatcagatgtccaacacctattgtgggcagccaaccacatgaagaaggcacatttaggcggcacccacaatttccagatacgctcccatggttcaaagaacaacgagctctgcatgagagcatcatatgccgatcttgctgaatatgccctgacggagagaggctccaaaaatgtctatccggcatttccagcacccctggctgaagctgcaccacgtgtatagcctctcaaataccaagaaactcttgctaactctgccaagaaataactccatggatatcgtggacccatcttgaatctgttagagcatctaggaccatccttcgattagctattctggtgggaatcatactatgtataagtggtgctagttcctttaaccgctgcctcatcaaccatctatcctcccaaaacaaggtggtgctaccatcgcctagttcagtagtcacggccatgttgaaaattccttgcacctgtttatttgcttgtagcttgaaggcagcccatggtctctgtcagcctttggctttgtggaagcagcctccttagtggtttggtatgaacctgaagaccgcctatcatccacaacctattcagggattctctggagcatgcttgcgaccttcccaaccacttttggcatgttttgggcttagttgtagctggttgcctaaactgaaaggcggctctcctccgtttagcagctgtcccggaacttggctgcacaacggagcaatcagattcattctgtcctagcctctgcccctgcacctgcccatgtactggaccaatgttataaggaaaataggcctgttcctcttcttctccaagtaagctgtcatctcttttctaatctcagtggtggtgttgaaacacatgactgtcctcatatcccccggcaaggtgttctttataccttttaattccttctttgttaccatgttgcatcggatgcatgtcaccttatcctgattccctatttctgtccaataaccgtacttccagcctgggtcattgaattttgcctctggatcttgcatggggtgataaggatcaacatcaatgggagcagcagcagcggatgcggatcagacactctccatgacaatggcttactctgtacaggtggatagtaagaaaaaggcaaaggttcagctcactaattaacatcagagagtggggaacagagcagcacggaggcccattatcttgcaccggatttaaagcagagggctgctgctaggatgctggcctgcccgccctgtctggctgcgccagcgccacccctcctgcgtggccacaccccactcctccctgtctgcgcctgcatgccttgcttggcccgtgccgcccacctcgctgtgccgcccgtcctgcctggtcacgccactcctcacccctccttcgaacagaacaggcgcaccgcgcaactcagcctttgaacagagcagcctccgcccacaaccagccgccttttcattcccttattcccataatgcgacaccctagaaccgctttacggacgtctgaggtgccagagcgactagacggtaaggaagatgccttagtgtcaatcttaaggcgggtaaatcacctcattttttctgaccgccttaccgcctaagggacgccttaatagtttgcattagagattttcccttcaatgtatttgacattttttgtaggcatctttagaagaggagaaagagtcacttaaagctaaaatatcgaagctgcaaagcaacctaagaatgggccttgaaattgaacaacatttgcaaagaaatgcacgaatattagagaaaagacaggcactgtatgatggattcctgagaaatggattgtccgaacttcaaaagttctacacatgtcaaaaggctgaaattatgaaaatattggaagaagaatcgttgcggttgatgaaagttgttgcagagattcaggataaactaactgaaatttgtatcaacactgaagttagtgaccaccctgccgatgagattcaatgttgtgacagcagttgtaaagatgtgcatgttactaaagatatcagtcctagcacatgtcgtaagagtgattatcctgctgatcttaactccgtgtcgtttgatgaatctaaagcacttgcacaagccttacaggagaagatggaagcacttatgctcttctcacaggaacaagaaagatacctattagagaaacagagagacctgattgttatcgaggaactccagaagaacttatctcaagttaaagatgaaaaggtgaaggtcctgatggaattaacaaaactaaaagaacaatatttgctattgaagggctctgctgtcaaggaaggtcatgatactggtgattcatctaaactcattcctgggcatgaccaacaagggatgctgaagactatgctgaagaggacatctttaagacactggatgaggaaagaaagtaatactattggacatgggagctctgatggaaatgatcatacagtttgcaaagaacattcagtggatgttgcaagattaagagttgaaaatgctatgcttcttgaaggtgttggtactgttgagcatctcacttcttcagtgcatagactgcatattgtgcttttgaaggcagggcaggattttttttggttgtattactaggtgataactttcataccaacaaacatgtcaggcttatgatgatatcaagtcagctgatcctttggagagtacctttgaagcgctcaacagtcttataactgaagcaaaccttatgaagacagctcttaatgtggttcttcctgtaagctggtccggggattcatcagatgcaattaaatatgaagctatgtgcgatccatctgattcacctaaatcgaagtctgggaaagtagacccgctctcttctgcaggcatggagatggtggagctactaatattggctgctgagattctcaaggagagctttctggtgaagaaataaggcctccatgtaaggacgagtatggctctccttgtttgtttagaagcatgcaatttaatccttaatttttttgggtgtatatacttaaactgattgctaaaagtgcactactagattatttcggatgtagagaaagagccgaatgtgcactgtaatttacggttcgctgctattgatgtgtcttgtgttggtagactaaaggatttaagagccatgtgtacaaaattcagtttacaagcaaagatcaaagaatagacatgaactagggaaagagaaagaaaaacaaactgaaagttccatacctaaaagcgtcggcactggttgtcg

SEQ ID NO: 213278 - DNA, 7752 bp, Zea Mays
gttaagtcgtaccataccatgacgagtttggagtgccattaccatctgtccatctctacttctctagtagtagtactttgccattgcgaacgggttaccgaaatttcttcattgcaagcgtctactttctctctctctctctctctctctcgttgcccccgcatactctctgtcttgggcgctctctgtctctggtggcggcgagtagcatactctctgtcttgggcgctctgtctctggtggcgacgactcgccgccgccgccgccgcgataggccacgcctcctggtcgccatttccggatccttaccgacgacgcgcacccaccaccccatctttttccgttcctgctgtgcgacacacaaaccctagctgtatcgggtgggctgtgaaatggaccaagctgcagattcctctgaactgcttcgtcgcatcgaggagctccagcgcgaaaaggatgaaaaacagaattctttggaactattgttaagacggattgaagggctacaatatgaaatggatgaaaaagtagatcttgttgaagtgttaactcgtcaagttgaaaatctgcagcgagagcgtgatgagctcagaaaagatattgagcaattatgtatgcaacaagctgggcctggttatgtttctgttgcaactcgaatgcttactcagaggacagcagctttggaacaggatattgagaacctccagaaaaagttaggtggttgcttaagagagaatcaaaatttgcaagaggagcttgctgaagcttatcgaattaagagccagcttgctgagttacatggtgctgcactatcaaagaacaaggatcttgaaaagcaagtaagatttttccagagcagtgtcgctcaagcgtttgctgaacgggacagttcattaatggagtgtgagaaagcaaaagagcgggaagaagcagtgtcaagaaagtttgctgattttgaggaaaggatgagagaatatcaatcagagattgatgaacagaaacacttaaatgatgacttgcagagagaactgacagaactgaaggcacatacagaattgtccttgaaagttattctaaaattctatgaccttcgttgcagagactctggatgttcttcaagccttactattgaagagaagtgttcaatccttcttggtgattctgctgacaattggagttttagctctgatggcggaacctcaactttgaagtacattgtaaaccacccttatccattataaagaatgattcatatttaagtatgcgatctgtttttttttttgcatttgtattgcaagatacaaattctctgtggcactaaacatcatctggcgcagagccagaaaattatagatatggggacgaaatgctaaaaaataaattattagaaggcaaaatcagcattttcattgaattttatgtgcataagaggaacttatctatcataacagagtgcttgatcctccctccttccgcccctgaacatgttaatgcattgttggctaattggcttgttcagttttattctgggaactaaatgaatgcagaaggtaggaaatgatgaaactttgctggcatctgtttcaggacttatgcagttatgctttgttcccagtttctcattcaacatactgctcaatacatggatagaaaacatccgtattattgatggaagtcataaatttagtgctaatcttctcatttgtcctattcagtaagttatagttcagtatgattgtcatgttctatttgacctaattgtgtcatgtacttgagtaatacaacatgacttgcaggccctaatttgttttcaagaactgtttattgattttttttccagttgatttggtcctaaaccaaagtgctttgcatagttaaggcgagtgtttgacccccgccttaccttcgaagcggtaaagtgtaaggcgagacaacaccttaatcatatataaatataggaaaatatagaaaattagtcttgaatagaagtacgaaagtaccaaacagaagtctataagttcaatataagcaaacataataggctaaaagtccaacataagtaggttctgatactctcatctctcaagttctgatacatcatcaaactcatcaaaaatgggaggattactgtcttcttcgcgttctctcccaccggatatatcatcatcttcactcacattcaagtcatctttcgcatgattggttgccgcgtcctacccgcccagactcgcggcatgcgttggccgggcgcgagcgagtgtttggttgccgcacccacgccctccggactgcatgtgcgcatgcagtttagtgctttttttcgccgttctgcctgcaagcgtggagaagccggaaattaccttcgctgggggaccaggcccgcacgaggcaggcacgtgacagaccggcaaccaatcagcccccttgtggatctggctcaaagtcttcgtccatggcacctccctcttcttcttacggcctcattcttgcatgctttctctatgtaaggccagaactttgtctctgactagcttgccttggaaggttgtgccctcgaagcgactccgatgctctagtagcaacatcaacatgatccatcatgtgaggtcaacaatattatcattgtccctgctggggtgtaccactgatgagtatccactcgttgtcccaatcaaaatcctcaataattaatgggtcatagcttgtgccggctttctccctcatttgaaacctacttcgcatcttttgattgtatgaaacatagaccaagtcattcaaccttttatgcaacaacaagtttctcttctttgtatgtatagtaagtaacaaacccaacctaaataagtagcaagaaatagattgaagctagtaaacataagcgaagtagcaaaaaatggacttacaaattcaaatgtgcttcaattcctctcacaaccggatgaggaagcacaaagtctaaccagtaaccacacgcttggcaaacctttgaaattcatatgctcggccgccatatgaacgttatcaatcaactacgcagatgcaaacagcgacacggtcacacacataggtatacaacagcaggaaagaataaaaaaagatgtgctgaaattagcaatcagccaagcatatagtactttagagggctctttgcttgaatgttttcaagtgccaacttgtttgaaaaatagaccctctatgatcttcataatgcatggcatgctcattaatcttcgaccgtatttcttcattggactccattcttgctagcacataattgaaacaactcctcagctttacaacatatctatcatctccctttggatggcaaagaattttcccaggttcaaataaagtgcagcaccatacgatggatggtccatttgtttcatccaacgaccctcaataatgtccataattttttcagcaatgcttgcttgttttgtgtagggaagctaagccttttctcttttgcaacatccattagtgctgcaatttatgtcatgtatgttttttcatctccatcaactgccctaagcactataagaagtgccaaagctctgaggcaatcttcaactgaagaccaaaaagtcttagctagaataatattacaccccccttccagcctctgtctttgccaacttgttgcagttccatgcatctcacaaaaagtgctctcaaggcatcttgatgtttatgtagacttttcaaagtaaggaatgtggcaaaacgagtggctgctggtcttaaaggatccccctcctatcttctccctcattgcacttagaattcctccatgcctataaataaaagtggtgactcttttggcttgtgcaattagtctttcaaatatccaatatcctccaccatgaggtccaaacaatgtgcagtacaaggaccctagaacaatgttaaaatactatccattagaagcctacccactgccttatatttttttctcgaatacgcaggagagctgcgtatcaattcattaatagtagaggagaaatatatatacaagaaaaaggcccacacacttgcacacacccactaggaacagaactgcaagaacatttgcgcctgttacagcacagaaacgaccctacacaacaactaaaatcggtatgccgtagcctccagaagctgcagatccttggcccctgctgcactccaacacaaaatctcatcaccagccaagcacaaggcagcagccaatcgtggaggtttgcgaccaaagacattcatttctgtgtctccacaaggtccatgcccctaagattatgagagagttaaaacctttctgaatggagcttcgcatagagctggaagaactgctccaccaatccaaaaaggaggtcgcctcaggctgaggggcaagaagtgccaaacccattcggctaagaaaaaagaaccagaactgacacgaaaagagacaggagacaagaaggcgatatagcgtttcacgttcttggtcacacaacacacaagcttcagggtgtggcagattcgtcctttcaagtcgatcagatgtccaacacctattgtgggcagccaaccacatgaagaaggcacatttaggcggcacccacaatttccagatacgctcccatggttcaaagaacaacgagctctgcatgagagcatcatatgccgatcttgctgaatatgccctgacggagagaggctccaaaaatgtctatccggcatttccagcacccctggctgaagctgcaccacgtgtatagcctctcaaataccaagaaactcttgctaactctgccaagaaataactccatggatatcgtggacccatcttgaatctgttagagcatctaggaccatccttcgattagctattctggtgggaatcatactatgtataagtggtgctagttcctttaaccgctgcctcatcaaccatctatcctcccaaaacaaggtggtgctaccatcgcctagttcagtagtcacggccatgttgaaaattccttgcacctgtttatttgcttgtagcttgaaggcagcccatggtctctgtcagcctttggctttgtggaagcagcctccttagtggtttggtatgaacctgaagaccgcctatcatccacaacctattcagggattctctggagcatgcttgcgaccttcccaaccacttttggcatgttttgggcttagttgtagctggttgcctaaactgaaaggcggctctcctccgtttagcagctgtcccggaacttggctgcacaacggagcaatcagattcattctgtcctagcctctgcccctgcacctgcccatgtactggaccaatgttataaggaaaataggcctgttcctcttcttctccaagtaagctgtcatctcttttctaatctcagtggtggtgttgaaacacatgactgtcctcatatcccccggcaaggtgttctttataccttttaattccttctttgttaccatgttgcatcggatgcatgtcaccttatcctgattccctatttctgtccaataaccgtacttccagcctgggtcattgaattttgcctctggatcttgcatggggtgataaggatcaacatcaatgggagcagcagcagcggatgcggatcagacactctccatgacaatggcttactctgtacaggtggatagtaagaaaaaggcaaaggttcagctcactaattaacatcagagagtggggaacagagcagcacggaggcccattatcttgcaccggatttaaagcagagggctgctgctaggatgctggcctgcccgccctgtctggctgcgccagcgccacccctcctgcgtggccacaccccactcctccctgtctgcgcctgcatgccttgcttggcccgtgccgcccacctcgctgtgccgcccgtcctgcctggtcacgccactcctcacccctccttcgaacagaacaggcgcaccgcgcaactcagcctttgaacagagcagcctccgcccacaaccagccgccttttcattcccttattcccataatgcgacaccctagaaccgctttacggacgtctgaggtgccagagcgactagacggtaaggaagatgccttagtgtcaatcttaaggcgggtaaatcacctcattttttctgaccgccttaccgcctaagggacgccttaatagtttgcattagagattttcccttcaatgtatttgacattttttgtaggcatctttagaagaggagaaagagtcacttaaagctaaaatatcgaagctgcaaagcaacctaagaatgggccttgaaattgaacaacatttgcaaagaaatgcacgaatattagagaaaagacaggcactgtatgatggattcctgagaaatggattgtccgaacttcaaaagttctacacatgtcaaaaggctgaaattatgaaaatattggaagaagaatcgttgcggttgatgaaagttgttgcagagattcaggataaactaactgaaatttgtatcaacactgaagttagtgaccaccctgccgatgagattcaatgttgtgacagcagttgtaaagatgtgcatgttactaaagatatcagtcctagcacatgtcgtaagagtgattatcctgctgatcttaactccgtgtcgtttgatgaatctaaagcacttgcacaagccttacaggagaagatggaagcacttatgctcttctcacaggaacaagaaagatacctattagagaaacagagagacctgattgttatcgaggaactccagaagaacttatctcaagttaaagatgaaaaggtgaaggtcctgatggaattaacaaaactaaaagaacaatatttgctattgaagggctctgctgtcaaggaaggtcatgatactggtgattcatctaaactcattcctgggcatgaccaacaagggatgctgaagactatgctgaagaggacatctttaagacactggatgaggaaagaaagtaatactattggacatgggagctctgatggaaatgatcatacagtttgcaaagaacattcagtggatgttgcaagattaagagttgaaaatgctatgcttcttgaaggtgttggtactgttgagcatctcacttcttcagtgcatagactgcatattgtgcttttgaaggcttatgatgatatcaagtcagctgatcctttggagagtacctttgaagcgctcaacagtcttataactgaagcaaaccttatgaagacagctcttaatgtggttcttcctgtaagctggtccggggattcatcagatgcaattaaatatgaagctatgtgcgatccatctgattcacctaaatcgaagtctgggaaagtagacccgctctcttctgcaggcatggagatggtggagctactaatattggctgctgagattctcaaggagagctttctggtgaagaaataaggcctccatgtaaggacgagtatggctctccttgtttgtttagaagcatgcaatttaatccttaatttttttgggtgtatatacttaaactgattgctaaaagtgcactactagattatttcggatgtagagaaagagccgaatgtgcactgtaatttacggttcgctgctattgatgtgtcttgtgttggtagactaaaggatttaagagccatgtgtacaaaattcagtttacaagcaaagatcaaagaatagacatgaactagggaaagagaaagaaaaacaaactgaaagttccatacctaaaagcgtcggcactggttgtcg

SEQ ID NO: 213279 - DNA, 6667 bp, Zea Mays
ctttctctctctctctctctctctctcgttgcccccgcatactctctgtcttgggcgctctctgtctctggtggcggcgagtagcatactctctgtcttgggcgctctgtctctggtggcgacgactcgccgccgccgccgccgcgataggccacgcctcctggtcgccatttccggatccttaccgacgacgcgcacccaccaccccatctttttccgttcctgctgtgcgacacacaaaccctagctgtatcgggtgggctgtgaaatggaccaagctgcagattcctctgaactgcttcgtcgcatcgaggagctccagcgcgaaaaggatgaaaaacagaattctttggaactattgttaagacggattgaagggctacaatatgaaatggatgaaaaagtagatcttgttgaagtgttaactcgtcaagttgaaaatctgcagcgagagcgtgatgagctcagaaaagatattgagcaattatgtatgcaacaagctgggcctggttatgtttctgttgcaactcgaatgcttactcagaggacagcagctttggaacaggatattgagaacctccagaaaaagttaggtggttgcttaagagagaatcaaaatttgcaagaggagcttgctgaagcttatcgaattaagagccagcttgctgagttacatggtgctgcactatcaaagaacaaggatcttgaaaagcaagtaagatttttccagagcagtgtcgctcaagcgtttgctgaacgggacagttcattaatggagtgtgagaaagcaaaagagcgggaagaagcagtgtcaagaaagtttgctgattttgaggaaaggatgagagaatatcaatcagagattgatgaacagaaacacttaaatgatgacttgcagagagaactgacagaactgaaggcacatacagaattgtccttgaaagttattctaaaattctatgaccttcgttgcagagactctggatgttcttcaagccttactattgaagagaagtgttcaatccttcttggtgattctgctgacaattggagttttagctctgatggcggaacctcaactttgaagacttatgcagttatgctttgttcccagtttctcattcaacatactgctcaatacatggatagaaaacatccgtattattgatggaagtcataaatttagtgctaatcttctcatttgtcctattcagtaagttatagttcagtatgattgtcatgttctatttgacctaattgtgtcatgtacttgagtaatacaacatgacttgcaggccctaatttgttttcaagaactgtttattgattttttttccagttgatttggtcctaaaccaaagtgctttgcatagttaaggcgagtgtttgacccccgccttaccttcgaagcggtaaagtgtaaggcgagacaacaccttaatcatatataaatataggaaaatatagaaaattagtcttgaatagaagtacgaaagtaccaaacagaagtctataagttcaatataagcaaacataataggctaaaagtccaacataagtaggttctgatactctcatctctcaagttctgatacatcatcaaactcatcaaaaatgggaggattactgtcttcttcgcgttctctcccaccggatatatcatcatcttcactcacattcaagtcatctttcgcatgattggttgccgcgtcctacccgcccagactcgcggcatgcgttggccgggcgcgagcgagtgtttggttgccgcacccacgccctccggactgcatgtgcgcatgcagtttagtgctttttttcgccgttctgcctgcaagcgtggagaagccggaaattaccttcgctgggggaccaggcccgcacgaggcaggcacgtgacagaccggcaaccaatcagcccccttgtggatctggctcaaagtcttcgtccatggcacctccctcttcttcttacggcctcattcttgcatgctttctctatgtaaggccagaactttgtctctgactagcttgccttggaaggttgtgccctcgaagcgactccgatgctctagtagcaacatcaacatgatccatcatgtgaggtcaacaatattatcattgtccctgctggggtgtaccactgatgagtatccactcgttgtcccaatcaaaatcctcaataattaatgggtcatagcttgtgccggctttctccctcatttgaaacctacttcgcatcttttgattgtatgaaacatagaccaagtcattcaaccttttatgcaacaacaagtttctcttctttgtatgtatagtaagtaacaaacccaacctaaataagtagcaagaaatagattgaagctagtaaacataagcgaagtagcaaaaaatggacttacaaattcaaatgtgcttcaattcctctcacaaccggatgaggaagcacaaagtctaaccagtaaccacacgcttggcaaacctttgaaattcatatgctcggccgccatatgaacgttatcaatcaactacgcagatgcaaacagcgacacggtcacacacataggtatacaacagcaggaaagaataaaaaaagatgtgctgaaattagcaatcagccaagcatatagtactttagagggctctttgcttgaatgttttcaagtgccaacttgtttgaaaaatagaccctctatgatcttcataatgcatggcatgctcattaatcttcgaccgtatttcttcattggactccattcttgctagcacataattgaaacaactcctcagctttacaacatatctatcatctccctttggatggcaaagaattttcccaggttcaaataaagtgcagcaccatacgatggatggtccatttgtttcatccaacgaccctcaataatgtccataattttttcagcaatgcttgcttgttttgtgtagggaagctaagccttttctcttttgcaacatccattagtgctgcaatttatgtcatgtatgttttttcatctccatcaactgccctaagcactataagaagtgccaaagctctgaggcaatcttcaactgaagaccaaaaagtcttagctagaataatattacaccccccttccagcctctgtctttgccaacttgttgcagttccatgcatctcacaaaaagtgctctcaaggcatcttgatgtttatgtagacttttcaaagtaaggaatgtggcaaaacgagtggctgctggtcttaaaggatccccctcctatcttctccctcattgcacttagaattcctccatgcctataaataaaagtggtgactcttttggcttgtgcaattagtctttcaaatatccaatatcctccaccatgaggtccaaacaatgtgcagtacaaggaccctagaacaatgttaaaatactatccattagaagcctacccactgccttatatttttttctcgaatacgcaggagagctgcgtatcaattcattaatagtagaggagaaatatatatacaagaaaaaggcccacacacttgcacacacccactaggaacagaactgcaagaacatttgcgcctgttacagcacagaaacgaccctacacaacaactaaaatcggtatgccgtagcctccagaagctgcagatccttggcccctgctgcactccaacacaaaatctcatcaccagccaagcacaaggcagcagccaatcgtggaggtttgcgaccaaagacattcatttctgtgtctccacaaggtccatgcccctaagattatgagagagttaaaacctttctgaatggagcttcgcatagagctggaagaactgctccaccaatccaaaaaggaggtcgcctcaggctgaggggcaagaagtgccaaacccattcggctaagaaaaaagaaccagaactgacacgaaaagagacaggagacaagaaggcgatatagcgtttcacgttcttggtcacacaacacacaagcttcagggtgtggcagattcgtcctttcaagtcgatcagatgtccaacacctattgtgggcagccaaccacatgaagaaggcacatttaggcggcacccacaatttccagatacgctcccatggttcaaagaacaacgagctctgcatgagagcatcatatgccgatcttgctgaatatgccctgacggagagaggctccaaaaatgtctatccggcatttccagcacccctggctgaagctgcaccacgtgtatagcctctcaaataccaagaaactcttgctaactctgccaagaaataactccatggatatcgtggacccatcttgaatctgttagagcatctaggaccatccttcgattagctattctggtgggaatcatactatgtataagtggtgctagttcctttaaccgctgcctcatcaaccatctatcctcccaaaacaaggtggtgctaccatcgcctagttcagtagtcacggccatgttgaaaattccttgcacctgtttatttgcttgtagcttgaaggcagcccatggtctctgtcagcctttggctttgtggaagcagcctccttagtggtttggtatgaacctgaagaccgcctatcatccacaacctattcagggattctctggagcatgcttgcgaccttcccaaccacttttggcatgttttgggcttagttgtagctggttgcctaaactgaaaggcggctctcctccgtttagcagctgtcccggaacttggctgcacaacggagcaatcagattcattctgtcctagcctctgcccctgcacctgcccatgtactggaccaatgttataaggaaaataggcctgttcctcttcttctccaagtaagctgtcatctcttttctaatctcagtggtggtgttgaaacacatgactgtcctcatatcccccggcaaggtgttctttataccttttaattccttctttgttaccatgttgcatcggatgcatgtcaccttatcctgattccctatttctgtccaataaccgtacttccagcctgggtcattgaattttgcctctggatcttgcatggggtgataaggatcaacatcaatgggagcagcagcagcggatgcggatcagacactctccatgacaatggcttactctgtacaggtggatagtaagaaaaaggcaaaggttcagctcactaattaacatcagagagtggggaacagagcagcacggaggcccattatcttgcaccggatttaaagcagagggctgctgctaggatgctggcctgcccgccctgtctggctgcgccagcgccacccctcctgcgtggccacaccccactcctccctgtctgcgcctgcatgccttgcttggcccgtgccgcccacctcgctgtgccgcccgtcctgcctggtcacgccactcctcacccctccttcgaacagaacaggcgcaccgcgcaactcagcctttgaacagagcagcctccgcccacaaccagccgccttttcattcccttattcccataatgcgacaccctagaaccgctttacggacgtctgaggtgccagagcgactagacggtaaggaagatgccttagtgtcaatcttaaggcgggtaaatcacctcattttttctgaccgccttaccgcctaagggacgccttaatagtttgcattagagattttcccttcaatgtatttgacattttttgtaggcatctttagaagaggagaaagagtcacttaaagctaaaatatcgaagctgcaaagcaacctaagaatgggccttgaaattgaacaacatttgcaaagaaatgcacgaatattagagaaaagacaggcactgtatgatggattcctgagaaatggattgtccgaacttcaaaagttctacacatgtcaaaaggctgaaattatgaaaatattggaagaagaatcgttgcggttgatgaaagttgttgcagagattcaggataaactaactgaaatttgtatcaacactgaagttagtgaccaccctgccgatgagattcaatgttgtgacagcagttgtaaagatgtgcatgttactaaagatatcagtcctagcacatgtcgtaagagtgattatcctgctgatcttaactccgtgtcgtttgatgaatctaaagcacttgcacaagccttacaggagaagatggaagcacttatgctcttctcacaggaacaagaaagatacctattagagaaacagagagacctgattgttatcgaggaactccagaagaacttatctcaagtagtacctctagaattcctacttgtcattatttttcaatcacaacgtactatatgacgagtgttctaaatagtacaagtatggtttgtcatgaagttgatacttcataccattactattttgtgcattttgctcctagctgttggaaaggtaaaactgaaccatatgattcttttcgaaagtatggattaaatgactagagttagttttgaagtttgaacttggatttttcttagggaagttcgtcaatatattatggacttgactattcacactgctaacactggtggtttgccagtagtgtcatccttgataagttgatatacagtaattagtcacatttacttctttagtatatgacctatttttaggtgtgagtttctgttgcacatcagcacac

SEQ ID NO: 213280 - DNA, 7054 bp, Zea Mays
caagcgtctactttctctctctctctctctctctctcgttgcccccgcatactctctgtcttgggcgctctctgtctctggtggcggcgagtagcatactctctgtcttgggcgctctgtctctggtggcgacgactcgccgccgccgccgccgcgataggccacgcctcctggtcgccatttccggatccttaccgacgacgcgcacccaccaccccatctttttccgttcctgctgtgcgacacacaaaccctagctgtatcgggtgggctgtgaaatggaccaagctgcagattcctctgaactgcttcgtcgcatcgaggagctccagcgcgaaaaggatgaaaaacagaattctttggaactattgttaagacggattgaagggctacaatatgaaatggatgaaaaagtagatcttgttgaagtgttaactcgtcaagttgaaaatctgcagcgagagcgtgatgagctcagaaaagatattgagcaattatgtatgcaacaagctgggcctggttatgtttctgttgcaactcgaatgcttactcagaggacagcagctttggaacaggatattgagaacctccagaaaaagttaggtggttgcttaagagagaatcaaaatttgcaagaggagcttgctgaagcttatcgaattaagagccagcttgctgagttacatggtgctgcactatcaaagaacaaggatcttgaaaagcaagtaagatttttccagagcagtgtcgctcaagcgtttgctgaacgggacagttcattaatggagtgtgagaaagcaaaagagcgggaagaagcagtgtcaagaaagtttgctgattttgaggaaaggatgagagaatatcaatcagagattgatgaacagaaacacttaaatgatgacttgcagagagaactgacagaactgaaggcacatacagaattgtccttgaaagttattctaaaattctatgaccttcgttgcagagactctggatgttcttcaagccttactattgaagagaagtgttcaatccttcttggtgattctgctgacaattggagttttagctctgatggcggaacctcaactttgaagtacattgtaaaccacccttatccattataaagaatgattcatatttaagtatgcgatctgtttttttttttgcatttgtattgcaagatacaaattctctgtggcactaaacatcatctggcgcagagccagaaaattatagatatggggacgaaatgctaaaaaataaattattagaaggcaaaatcagcattttcattgaattttatgtgcataagaggaacttatctatcataacagagtgcttgatcctccctccttccgcccctgaacatgttaatgcattgttggctaattggcttgttcagttttattctgggaactaaatgaatgcagaaggtaggaaatgatgaaactttgctggcatctgtttcaggacttatgcagttatgctttgttcccagtttctcattcaacatactgctcaatacatggatagaaaacatccgtattattgatggaagtcataaatttagtgctaatcttctcatttgtcctattcagtaagttatagttcagtatgattgtcatgttctatttgacctaattgtgtcatgtacttgagtaatacaacatgacttgcaggccctaatttgttttcaagaactgtttattgattttttttccagttgatttggtcctaaaccaaagtgctttgcatagttaaggcgagtgtttgacccccgccttaccttcgaagcggtaaagtgtaaggcgagacaacaccttaatcatatataaatataggaaaatatagaaaattagtcttgaatagaagtacgaaagtaccaaacagaagtctataagttcaatataagcaaacataataggctaaaagtccaacataagtaggttctgatactctcatctctcaagttctgatacatcatcaaactcatcaaaaatgggaggattactgtcttcttcgcgttctctcccaccggatatatcatcatcttcactcacattcaagtcatctttcgcatgattggttgccgcgtcctacccgcccagactcgcggcatgcgttggccgggcgcgagcgagtgtttggttgccgcacccacgccctccggactgcatgtgcgcatgcagtttagtgctttttttcgccgttctgcctgcaagcgtggagaagccggaaattaccttcgctgggggaccaggcccgcacgaggcaggcacgtgacagaccggcaaccaatcagcccccttgtggatctggctcaaagtcttcgtccatggcacctccctcttcttcttacggcctcattcttgcatgctttctctatgtaaggccagaactttgtctctgactagcttgccttggaaggttgtgccctcgaagcgactccgatgctctagtagcaacatcaacatgatccatcatgtgaggtcaacaatattatcattgtccctgctggggtgtaccactgatgagtatccactcgttgtcccaatcaaaatcctcaataattaatgggtcatagcttgtgccggctttctccctcatttgaaacctacttcgcatcttttgattgtatgaaacatagaccaagtcattcaaccttttatgcaacaacaagtttctcttctttgtatgtatagtaagtaacaaacccaacctaaataagtagcaagaaatagattgaagctagtaaacataagcgaagtagcaaaaaatggacttacaaattcaaatgtgcttcaattcctctcacaaccggatgaggaagcacaaagtctaaccagtaaccacacgcttggcaaacctttgaaattcatatgctcggccgccatatgaacgttatcaatcaactacgcagatgcaaacagcgacacggtcacacacataggtatacaacagcaggaaagaataaaaaaagatgtgctgaaattagcaatcagccaagcatatagtactttagagggctctttgcttgaatgttttcaagtgccaacttgtttgaaaaatagaccctctatgatcttcataatgcatggcatgctcattaatcttcgaccgtatttcttcattggactccattcttgctagcacataattgaaacaactcctcagctttacaacatatctatcatctccctttggatggcaaagaattttcccaggttcaaataaagtgcagcaccatacgatggatggtccatttgtttcatccaacgaccctcaataatgtccataattttttcagcaatgcttgcttgttttgtgtagggaagctaagccttttctcttttgcaacatccattagtgctgcaatttatgtcatgtatgttttttcatctccatcaactgccctaagcactataagaagtgccaaagctctgaggcaatcttcaactgaagaccaaaaagtcttagctagaataatattacaccccccttccagcctctgtctttgccaacttgttgcagttccatgcatctcacaaaaagtgctctcaaggcatcttgatgtttatgtagacttttcaaagtaaggaatgtggcaaaacgagtggctgctggtcttaaaggatccccctcctatcttctccctcattgcacttagaattcctccatgcctataaataaaagtggtgactcttttggcttgtgcaattagtctttcaaatatccaatatcctccaccatgaggtccaaacaatgtgcagtacaaggaccctagaacaatgttaaaatactatccattagaagcctacccactgccttatatttttttctcgaatacgcaggagagctgcgtatcaattcattaatagtagaggagaaatatatatacaagaaaaaggcccacacacttgcacacacccactaggaacagaactgcaagaacatttgcgcctgttacagcacagaaacgaccctacacaacaactaaaatcggtatgccgtagcctccagaagctgcagatccttggcccctgctgcactccaacacaaaatctcatcaccagccaagcacaaggcagcagccaatcgtggaggtttgcgaccaaagacattcatttctgtgtctccacaaggtccatgcccctaagattatgagagagttaaaacctttctgaatggagcttcgcatagagctggaagaactgctccaccaatccaaaaaggaggtcgcctcaggctgaggggcaagaagtgccaaacccattcggctaagaaaaaagaaccagaactgacacgaaaagagacaggagacaagaaggcgatatagcgtttcacgttcttggtcacacaacacacaagcttcagggtgtggcagattcgtcctttcaagtcgatcagatgtccaacacctattgtgggcagccaaccacatgaagaaggcacatttaggcggcacccacaatttccagatacgctcccatggttcaaagaacaacgagctctgcatgagagcatcatatgccgatcttgctgaatatgccctgacggagagaggctccaaaaatgtctatccggcatttccagcacccctggctgaagctgcaccacgtgtatagcctctcaaataccaagaaactcttgctaactctgccaagaaataactccatggatatcgtggacccatcttgaatctgttagagcatctaggaccatccttcgattagctattctggtgggaatcatactatgtataagtggtgctagttcctttaaccgctgcctcatcaaccatctatcctcccaaaacaaggtggtgctaccatcgcctagttcagtagtcacggccatgttgaaaattccttgcacctgtttatttgcttgtagcttgaaggcagcccatggtctctgtcagcctttggctttgtggaagcagcctccttagtggtttggtatgaacctgaagaccgcctatcatccacaacctattcagggattctctggagcatgcttgcgaccttcccaaccacttttggcatgttttgggcttagttgtagctggttgcctaaactgaaaggcggctctcctccgtttagcagctgtcccggaacttggctgcacaacggagcaatcagattcattctgtcctagcctctgcccctgcacctgcccatgtactggaccaatgttataaggaaaataggcctgttcctcttcttctccaagtaagctgtcatctcttttctaatctcagtggtggtgttgaaacacatgactgtcctcatatcccccggcaaggtgttctttataccttttaattccttctttgttaccatgttgcatcggatgcatgtcaccttatcctgattccctatttctgtccaataaccgtacttccagcctgggtcattgaattttgcctctggatcttgcatggggtgataaggatcaacatcaatgggagcagcagcagcggatgcggatcagacactctccatgacaatggcttactctgtacaggtggatagtaagaaaaaggcaaaggttcagctcactaattaacatcagagagtggggaacagagcagcacggaggcccattatcttgcaccggatttaaagcagagggctgctgctaggatgctggcctgcccgccctgtctggctgcgccagcgccacccctcctgcgtggccacaccccactcctccctgtctgcgcctgcatgccttgcttggcccgtgccgcccacctcgctgtgccgcccgtcctgcctggtcacgccactcctcacccctccttcgaacagaacaggcgcaccgcgcaactcagcctttgaacagagcagcctccgcccacaaccagccgccttttcattcccttattcccataatgcgacaccctagaaccgctttacggacgtctgaggtgccagagcgactagacggtaaggaagatgccttagtgtcaatcttaaggcgggtaaatcacctcattttttctgaccgccttaccgcctaagggacgccttaatagtttgcattagagattttcccttcaatgtatttgacattttttgtaggcatctttagaagaggagaaagagtcacttaaagctaaaatatcgaagctgcaaagcaacctaagaatgggccttgaaattgaacaacatttgcaaagaaatgcacgaatattagagaaaagacaggcactgtatgatggattcctgagaaatggattgtccgaacttcaaaagttctacacatgtcaaaaggctgaaattatgaaaatattggaagaagaatcgttgcggttgatgaaagttgttgcagagattcaggataaactaactgaaatttgtatcaacactgaagttagtgaccaccctgccgatgagattcaatgttgtgacagcagttgtaaagatgtgcatgttactaaagatatcagtcctagcacatgtcgtaagagtgattatcctgctgatcttaactccgtgtcgtttgatgaatctaaagcacttgcacaagccttacaggagaagatggaagcacttatgctcttctcacaggaacaagaaagatacctattagagaaacagagagacctgattgttatcgaggaactccagaagaacttatctcaagtagtacctctagaattcctacttgtcattatttttcaatcacaacgtactatatgacgagtgttctaaatagtacaagtatggtttgtcatgaagttgatacttcataccattactattttgtgcattttgctcctagctgttggaaaggtaaaactgaaccatatgattcttttcgaaagtatggattaaatgactagagttagttttgaagtttgaacttggatttttcttagggaagttcgtcaatatattatggacttgactattcacactgctaacactggtggtttgccagtagtgtcatccttgataagttgatatacagtaattagtcacatttacttctttagtatatgacctatttttaggtgtgagtttctgttgcacatcagcacac

SEQ ID NO: 213281 - DNA, 1883 bp, Zea Mays
gtatgctactcgctccttcataacttcgaaggtacagtgacacgttttatatagcgcacgcaccttctttcgccacccataccatctgcatcaaaatcaaatgtttgtatagttaaaaacaatatagtaattggattagaatgaatagaatatgtagtagttgatatagagggaatatatagcccctatttgtttcagttttttggaccttctagccaccaaaagctgctgcggactgtcaaacgctaaggttttcagtcagcttctataaaatttgtttgggtaaaaaccattcaaaatcaacataaacacataatcagttaagtcgttacaatagtaggaatccttcactttttagatccagagttctatgaacacctatatcttccttcgcacgtaatccaatgatactcagattctctacacagtcagattcttctcacagccagattatcagaaaagctggtcagaaaaaagctgaaccaaacaggcccatagaggaatatgagtgtggaggattgtaacacagagtaaaaaaatttaatgactaaattataaataaaaatatagagccttaccaccggcctcgtcgatcgcggagtgcgccctagccacatcgccgccaccctcgccctcaacaggtgttgctctctacctacgaggaggaagtggagcagatgggtggtgggtcaggatctcaaggtggcggtagcaacaacgacagggggagcaaatcgatttctgacagaaaaaacagaacgagtgggtaaaccttgcgatttttcattgccgcaagttcttggatctaaacaagcctggaaaaaataaaggaaaataacaaggcgttgttgggatggattgatgaggacaattctcacgaacgattgaactgccgctcagctcacctgacagatctgtctgtgcgtaagtgccggtaaatctcttctcttccttgctcctccctccgtcacatggattagttgtcgatctcgattcttgttattgcccccttccttgctcctcctccctcctccctcagtcacatttttatagagaggttccaactttcttttttatttcaatcaagattcaattttccattgaatggttgattttatcagctacaacttttatagatgtaaaacattattcggtgtttctggtactattagtttatatgagtttacaatttcacattgtaatctgaatacgatcaagatacttagtttattttcctatgttgaaggtatacaaataccttccaagagtaccacccagtgcaggcaacgttctcggtcaaataaagcgccattaaggaatcacttgcataaattgttgccttcgaggtgccatacttgataaagaatggaactggcaaagcttttggatcgtgtgccaatacctgtgaaagagggcttggaggaacccagtgcaaagatcaatggtctgctgcaagcgtatatttctaggttgaaactagaaggcctttctcttagttctgacatcgtctacattagacaggtataatgatgttttcctacacttgtagtcagtggcgggcttggacctaaatcgatcagaggcccatcattaaagaacaagtcatagctcctcaagaagtcaagatgtggcggtctatggtgccctttgtgcacttgcttcttttgaccgttcagacctgaagaacaaagtcatcgacaatatcaacttccgtaactttctagagctggtgcctgaagtaagggagctggttaatgattttaatgcaagtcgctatggatcttgcttgggtcatctggagaagctaaagcctaacctgctcctggatatccatttgcacgagcatgtagagagtctgtatatggatattcgccacaaagcga

SEQ ID NO: 213282 - DNA, 2211 bp, Zea Mays
cctgtcctgactcctccatgtctctcacttccctcacttctcggctttgacctcggctcgcaatgaactctctcctgcgtccgccgctgccgggcccgacgccgagcctgagcgcgagacgcatggtctcgccgccgccagcgccggtgcgggtcagctcggcggcgctggccggcagcgggcgcagatgccggctggggctggcagtggcggcgtcggcggctccgtcgtggatggaggaggccggggtggccgtgctggaggaaggcgggcggaggaacccgtctgtgtcggactcgtaccgccctgctgggctgccgcggcccaacgccacggtgctggaggcgcaggcgcgggtgtgcacgggccccgcacagacgcgcccgctcggggaggagcaggccatgcgcgtcctcgacactatcctccgctccgcaatgggagaactcaaagaggagccagtctctagtgcacagttaggtgcattctttgcaggcatgacaataagatccaactcgtttccagaggccacacagtggagcgagggtgaacggcgtgccatgagcatattttggccacgccttgtacaaattcttcctccggaggtgaagtttatagcagaccctgaagggacgatcatgggtgcaaatggtttaacagggcctcggtatgttggtcaaggaactggagagatgagactagtcggtgctctgagggaagtgcttgctggtggccatttaggctatgaggaggttcaatgtgtgctaaaggatattttaccaattggaccgagttcagatttgacagtgactagtgaagcattgctggcagcatttttgattggacaacggatgaatagagaaactgatcgtgagctcaaagcgtattgcctagcctttgatgatgaactaggtcctcctctggttgctgacgtcaagtccttgacacactatggtgaaccatatgatggcaatacacggttttttagaagtactctatttgttgcagcggttcgagcctgctatagtgaatcatgcctcctccatggtgttcaatggatgccacccaagaaggacaaatgcttaaattcatgggcgcaaacatacacttatctccaacacaagccaagatactgttggaggatgagactgctggttttgcatatttgaatcttcaggaagcatgtccaccattatattcaattattgggctcagggagcatattaagaaacggccaccattggctacctctgagaaagttcaacaatttgtgagggcacgggggagagaatcaatggttgcaggattttatcacgaaggctatgaagatccattgcttatgctgatgagaaggagaactgttcatgctggactagttgtgaagggtgaggaaggtgcgctttccttgacaaccaaggaaagatcagcccatgcatcaaaaggactccctgttaaccactgttcagggtttcggacaccaagcggcataaatttctctgagactgatggtattcctagagaaagcttcagggtcattgtgaatgcccaggaacttggttttgaatccactgaaactccaagaactgatagatcaattctaaggaacttggagcttggtctggcagcactaggtggcgaaaaaggagcagcgtatgaccgaatcgttcttaacgcggctatggctgaccacttactaggctgcagcggagctgaggatatcgacgctgcacttgaccgagcgagggaagccattggtagcggtgaagctctgagaaggctcatgagttacataaagatctcgcacaaagtgtcctagtgttgacccgtgagtctgtgaccatgtactgactgtacaattttggcgtgagtcacgactggatatcttcttcgcgttgtctgagtgccttccccactcaatgttacaaagccaccatgaaaaagtatactcccttgccctcaaggacatgtccaaaaaaaacagttgaaaggaaacaatgccttgttggcaaggaatgtgtttttataagatttttgttttgcaccgagagacacgtacagattctcctcttgagatgtccgaatctggttattgtggctattgtgaatactctgcatagcctcatcgtcaatcgtcatccaggttgagaacttgtaaaccgtatttgattttgtttatgaatgtatgtgctcttctttatgttgtgtatcgtg

SEQ ID NO: 213283 - DNA, 2231 bp, Zea Mays
cctgtcctgactcctccatgtctctcacttccctcacttctcggctttgacctcggctcgcaatgaactctctcctgcgtccgccgctgccgggcccgacgccgagcctgagcgcgagacgcatggtctcgccgccgccagcgccggtgcgggtcagctcggcggcgctggccggcagcgggcgcagatgccggctggggctggcagtggcggcgtcggcggctccgtcgtggatggaggaggccggggtggccgtgctggaggaaggcgggcggaggaacccgtctgtgtcggactcgtaccgccctgctgggctgccgcggcccaacgccacggtgctggaggcgcaggcgcgggtgtgcacgggccccgcacagacgcgcccgctcggggaggagcaggccatgcgcgtcctcgacactatcctccgctccgcaatgggagaactcaaagaggagccagtctctagtgcacagttaggtgcattctttgcaggcatgacaataagatccaactcgtttccagaggccacacagtggagcgagggtgaacggcgtgccatgagcatattttggccacgccttgtacaaattcttcctccggaggtgaagtttatagcagaccctgaagggacgatcatgggtgcaaatggtttaacagggcctcggtatgttggtcaaggaactggagagatgagactagtcggtgctctgagggaagtgcttgctggtggccatttaggctatgaggaggttcaatgtgtgctaaaggatattttaccaattggaccgagttcagatttgacagtgactagtgaagcattgctggcagcatttttgattggacaacggatgaatagagaaactgatcgtgagctcaaagcgtattgcctagcctttgatgatgaactaggtaactccagaaaaaactaggtcctcctctggttgctgacgtcaagtccttgacacactatggtgaaccatatgatggcaatacacggttttttagaagtactctatttgttgcagcggttcgagcctgctatagtgaatcatgcctcctccatggtgttcaatggatgccacccaagaaggacaaatgcttaaattcatgggcgcaaacatacacttatctccaacacaagccaagatactgttggaggatgagactgctggttttgcatatttgaatcttcaggaagcatgtccaccattatattcaattattgggctcagggagcatattaagaaacggccaccattggctacctctgagaaagttcaacaatttgtgagggcacgggggagagaatcaatggttgcaggattttatcacgaaggctatgaagatccattgcttatgctgatgagaaggagaactgttcatgctggactagttgtgaagggtgaggaaggtgcgctttccttgacaaccaaggaaagatcagcccatgcatcaaaaggactccctgttaaccactgttcagggtttcggacaccaagcggcataaatttctctgagactgatggtattcctagagaaagcttcagggtcattgtgaatgcccaggaacttggttttgaatccactgaaactccaagaactgatagatcaattctaaggaacttggagcttggtctggcagcactaggtggcgaaaaaggagcagcgtatgaccgaatcgttcttaacgcggctatggctgaccacttactaggctgcagcggagctgaggatatcgacgctgcacttgaccgagcgagggaagccattggtagcggtgaagctctgagaaggctcatgagttacataaagatctcgcacaaagtgtcctagtgttgacccgtgagtctgtgaccatgtactgactgtacaattttggcgtgagtcacgactggatatcttcttcgcgttgtctgagtgccttccccactcaatgttacaaagccaccatgaaaaagtatactcccttgccctcaaggacatgtccaaaaaaaacagttgaaaggaaacaatgccttgttggcaaggaatgtgtttttataagatttttgttttgcaccgagagacacgtacagattctcctcttgagatgtccgaatctggttattgtggctattgtgaatactctgcatagcctcatcgtcaatcgtcatccaggttgagaacttgtaaaccgtatttgattttgtttatgaatgtatgtgctcttctttatgttgtgtatcgtg

SEQ ID NO: 213284 - DNA, 2244 bp, Zea Mays
cctgtcctgactcctccatgtctctcacttccctcacttctcggctttgacctcggctcgcaatgaactctctcctgcgtccgccgctgccgggcccgacgccgagcctgagcgcgagacgcatggtctcgccgccgccagcgccggtgcgggtcagctcggcggcgctggccggcagcgggcgcagatgccggctggggctggcagtggcggcgtcggcggctccgtcgtggatggaggaggccggggtggccgtgctggaggaaggcgggcggaggaacccgtctgtgtcggactcgtaccgccctgctgggctgccgcggcccaacgccacggtgctggaggcgcaggcgcgggtgtgcacgggccccgcacagacgcgcccgctcggggaggagcaggccatgcgcgtcctcgacactatcctccgctccgcaatgggagaactcaaagaggagccagtctctagtgcacagttaggtgcattctttgcaggcatgacaataagatccaactcgtttccagaggccacacagtggagcgagggtgaacggcgtgccatgagcatattttggccacgccttgtacaaattcttcctccggaggtgaagtttatagcagaccctgaagggacgatcatgggtgcaaatggtttaacagggcctcggtatgttggtcaaggaactggagagatgagactagtcggtgctctgagggaagtgcttgctggtggccatttaggctatgaggaggttcaatgtgtgctaaaggatattttaccaattggaccgagttcagatttgacagtgactagtgaagcattgctggcagcatttttgattggacaacggatgaatagagaaactgatcgtgagctcaaagcgtattgcctagcctttgatgatgaactaggtaactccagaaaaaactaggtcctcctctggttgctgacgtcaagtccttgacacactatggtgaaccatatgatggcaatacacggttttttagaagtactctatttgttgcagcggttcgagcctgctatagtgaatcatgcctcctccatggtgttcaatggatgccacccaagggtggaataacagaaggacaaatgcttaaattcatgggcgcaaacatacacttatctccaacacaagccaagatactgttggaggatgagactgctggttttgcatatttgaatcttcaggaagcatgtccaccattatattcaattattgggctcagggagcatattaagaaacggccaccattggctacctctgagaaagttcaacaatttgtgagggcacgggggagagaatcaatggttgcaggattttatcacgaaggctatgaagatccattgcttatgctgatgagaaggagaactgttcatgctggactagttgtgaagggtgaggaaggtgcgctttccttgacaaccaaggaaagatcagcccatgcatcaaaaggactccctgttaaccactgttcagggtttcggacaccaagcggcataaatttctctgagactgatggtattcctagagaaagcttcagggtcattgtgaatgcccaggaacttggttttgaatccactgaaactccaagaactgatagatcaattctaaggaacttggagcttggtctggcagcactaggtggcgaaaaaggagcagcgtatgaccgaatcgttcttaacgcggctatggctgaccacttactaggctgcagcggagctgaggatatcgacgctgcacttgaccgagcgagggaagccattggtagcggtgaagctctgagaaggctcatgagttacataaagatctcgcacaaagtgtcctagtgttgacccgtgagtctgtgaccatgtactgactgtacaattttggcgtgagtcacgactggatatcttcttcgcgttgtctgagtgccttccccactcaatgttacaaagccaccatgaaaaagtatactcccttgccctcaaggacatgtccaaaaaaaacagttgaaaggaaacaatgccttgttggcaaggaatgtgtttttataagatttttgttttgcaccgagagacacgtacagattctcctcttgagatgtccgaatctggttattgtggctattgtgaatactctgcatagcctcatcgtcaatcgtcatccaggttgagaacttgtaaaccgtatttgattttgtttatgaatgtatgtgctcttctttatgttgtgtatcgtg

SEQ ID NO: 213285 - DNA, 2232 bp, Zea Mays
cctgtcctgactcctccatgtctctcacttccctcacttctcggctttgacctcggctcgcaatgaactctctcctgcgtccgccgctgccgggcccgacgccgagcctgagcgcgagacgcatggtctcgccgccgccagcgccggtgcgggtcagctcggcggcgctggccggcagcgggcgcagatgccggctggggctggcagtggcggcgtcggcggctccgtcgtggatggaggaggccggggtggccgtgctggaggaaggcgggcggaggaacccgtctgtgtcggactcgtaccgccctgctgggctgccgcggcccaacgccacggtgctggaggcgcaggcgcgggtgtgcacgggccccgcacagacgcgcccgctcggggaggagcaggccatgcgcgtcctcgacactatcctccgctccgcaatgggagaactcaaagaggagccagtctctagtgcacagttaggtgcattctttgcaggcatgacaataagatccaactcgtttccagaggccacacagtggagcgagggtgaacggcgtgccatgagcatattttggccacgccttgtacaaattcttcctccggaggtgaagtttatagcagaccctgaagggacgatcatgggtgcaaatggtttaacagggcctcggtatgttggtcaaggaactggagagatgagactagtcggtgctctgagggaagtgcttgctggtggccatttaggctatgaggaggttcaatgtgtgctaaaggatattttaccaattggaccgagttcagatttgacagtgactagtgaagcattgctggcagcatttttgattggacaacggatgaatagagaaactgatcgtgagctcaaagcgtattgcctagcctttgatgatgaactaggtcctcctctggttgctgacgtcaagtccttgacacactatggtgaaccatatgatggcaatacacggttttttagaagtactctatttgttgcagcggttcgagcctgctatagtgaatcatgcctcctccatggtgttcaatggatgccacccaaggttttcagggtggaataacagaaggacaaatgcttaaattcatgggcgcaaacatacacttatctccaacacaagccaagatactgttggaggatgagactgctggttttgcatatttgaatcttcaggaagcatgtccaccattatattcaattattgggctcagggagcatattaagaaacggccaccattggctacctctgagaaagttcaacaatttgtgagggcacgggggagagaatcaatggttgcaggattttatcacgaaggctatgaagatccattgcttatgctgatgagaaggagaactgttcatgctggactagttgtgaagggtgaggaaggtgcgctttccttgacaaccaaggaaagatcagcccatgcatcaaaaggactccctgttaaccactgttcagggtttcggacaccaagcggcataaatttctctgagactgatggtattcctagagaaagcttcagggtcattgtgaatgcccaggaacttggttttgaatccactgaaactccaagaactgatagatcaattctaaggaacttggagcttggtctggcagcactaggtggcgaaaaaggagcagcgtatgaccgaatcgttcttaacgcggctatggctgaccacttactaggctgcagcggagctgaggatatcgacgctgcacttgaccgagcgagggaagccattggtagcggtgaagctctgagaaggctcatgagttacataaagatctcgcacaaagtgtcctagtgttgacccgtgagtctgtgaccatgtactgactgtacaattttggcgtgagtcacgactggatatcttcttcgcgttgtctgagtgccttccccactcaatgttacaaagccaccatgaaaaagtatactcccttgccctcaaggacatgtccaaaaaaaacagttgaaaggaaacaatgccttgttggcaaggaatgtgtttttataagatttttgttttgcaccgagagacacgtacagattctcctcttgagatgtccgaatctggttattgtggctattgtgaatactctgcatagcctcatcgtcaatcgtcatccaggttgagaacttgtaaaccgtatttgattttgtttatgaatgtatgtgctcttctttatgttgtgtatcgtg

SEQ ID NO: 213286 - DNA, 1049 bp, Zea Mays
atttcttcatgttcctgtagggatgcaatcatgaacttttcttgttaaaactgcaagaaacatatattcaattattgggctcagggagcatattaagaaacggccaccattggctacctctgagaaagttcaacaatttgtgagggcacgggggagagaatcaatggttgcaggattttatcacgaaggctatgaagatccattgcttatgctgatgagaaggagaactgttcatgctggactagttgtgaagggtgaggaaggtgcgctttccttgacaaccaaggaaagatcagcccatgcatcaaaaggactccctgttaaccactgttcagggtttcggacaccaagcggcataaatttctctgagactgatggtattcctagagaaagcttcagggtcattgtgaatgcccaggaacttggttttgaatccactgaaactccaagaactgatagatcacactaggtggcgaaaaaggagcagcgtatgaccgaatcgttcttaacgcggctatggctgaccacttactaggctgcagcggagctgaggatatcgacgctgcacttgaccgagcgagggaagccattggtagcggtgaagctctgagaaggctcatgagttacataaagatctcgcacaaagtgtcctagtgttgacccgtgagtctgtgaccatgtactgactgtacaattttggcgtgagtcacgactggatatcttcttcgcgttgtctgagtgccttccccactcaatgttacaaagccaccatgaaaaagtatactcccttgccctcaaggacatgtccaaaaaaaacagttgaaaggaaacaatgccttgttggcaaggaatgtgtttttataagatttttgttttgcaccgagagacacgtacagattctcctcttgagatgtccgaatctggttattgtggctattgtgaatactctgcatagcctcatcgtcaatcgtcatccaggttgagaacttgtaaaccgtatttgattttgtttatgaatgtatgtgctcttctttatgttgtgtatcgtg

SEQ ID NO: 213287 - DNA, 930 bp, Zea Mays
atcgcccgtccacttcaatttccatctctctgggcactccggcggaacgaagaacgcccacggatccgaggaacaagccgtctttgtgggctttaggtatacgagaatgcagatcttcgtgaggagccccagcggcaagatgatttgcctcagggtccaacctgacgataccttgcatacacatcaatccacgcttgacctccaagaaaagatgcaaatctatgtgaaggagacgctaaaaggcctaaccatcactcttgatgttgatagcttagatactattgacatcataaaggacaagattgaatacaacgagggatttcccaagggtcggcaatgcctcatctttggcgacgaacagctagagggcaagtacaccttggcggactacaacatttgcaacgagtccacgcttctccttgtcatccacccatgtacaagtacaagtgacgcaatgcagatctttgtgaagatgcaaaacggaaagaccaccactgttagggtcgacagctcagataccgtcaacagtatcacggtgaagatctatgaaatggagggcatcccacccctagaacagcgcatcatctttcgcggcaggcgtcttgagggcagacgcaccctggcggactacggcatccagaaggaggaaaccctccatctgatgctttgcctttgtggctggtgatgagactgatgccatgcatgcatgcatggtcattcaatattactactagtggtttgttatcagtaaaaagtatcattaattatagggatgccgtgtcatttagctaaaggtctttcttaccaggagagttctgtcatcagtaaaagtttttattgtggtacgtcagtgtgtgacatcttatatcaagagtttttttttatttacaaatatagctagtcagcagcttcaacttgcgcgtgtctcca

SEQ ID NO: 213288 - DNA, 2052 bp, Zea Mays
gcggcaggtattcactggatcttcatgagaaagaagaaattgctgaggaaattgcacgtttaaagattggtatgagtgccttggcagatgctaagaagactacgaagggagttgctgcccaacttctggattccgtcaacaagctggaaagtaacatgaaaaccaacttggaaagggctatgaaggagaatgatcgtgtttacttgatgcgggttccagctgctggttccttgggtgccctccctgcagcgtcccttgtaaaacctacctctttggctgaagttttagatgccagcaaggaaaggcttttttcatcacttgtgcctgatggcagcatgaaagcactttctaagtacacagagatggtagataatagtatccggacccaggctgagaaattgcagcaagctagtgagatcactagagtcaggctgaaggaaatggacttaccagattctattctttcattggaaggaaatataaccttgcccatggatctgaaggaagacgtagaggctgtgcagataagcggtggccctgctggcttagaatctgagttgcagcaacttagggatttgagcagggtcaatcaggaactacttgtccagactgaagagcttctacagaaggaggcgaatgaagacgctcaatttcgtacacaatttgggagtcgttggactagacctcaatcaagcaccctaacaaagaatattcaggatagattgaatctgtttgcttctaatttgaagagagctgctgatagtgattctctgattgaacgaggcgtgaaggagaactattcattgatgtctatccttgacaaaaggccgatagagtctgcacttccaagtatttccaggcctatcatgtccttggatggaaatgaagatgccattgttggagccctgaaacaaagcttgagacaactggagtctcttggcgcacaaagggcaggtcttgaagacatgctcaaagaaatgaaaagaaaggatgatatattgcctaagttgatggttggcgtgggatcacatgatgatcttttcaagaaggagattgctaagtatgatcctatatgtgctgatattgctgataacattgtggcacaggaacaattgttgctacaaatacaggcacaaaacgagcaatttgctgctgtattcaacctagaggattacaaagctgcccgtgagagatgttacaagcaaatcgctgctgctgttgtgaaataccaggagtttaaaaagaacatcaacgagggcctaaacttttatgtgactttacaggaagcaattggcaaaataaaacagcagtgcagcgacttcataatgacccgaaacattcagtgccgtgaaatgatggaagatgtgcagaggaagctacccggcttcagattctcgtcgtccagccgctcctctatgcagaggaatgctgcttctgtgccacctgacgagagcagcccatcaccgccaccgccgcatgcccaggctccctatgcctctccaccaggggtagactcgaggcatggatattctcaaccggaggcaagacctgcatactcgcagccataccccccatcctatggggcgacaccgcaacagccgacgtatggtgcacaacaccccgggcagtaccagccgcctcctggccatgactgcggtcagccggcatatcctggatggcgcgggccatacccatactacaatgccccccagccgcagcaatctgtgccttgtccacaggcgccgtacaatgccactggggcttaccctccgcaccagagcaactattaccgacctcaataagtgctgcaactatttcttattattttgcttcttttttttccattgggtcttaccattctggtgtactactactgcatacgagagagttcgggtagtgtaatagcaggtatagctttgtatgatttagtggcggacccagaaagacccggtccgaagcgaccataaactataatatagtagcatataaaaaattgtacggcgaaacaatgttgtcatagatattaaagatgacatacaagttatgatgtag

SEQ ID NO: 213289 - DNA, 3167 bp, Zea Mays
gacaccagccgccacctaccccgcgcgacaacgcccgtgatgcccgccgccgcctaccccgcgcgacaccaccaatggtgcccttccttccccggcacccgcaacccgccagctccgcgcgagccgccggcgggatacccgcctcccccgcgcccccgccagctccgcgcgaggcgccagctccgcgcgtccgccgcagtgatgccgcgcgatgaaggccgcacgggagagacgctgggaaagccgctccttccggcgttgcagtgggggcgtccacagctgtgccatgcccccgccccgtccgagacgccgaccacgacccaggattctcgcttcccgtccacgtccgtgattttcccagcgaagctgaccacgcctccctgtacgcacctcccgacatcctcgccgacatgctcgcactcctgtccccgtctgagatcctcgcgtcggcgccttcggtggaagtccggaatcgcccggctctcctccaccgcgccgccagcctcactgagaagagttcatctgcctcctcctcaacgcttgaccccaccgccgctggatccaacaccctgccctcgtccttcttctccgacctactcaccagtgacgacgtgggcaccctggccagacgcacgccatggacagcaggtgggcaggaacaccttctacgtggatcctcttctcccgtgctcctcgacgcacgagagcgagctcggactggatcctctcctaccgctccatgcaggtgctcctccgcccgatcccaatgtaaaacctacagttttgttagatgttgctgccactgtttggagaagactcgcgctagaaagcggtactgggtgaaaactgcagagcgatctagagctcgcaagcctgccattgctctctgtagcaatagaaatcccccaacccacccacccacacaagttgcaattgccctcttacatctattttttggtggaacaactaaattgacattgaagaagttttttggagtgtgctcgttctgcaattagaagacttctggagagttctataattattctggtttgtagtccgtgaatttatagtggattgcttgagatactgggtaacaggaatgcatgtttatgattttcgttttgaccttgcattgcatctacaatgaccagaggatgcagtctatggatccagttaatgtgtatggaaatccaatggaaggtgacatgattacaacagggacacctcttgttgtcccaccacttattgacatgattagcaatgacccaatttttgcccattgctgaagatgggatgcaggaggcctctatcaagtaggtcaattacctcattaacagggacacctcttgttgccccaccacttattgatatgattagcaatgacccaattttttgctcattgctgaagcatgggatgcaggaggcctctatcaagtaggtcaatttcctcactagaatgtttggttagagtggaatgtaaaggtctggacactctatgaattcgatgatctcgagagcatcattgataggacactaaagcgcgattttgacaccgaggaagcactctggttgcttaagataggtcttgtgtgcatcccggatagccctaagatcaagccctccatgtcaatggttgccaagatgctgcaaggtgagtgtgctgtgagtgacaggatcatgaggcctggcctgatcacagacgtcatggacctgaaagtcaggatggtagagccgatttagttcagcttgacatcatgctcgagcactgccgcaccggaccttgttggggatttcctcgattaaaatataagctccttgatatggttctgtaacatagttctgcaatgctcctttatttagttctttactttttttgttaagatatgaggtgtagcgatacaatatgtctactaacagcgtttgtgttcttgatagttcatttaggattgaatgaagttactggtatgaccttgtcgagactgaagtaaggagggatagagctaaaaactctcttggcacaactataaagttcaagctatatgggcgtgtttggatggcagcctcccatgcaactgcctggcaggcaaatgatcctagccacaccacaggcataggaaatcgaacggtcggcattgtttcctgggccagctgataaaatccattgaagtgcaagaggccgataaacttaggcgtatagtgctggatgctccatccactggacatacacttaagcttctgtcagtttctgattggattgaaatgttccttactttgagcattaaggacacatgaggtgtagctattgggcctctaacttggttatcatggttttgggccgtgggtagagcaggcaatgcaagtgcagtctggcacaatcctggtggtttggcattgatgtttcttttcacagtttgcgcttgcgaacatccgaaccccgttttcatcttgaattcaacttatgatgtatatcggacagttccaccacattctggcgccgccttcgtctgatcctggaggcaattggagccgctgcaagtcggatcctggtggatgcagcgcaacacagatcgcaaccctccaaggactgagaagtggaatgttgacatctctgagacagtctgaaagcaaaccgaaggcaggggtgttcatcaactcctgcttcgcgcattgctagagtgagctacaggacacatggttcgcaccaaattctccatccatatataacaagaaaattgcagaggtggtaggtgattggtactttgaaagaggagctgacgtggagattgactgcgcctatccctgtgattcacagtcttgtcgcaaccttataccaattgataaggctgaccatcctagattaaacttcaaagaccggtaccctgagccatacagagattctcatccgactgcccccgttgctgtgcatggatgtcaggtgtcattactgtaatgtagtggtgaaataggtagattaaaacaatgaaatttatatgtggctaggatcataaatgaattgcaaaattttttctcagaacagtataacacatatttgtacataagttgttgtgttattatatgtttccgttgcaacgcacgggcactcacctagtatatatatatatatatatatatatattacacctgggtgcattcaatatagagaatgc

SEQ ID NO: 213290 - DNA, 3150 bp, Zea Mays
gggatacccgcctcccccgcgcccccgccagctccgcgcgaggcgccagctccgcgcgtccgccgcagtgatgccgcgcgatgaaggccgcacgggagagacgctgggaaagccgctccttccggcgttgcagtgggggcgtccacagctgtgccatgcccccgccccgtccgagacgccgaccacgacccaggattctcgcttcccgtccacgtccgtgattttcccagcgaagctgaccacgcctccctgtacgcacctcccgacatcctcgccgacatgctcgcactcctgtccccgtctgagatcctcgcgtcggcgccttcggtggaagtccggaatcgcccggctctcctccaccgcgccgccagcctcactgagaagagttcatctgcctcctcctcaacgcttgaccccaccgccgctggatccaacaccctgccctcgtccttcttctccgacctactcaccagtgacgacgtgggcaccctggccagacgcacgccatggacagcaggtgggcaggaacaccttctacgtggatcctcttctcccgtgctcctcgacgcacgagagcgagctcggactggatcctctcctaccgctccatgcaggtgctcctccgcccgatcccaatgtaaaacctacagttttgttagatgttgctgccactgtttggagaagactcgcgctagaaagcggtactgggtgaaaactgcagagcgatctagagctcgcaagcctgccattgctctctgtagcaatagaaatcccccaacccacccacccacacaagttgcaattgccctcttacatctattttttggtggaacaactaaattgacattgaagaagttttttggagtgtgctcgttctgcaattagaagacttctggagagttctataattattctggtttgtagtccgtgaatttatagtggattgcttgagatactgggtaacaggaatgcatgtttatgattttcgttttgaccttgcattgcatctacaatgaccagaggatgcagtctatggatccagttaatgtgtatggaaatccaatggaaggtgacatgattacaacagggacacctcttgttgtcccaccacttattgacatgattagcaatgacccaatttttgcccattgctgaagatgggatgcaggaggcctctatcaagtaggtcaattacctcattaacagggacacctcttgttgccccaccacttattgatatgattagcaatgacccaattttttgctcattgctgaagcatgggatgcaggaggcctctatcaagtaggtcaatttcctcactagaatgtttggttagagtggaatgtaaaggtctggacactctatgaattcgatgatctcgagagcatcattgataggacactaaagcgcgattttgacaccgaggaagcactctggttgcttaagataggtcttgtgtgcatcccggatagccctaagatcaagccctccatgtcaatggttgccaagatgctgcaaggtgagtgtgctgtgagtgacaggatcatgaggcctggcctgatcacagacgtcatggacctgaaagtcaggatggtagagccgatttagttcagcttgacatcatgctcgagcactgccgcaccggaccttgttggggatttcctcgattaaaatataagctccttgatatggttctgtaacatagttctgcaatgctcctttatttagttctttactttttttgttaagatatgaggtgtagcgatacaatatgtctactaacagcgtttgtgttcttgatagttcatttaggattgaatgaagttactggtatgaccttgtcgagactgaagtaaggagggatagagctaaaaactctcttggcacaactataaagttcaagctatatgggcgtgtttggatggcagcctcccatgcaactgcctggcaggcaaatgatcctagccacaccacaggcataggaaatcgaacggtcggcattgtttcctgggccagctgataaaatccattgaagtgcaagaggccgataaacttaggcgtatagtgctggatgctccatccactggacatacacttaagcttctgtcagtttctgattggattgaaatgttccttactttgagcattaaggcaatgcaagtgcagtctggcacaatcctggtggtttggcattgagttatgttttcttttacttgataaaacaatcttgttccatcacttagtcaatagctcaatatgtccaccagttctgatgatccatgtctgcgcagtgtttcttttcacagtttgcgcttgcgaacatccgaaccccgttttcatcttgaattcaacttatgatgtatatcggacagttccaccacattctggcgccgccttcgtctgatcctggaggcaattggagccgctgcaagtcggatcctggtggatgcagcgcaacacagatcgcaaccctccaaggactgagaagtggaatgttgacatctctgagacagtctgaaagcaaaccgaaggcaggggtgttcatcaactcctgcttcgcgcattgctagagtgagctacaggacacatggttcgcaccaaattctccatccatatataacaagaaaattgcagaggtggtaggtgattggtactttgaaagaggagctgacgtggagattgactgcgcctatccctgtgattcacagtcttgtcgcaaccttataccaattgataaggttagttgcttccgtgaaaagaggttaactgttttggcaaaataattctactggttagtaactcttctgcctaaaatggaactgacaaaaaattcatcatttgacataggaactgaggatgtattaggagttcggcagacgattatactcaattatcatcataataaaaaacactcttctaattgttgatgatgttatgttacttgcatcagatagcaaaccaccctattgtacaatctgttggtggaaacatgtttgtgttgtgtgttccaggttgtctgtttcttggtagccttttttggctgaattggtgatatacacaaaatctatttacttgttagactatactttgtattgcacccctgatatccaggccattgcttgtgttttctatgattcgttttaactgaa

SEQ ID NO: 213291 - DNA, 1026 bp, Zea Mays
ccgtgggtagggatgaaaacgatagaagaccttgttgttcctgcttcagttgatcagttgctatcggattacgcaaaacgatttcaccagataaaaactccacgaaagctattatggaagaaaaatcttggaacagttaagttagaactgcaatttgacggaagaagcgtgcaatttactgtagctcctgtgcatgctgcaatcataatgcggtttcaagagaaatctagttggacttcaaaggcacttgctacagaaattggcatacctatggattctcttaacagaagaataagtttctggacaagcaagggggtcctgactgaatcagcaggaccagatgccgatgatcgcaccttcactgttgtcgatagcatgtctgatgtcaacaaggacagtattgtgaatgaacgcatggcagagtatcagatgactgaggaggaaggtgaaagctctgtggcttcagtggaggaacagcttaagaaagaaatgacagtctacgagaaatacatcgtcggaatgctaacaaattttgggagtatgtcgctggacaggatacataacactctaaagatgttttgtattgccgagccatcgtatgacaagtcgctgcagcagctgcaaagttttctttctggtctagtagcagatgaaaagctagaaacgagggatgggctgtacttgctaaagaggtagcagccgtttctatactaggatagtgggttgttagactagggttgtacacttgtactatttgctaatgagttgtttagactagagatgtcaggtaatcagatataacacacttcattatcaaagctatgttatcgggttcagaggcagcttacatatcctatctcacatcctcctttattttaaacttcattatgtaaacaatgactatgaaggtgttactatggaggtatttgagatggctctaggttctagatccagtatggagctgtagtttatgtcagtttatttaaatagttttaaagtatttataatctaaataataaataaaat

SEQ ID NO: 213292 - DNA, 1885 bp, Zea Mays
cgcaaactggtggtaccgccataacgatctgaaaacatcctccattagtccgcctccggccaccccctttcattccgccgcaacgccaccgcccccaacgcaagtttccggcgatggaccccgcggcggccgcgctaggtgcagtacccgccgctggcgcgccacctccgggcgcagccgcaggggaccagcaggcagctccccgggttgagcggctcagcgcgggggtgcagcagcagttgaacctggaggggatgcgcgcgcgcgcggtggggctgtacaaggccatctcccgcatcctcgaggactttgacgtcatcatacgcaccaatcccagcgcctcccccaagtggcaggacgtgctcgggcagttctcgatggtgagcatggagctcttcaacattgtggaggacattaagaatgtgtccaaggtgtttgtcgtgtacccccggaatgtcaatgccgagaatgcaacaatactacctgtaatgctgtcgtcaaaactgctgcctgagatggaagttgaggaaactactaagagagagcaactattgtctggaataactaatctacctgtgcctacacagattgaaaaattaaaggttagaatagacatgattgggagtgcatgcgaaactgctgagaaagtaattgcagaatgccgtaagagctatgggctgggaagccgtcaggggacaaatcttggtcctacattggacaaagcacaagctgcaaagatacaggagcaggaaggcctacttagagcagcagtaaattatggtgaaggattacgggtacctggagatcagaggcatccacaatctcttcctatccatctgatagaagtgcttcctttaggagacggtgcacaaaattttggtgatagttctggtagttatcccaaaaatatgtcaacatttgcacctaatagtgtcaacagccagggaaatcagattcaggcatccggaggacagttacttggaaggcctgcgccatcacctggaaccacaggaacccctaatttcgagaatgtgtccactcctccaatgccatatgctaactctcctaggtcaggcaccaatatgatgaataccccttccccccagcaacatctaacaccacaacaacagaggcaaaaactgatgcaacattctcaaccgcttcaccagccggtgaggccatcagctgctgggatgctagcacagagcgcacttcctcaactacaagatttacaggggcaggctcaacaaaaactacaggtccctggtcaacagcaaatgcaatacaaccaagcattgtcacaacagtttcataacagacagatgcaacctggacgtatgcaaccaggcatggctcagagtcaattgaatcaaggaactcagctacgaagtcatttaggccagtttactggagctgcaaataatgcgatgttcaatgctgcacaggcatcatcaaactcacaaatgatggcaaatatgcatggatcacagtcgcttatgccacaaatgcagtatggtatggctggtgggcatccacataggagccatccccaaatgctgactgaccaaatgttcggtatgggagccacaaatagcagcatgatgggaatgcagcagcagcagcaagggctatacgggaacatgcaggcaggtgcacagaacgtgccacagggtatggcgggccttcagaaccagacccagaatcccaacttcactcagcagaggcaacaaaaccaacaatgatttaacactaacgttcacggaggttgaaagatgagcaatatatccgtcgttttgctgcttgtctgttggtctttactcagcttatctgtgagactgatagtagccccagtctcttatcgtacagggcaaccgtgaacggcgat

SEQ ID NO: 213293 - DNA, 1912 bp, Zea Mays
acatcctccattagtccgcctccggccaccccctttcattccgccgcaacgccaccgcccccaacgcaagtttccggcgatggaccccgcggcggccgcgctaggtgcagtacccgccgctggcgcgccacctccgggcgcagccgcaggggaccagcaggcagctccccgggttgagcggctcagcgcgggggtgcagcagcagttgaacctggaggggatgcgcgcgcgcgcggtggggctgtacaaggccatctcccgcatcctcgaggactttgacgtcatcatacgcaccaatcccagcgcctcccccaagtggcaggacgtgctcgggcagttctcgatggtgagcatggagctcttcaacattgtggaggacattaagaatgtgtccaaggtgtttgtcgtgtacccccggaatgtcaatgccgagaatgcaacaatactacctgtaatgctgtcgtcaaaactgctgcctgagatggaagttgaggaaactactaagagagagcaactattgtctggaataactaatctacctgtgcctacacagattgaaaaattaaaggttagaatagacatgattgggagtgcatgcgaaactgctgagaaagtaattgcagaatgccgtaagagctatgggctgggaagccgtcaggggacaaatcttggtcctacattggacaaagcacaagctgcaaagatacaggagcaggaaggcctacttagagcagcagtaaattatggtgaaggattacgggtacctggagatcagaggcatccacaatctcttcctatccatctgatagaagtgcttcctttaggagacggtgcacaaaattttggtgatagttctggtagttatcccaaaaatatgtcaacatttgcacctaatagtgtcaacagccagggaaatcagattcaggcatccggaggacagttacttggaaggcctgcgccatcacctggaaccacaggaacccctaatttcgagaatgtgtccactcctccaatgccatatgctaactctcctaggtcaggcaccaatatgatgaataccccttccccccagcaacatctaacaccacaacaacagaggcaaaaactgatgcaacattctcaaccgcttcaccagccggtgaggccatcagctgctgggatgctagcacaggtccctggtcaacagcaaatgcaatacaaccaagcattgtcacaacagtttcataacagacagatgcaacctggacgtatgcaaccaggcatggctcagagtcaattgaatcaaggaactcagctacgaagtcatttaggccagtttactggagctgcaaataatgcgatgttcaatgctgcacaggcatcatcaaactcacaaatgatggcaaatatgcatggatcacagtcgcttatgccacaaatgcagtatggtatggctggtgggcatccacataggagccatccccaaatgctgactgaccaaatgttcggtatgggagccacaaatagcagcatgatgggaatgcagcagcagcagcaagggctatacgggaacatgcaggcaggtgcacagaacgtgccacagggtatggcgggccttcagaaccagacccagaatcccaacttcactcagcagaggcaacaaaaccaacaatgatttaacactaacgttcacggaggttgaaagatgagcaatatatccgtcgttttgctgcttgtctgttggtctttactcagcttatctgtgagactgatagtagccccaggttagccttcgttttgctgtaaatcattagcgagatgcaggtcaattataattatatacgttgtaactgtgtttcggatatgtctaatatgttttgttggaatcgtgttacgcgcgttccttttatttataattaagcctcgcagcaag

SEQ ID NO: 213294 - DNA, 1951 bp, Zea Mays
acatcctccattagtccgcctccggccaccccctttcattccgccgcaacgccaccgcccccaacgcaagtttccggcgatggaccccgcggcggccgcgctaggtgcagtacccgccgctggcgcgccacctccgggcgcagccgcaggggaccagcaggcagctccccgggttgagcggctcagcgcgggggtgcagcagcagttgaacctggaggggatgcgcgcgcgcgcggtggggctgtacaaggccatctcccgcatcctcgaggactttgacgtcatcatacgcaccaatcccagcgcctcccccaagtggcaggacgtgctcgggcagttctcgatggtgagcatggagctcttcaacattgtggaggacattaagaatgtgtccaaggtgtttgtcgtgtacccccggaatgtcaatgccgagaatgcaacaatactacctgtaatgctgtcgtcaaaactgctgcctgagatggaagttgaggaaactactaagagagagcaactattgtctggaataactaatctacctgtgcctacacagattgaaaaattaaaggttagaatagacatgattgggagtgcatgcgaaactgctgagaaagtaattgcagaatgccgtaagagctatgggctgggaagccgtcaggggacaaatcttggtcctacattggacaaagcacaagctgcaaagatacaggagcaggaaggcctacttagagcagcagtaaattatggtgaaggattacgggtacctggagatcagaggcatccacaatctcttcctatccatctgatagaagtgcttcctttaggagacggtgcacaaaattttggtgatagttctggtagttatcccaaaaatatgtcaacatttgcacctaatagtgtcaacagccagggaaatcagattcaggcatccggaggacagttacttggaaggcctgcgccatcacctggaaccacaggaacccctaatttcgagaatgtgtccactcctccaatgccatatgctaactctcctaggtcaggcaccaatatgatgaataccccttccccccagcaacatctaacaccacaacaacagaggcaaaaactgatgcaacattctcaaccgcttcaccagccggtgaggccatcagctgctgggatgctagcacagagcgcacttcctcaactacaagatttacaggggcaggctcaacaaaaactacagcaaatgcaatacaaccaagcattgtcacaacagtttcataacagacagatgcaacctggacgtatgcaaccaggcatggctcagagtcaattgaatcaaggaactcagctacgaagtcatttaggccagtttactggagctgcaaataatgcgatgttcaatgctgcacaggcatcatcaaactcacaaatgatggcaaatatgcatggatcacagtcgcttatgccacaaatgcagtatggtatggctggtgggcatccacataggagccatccccaaatgctgactgaccaaatgttcggtatgggagccacaaatagcagcatgatgggaatgcagcagcagcagcaagggctatacgggaacatgcaggcaggtgcacagaacgtgccacagggtatggcgggccttcagaaccagacccagaatcccaacttcactcagcagaggcaacaaaaccaacaatgatttaacactaacgttcacggaggttgaaagatgagcaatatatccgtcgttttgctgcttgtctgttggtctttactcagcttatctgtgagactgatagtagccccaggttagccttcgttttgctgtaaatcattagcgagatgcaggtcaattataattatatacgttgtaactgtgtttcggatatgtctaatatgttttgttggaatcgtgttacgcgcgttccttttatttataattaagcctcgcagcaag

SEQ ID NO: 213295 - DNA, 1898 bp, Zea Mays
acatcctccattagtccgcctccggccaccccctttcattccgccgcaacgccaccgcccccaacgcaagtttccggcgatggaccccgcggcggccgcgctaggtgcagtacccgccgctggcgcgccacctccgggcgcagccgcaggggaccagcaggcagctccccgggttgagcggctcagcgcgggggtgcagcagcagttgaacctggaggggatgcgcgcgcgcgcggtggggctgtacaaggccatctcccgcatcctcgaggactttgacgtcatcatacgcaccaatcccagcgcctcccccaagtggcaggacgtgctcgggcagttctcgatggtgagcatggagctcttcaacattgtggaggacattaagaatgtgtccaaggtgtttgtcgtgtacccccggaatgtcaatgccgagaatgcaacaatactacctgtaatgctgtcgtcaaaactgctgcctgagatggaagttgaggaaactactaagagagagcaactattgtctggaataactaatctacctgtgcctacacagattgaaaaattaaaggttagaatagacatgattgggagtgcatgcgaaactgctgagaaagtaattgcagaatgccgtaagagctatgggctgggaagccgtcaggggacaaatcttggtcctacattggacaaagcacaagctgcaaagatacaggagcaggaaggcctacttagagcagcagtaaattatggtgaaggattacgggtacctggagatcagaggcatccacaatctcttcctatccatctgatagaagtgcttcctttaggagacggtgcacaaaattttggtgatagttctggcatccggaggacagttacttggaaggcctgcgccatcacctggaaccacaggaacccctaatttcgagaatgtgtccactcctccaatgccatatgctaactctcctaggtcaggcaccaatatgatgaataccccttccccccagcaacatctaacaccacaacaacagaggcaaaaactgatgcaacattctcaaccgcttcaccagccggtgaggccatcagctgctgggatgctagcacagagcgcacttcctcaactacaagatttacaggggcaggctcaacaaaaactacaggtccctggtcaacagcaaatgcaatacaaccaagcattgtcacaacagtttcataacagacagatgcaacctggacgtatgcaaccaggcatggctcagagtcaattgaatcaaggaactcagctacgaagtcatttaggccagtttactggagctgcaaataatgcgatgttcaatgctgcacaggcatcatcaaactcacaaatgatggcaaatatgcatggatcacagtcgcttatgccacaaatgcagtatggtatggctggtgggcatccacataggagccatccccaaatgctgactgaccaaatgttcggtatgggagccacaaatagcagcatgatgggaatgcagcagcagcagcaagggctatacgggaacatgcaggcaggtgcacagaacgtgccacagggtatggcgggccttcagaaccagacccagaatcccaacttcactcagcagaggcaacaaaaccaacaatgatttaacactaacgttcacggaggttgaaagatgagcaatatatccgtcgttttgctgcttgtctgttggtctttactcagcttatctgtgagactgatagtagccccaggttagccttcgttttgctgtaaatcattagcgagatgcaggtcaattataattatatacgttgtaactgtgtttcggatatgtctaatatgttttgttggaatcgtgttacgcgcgttccttttatttataattaagcctcgcagcaag

SEQ ID NO: 213296 - DNA, 1921 bp, Zea Mays
acatcctccattagtccgcctccggccaccccctttcattccgccgcaacgccaccgcccccaacgcaagtttccggcgatggaccccgcggcggccgcgctaggtgcagtacccgccgctggcgcgccacctccgggcgcagccgcaggggaccagcaggcagctccccgggttgagcggctcagcgcgggggtgcagcagcagttgaacctggaggggatgcgcgcgcgcgcggtggggctgtacaaggccatctcccgcatcctcgaggactttgacgtcatcatacgcaccaatcccagcgcctcccccaagtggcaggacgtgctcgggcagttctcgatggtgagcatggagctcttcaacattgtggaggacattaagaatgtgtccaaggtgtttgtcgtgtacccccggaatgtcaatgccgagaatgcaacaatactacctgtaatgctgtcgtcaaaactgctgcctgagatggaagttgaggaaactactaagagagagcaactattgtctggaataactaatctacctgtgcctacacagattgaaaaattaaaggttagaatagacatgattgggagtgcatgcgaaactgctgagaaagtaattgcagaatgccgtaagagctatgggctgggaagccgtcaggggacaaatcttggtcctacattggacaaagcacaagctgcaaagatacaggagcaggaaggcctacttagagcagcagtaaattatggtgaaggattacgggtacctggagatcagaggcatccacaatctcttcctatccatctgatagaagtgcttcctttaggagacggtgcacaaaattttggtgatagttctggtagttatcccaaaaatatgtcaacatttgcacctaatagtgtcaacagccagggaaatcagattcaggcatccggaggacagttacttggaaggcctgcgccatcacctggaaccacaggaacccctaatttcgagaatgtgtccactcctccaatgccatatgctaactctcctaggtcaggcaccaatatgatgaataccccttccccccagcaacatctaacaccacaacaacagaggcaaaaactgatgcaacattctcaaccgcttcaccagccggtgaggccatcagctgctgggatgctagcacagagcgcacttcctcaactacaagatttacaggggcaggctcaacaaaaactacaggtccctggtcaacagcaaatgcaatacaaccaagcattgtcacaacagtttcataacagacagatgcaacctggacgtatgcaaccaggcatggctcagagtcaattgaatcaaggaactcagctacgaagtcatttaggccagtttactggagctgcaaataatgcgatgttcaatgctgcacaggcatcatcaaactcacaaatgtatggtatggctggtgggcatccacataggagccatccccaaatgctgactgaccaaatgttcggtatgggagccacaaatagcagcatgatgggaatgcagcagcagcagcaagggctatacgggaacatgcaggcaggtgcacagaacgtgccacagggtatggcgggccttcagaaccagacccagaatcccaacttcactcagcagaggcaacaaaaccaacaatgatttaacactaacgttcacggaggttgaaagatgagcaatatatccgtcgttttgctgcttgtctgttggtctttactcagcttatctgtgagactgatagtagccccaggttagccttcgttttgctgtaaatcattagcgagatgcaggtcaattataattatatacgttgtaactgtgtttcggatatgtctaatatgttttgttggaatcgtgttacgcgcgttccttttatttataattaagcctcgcagcaag

SEQ ID NO: 213297 - DNA, 1960 bp, Zea Mays
acatcctccattagtccgcctccggccaccccctttcattccgccgcaacgccaccgcccccaacgcaagtttccggcgatggaccccgcggcggccgcgctaggtgcagtacccgccgctggcgcgccacctccgggcgcagccgcaggggaccagcaggcagctccccgggttgagcggctcagcgcgggggtgcagcagcagttgaacctggaggggatgcgcgcgcgcgcggtggggctgtacaaggccatctcccgcatcctcgaggactttgacgtcatcatacgcaccaatcccagcgcctcccccaagtggcaggacgtgctcgggcagttctcgatggtgagcatggagctcttcaacattgtggaggacattaagaatgtgtccaaggtgtttgtcgtgtacccccggaatgtcaatgccgagaatgcaacaatactacctgtaatgctgtcgtcaaaactgctgcctgagatggaagttgaggaaactactaagagagagcaactattgtctggaataactaatctacctgtgcctacacagattgaaaaattaaaggttagaatagacatgattgggagtgcatgcgaaactgctgagaaagtaattgcagaatgccgtaagagctatgggctgggaagccgtcaggggacaaatcttggtcctacattggacaaagcacaagctgcaaagatacaggagcaggaaggcctacttagagcagcagtaaattatggattacgggtacctggagatcagaggcatccacaatctcttcctatccatctgatagaagtgcttcctttaggagacggtgcacaaaattttggtgatagttctggtagttatcccaaaaatatgtcaacatttgcacctaatagtgtcaacagccagggaaatcagattcaggcatccggaggacagttacttggaaggcctgcgccatcacctggaaccacaggaacccctaatttcgagaatgtgtccactcctccaatgccatatgctaactctcctaggtcaggcaccaatatgatgaataccccttccccccagcaacatctaacaccacaacaacagaggcaaaaactgatgcaacattctcaaccgcttcaccagccggtgaggccatcagctgctgggatgctagcacagagcgcacttcctcaactacaagatttacaggggcaggctcaacaaaaactacaggtccctggtcaacagcaaatgcaatacaaccaagcattgtcacaacagtttcataacagacagatgcaacctggacgtatgcaaccaggcatggctcagagtcaattgaatcaaggaactcagctacgaagtcatttaggccagtttactggagctgcaaataatgcgatgttcaatgctgcacaggcatcatcaaactcacaaatgatggcaaatatgcatggatcacagtcgcttatgccacaaatgcagtatggtatggctggtgggcatccacataggagccatccccaaatgctgactgaccaaatgttcggtatgggagccacaaatagcagcatgatgggaatgcagcagcagcagcaagggctatacgggaacatgcaggcaggtgcacagaacgtgccacagggtatggcgggccttcagaaccagacccagaatcccaacttcactcagcagaggcaacaaaaccaacaatgatttaacactaacgttcacggaggttgaaagatgagcaatatatccgtcgttttgctgcttgtctgttggtctttactcagcttatctgtgagactgatagtagccccaggttagccttcgttttgctgtaaatcattagcgagatgcaggtcaattataattatatacgttgtaactgtgtttcggatatgtctaatatgttttgttggaatcgtgttacgcgcgttccttttatttataattaagcctcgcagcaag

SEQ ID NO: 213298 - DNA, 1504 bp, Zea Mays
acatcctccattagtccgcctccggccaccccctttcattccgccgcaacgccaccgcccccaacgcaagtttccggcgatggaccccgcggcggccgcgctaggtgcagtacccgccgctggcgcgccacctccgggcgcagccgcaggggaccagcaggcagctccccgggttgagcggctcagcgcgggggtgcagcagcagttgaacctggaggggatgcgcgcgcgcgcggtggggctgtacaaggccatctcccgcatcctcgaggactttgacgtcatcatacgcaccaatcccagcgcctcccccaagtggcaggacgtgctcgggcagttctcgatggtgagcatggagctcttcaacattgtggaggacattaagaatgtgtccaaggtgtttgtcgtgtacccccggaatgtcaatgccgagaatgcaacaatactacctgtaatgctgtcgtcaaaactgctgcctgagatggaagttgaggaaactactaagagagagcaactattgtctggaataactaatctacctgtgcctacacagattgaaaaattaaaggttagaatagacatgattgggagtgcatgcgaaactgctgagaaagtaattgcagaatgccgtaagagctatgggctgggaagccgtcaggggacaaatcttggtcctacattggacaaagcacaagctgcaaagatacaggagcaggaaggcctacttagagcagcagtaaattatggtgaaggattacgggtacctggagatcagaggcatccacaatctcttcctatccatctgatagaagtgcttcctttaggagacggtgcacaaaattttggtgatagttctggtagttatcccaaaaatatgtcaacatttgcacctaatagtgtcaacagccagggaaatcagattcaggcatccggaggacagttacttggaaggcctgcgccatcacctggaaccacaggaacccctaatttcgagaatgtgtccactcctccaatgccatatgctaactctcctaggtcaggcaccaatatgatgaataccccttccccccagcaacatctaacaccacaacaacagaggcaaaaactgatgcaacattctcaaccgcttcaccagccggtgaggccatcagctgctgggatgctagcacagagcgcacttcctcaactacaagatttacaggggcaggctcaacaaaaactacaggtccctggtcaacagcaaatgcaatacaaccaagcattgtcacaacagtttcataacagacagatgcaacctggacgtatgcaaccaggcatggctcagagtcaattgaatcaaggaactcagctacgaagtcatttaggccagtttactggagctgcaaataatgcgatgttcaatgctgcacaggcatcatcaaactcacaaatggttctgccagaaataattctctgcgtgcatatggtataattgatcacaactactgggcaatgacagtctgta

SEQ ID NO: 213299 - DNA, 1327 bp, Zea Mays
gcttgcattgcattggcactttggcaggctgcgagcagtctgacagctacacacacaggcagacgccgttccgcgggggaaaggtgcggacgcctgaatcctctccaactccggcaccgcattcgcacgcccgcgaagccccgaatcggagaggacagaggagtcatggacgcggcggcggcggcggctgcggctgcgagccccacgagcaagaggatcgcgctggtgacgggagggaacaagggcatcgggctcgagacgtgccggcagctggcgtccaggggcgtcagggtcgtcctgacggcgaggaacgaggcgaggggtttggaagcggtcgagcgcgtcaggtgcgcccgcggcgacgccgaggtttacttccaccagctcgacgtcaccgacccctgcagcgccgcccggctcgcggatttcgtcagggatcagttcggtaggctggacatcctggtcgatggcatggatgtaaatcagagagtcgaatggatgaaagaaaattcgaaagaaacatacgaggaggctgtacaatgtatgaaaacaaactattatggtgccaaacttgtcacagaggcactacttcctcttcttcagttatcctcctctggaagaattgtcaacgtttcgtcaggctttggactactgagaaatttcaacagcgaagaccttaggaaggagtttgaagacatcgacaatcttactgaaagtagactggaggaactgatggataagtttctagaggattttaaggccaacttagtagaggcgcatgggtggccgacaggtggatcttcagcctacaaagtcgtcaaagcggcgctcaatgcgtacacgaggattcttgccaagaagtatcctacgctgcgtatcaattgtttgacgcctggttatgtcaagaccgacatgtctatgcacatgggggtactgacacttgaggaaggcgctcgcaaccccgtgaaggttgctctcttgcctgacgacggaccgactggtgcttattttgatctgaatggcgaggcgtcctttgtgtgatggtatttctcccttttcagcttcagaataaaagaaagagctatgaagtagttagtgccaatcagtattgtagttcgacttgaatacttaaactagcacgttgagcaaaccgtagagctcaacaccagggatttcctcgtcttctgtataatatctctggtgatgattgtatatttgcaatgaaccatgcagatttggtcgcgccaaggtagtgtttggttggcacaatggtaatggcaacaggaatgaaaatggactgcgaggggaacgatggtggggttcgttt

SEQ ID NO: 213300 - DNA, 1121 bp, Zea Mays
ccacgcccgactgggaacaagagctattggaattctagattagccacagagaggcagaggctagttaatatctttagaaacttggacgttgtttgtgatatgttctcaggggttggtcctctagcgatttcagctgcaaaaaaggtcaaatatgtctatgcaaatgacataaaccctaatgcagtgggataccttgagagaaacatggttcttaacaaacttgaaaagaaaatagaggtttttaacatggatgctagaaggtttgttagtgcaatatattcaagcaagcacgtgcaaccaatcacacaaatagtgatgaatttgcccaatgacgctgttgaatttttagatgtgttcaaagggattttatgcaatactaaatcagaactgcattgtgtgatgccaatgatccatgtgtacggattttctaaagctgaggatccagagcatgacttccatgagaggataaatttaacgttaggcgagaacatcgacactgttgaaatgcacagagtacggcttgttgcacccggaaaatggatgatatgtgcaacttttactcttccacagtcagtggcgtctgcacagccgaattacattacctgttgattttttgtactctctccgtcttaaaatattggcaacgactgttatgcaagcagtccttctgtgcaagcgtgcaagcaaaccatatgatccattagattacgatccaatcacagatacaaccatgtttgttagaggttttttataaagattattgagctgttggtggaagggtttaagtgttaaatgtgacatacggttggatcacgatctaatggatcaaatggtttgcttgcacgcttgcacagaaggactgcttgtatagcagtcgttgcctaaaatattagtcgttttagctcagctctggatttttatgtctatatccaaagacatgtaaaacatataaatcaaatgttatatgaatttattaattgtcgaaaatgaattttaatttgggatagagggagtactattcttactgcagcccctcgtatcttctgtactgtcgtcgaatacttcctatcagattatatagatgatgcccttgatcatctcacactgaatttggaaaggac

SEQ ID NO: 213301 - DNA, 1779 bp, Zea Mays
cgggcgagctgctgggcaaggcgcgcgtctctactctccaggcagttttggcccctagttttctgctgaacgcgaaccatgtccatgccgaacccccgcgcacaccacgccagcgggggtggagacgaaggcggcgctggccgcggcaagtgactcggcataagcagcgcaggatcgccgtcgtccatccccaccgcagaatcgactggcgattacaaaatagtggacaagagttatatggtagtgcagagagactgatagttgatgtggcatgacagctcagtagttcactgcccatagacataatgtgataatgctcatgttttcacacctcactatgacagaacttggtgcattaagactctgtctgggacatggcgactaacagaagtccaagattcctttctcatggatggatggtcccaattgagttggacgttttcggtgggaagcggacaaaccaaagcaggaagtgcagaggatcagacgcgaacatccagatgatgatcagtgtgttgttaatgatagagtgaaaggtcgtctaacagttacccgtgcatttggtgctgggtatctcaaacaggcaaggttcaatgatgggttgctagagatgtttcgcaatgagtatataggtgataccccatatatatcatgcacacctactctttgccatcataagctctccatcagggatcagtttcttgttctttcgtctgatggcttatatcagtacctaagcaatgaggaggtagtgctgcatgttgagaattttatggagcggtttcctgagggtgatcctgcacagagtttaattgaggagctactctcccgtgctgcaaagaaagctggcatggacttctatgaactattagatatacctcaaggggaccgcagaaaataccatgatgacgtcaccattatggttatttctcttgaggggagaatatggaaatcctctggaacatatgtgtgatgttcagctgatatactgtccgtgtcagtatttattccgatgcaatattcagctgaaatgaacttcagccggtcagcactcccaggcgattgcacatatgctcaccaagaggggaaaagtctggcatgacatacagctatgtagtccatacacttgtcgaagtggagttctccagctggggatcatcgctgatccttcacatcagctttgtcacagctcatgctcataggttaactcgggcagattaaagttgcagaaaaatgacagcctggtagggaggaattcctggaaaagcagagccaattttgttctgtttgccactacagctttgtttggttacatactcaccactgacaattttttccacctcacactgagttgtcatagagttgggtgcttattttatccttggaaatagaaaacttttaggtatatgcagctttttctcattcatgtgaggattgagcctgtattatattggaaactagaactgatcatgtcagaaaaatggatgattggcacctcattttgtcctgactcctgaaggtggttctccttcgagtctttgagccgttagtggcatccgtgaaagaaaattttacatttcgcctccactggaaaaacaaagctagtgcctcctagcccttggcaagttatttggttggtcctcagaaaagctaagagctgaaagatattttggaggcaatccatcagtcgttggcgatatttttcatgtgcatggtatatctgtttgtcgatcctgacgatatttaactctcaacatgatgaagaaatttcggttaggc

SEQ ID NO: 213302 - DNA, 1574 bp, Zea Mays
cgagatgcagcattgcagcacgacacgactgcacgaggacgaaaaaaaaaatatccggacatccggtcacggttgccattcttttcctgtaaccgaaccctgaagggtagcgtcatcatccagaccaccattaccagagtgctctgctctcgctggaggccgtggttcattcacgttcatggaggccgccgccattcccaccagtgccccggaaaccagtccttcaactgacctggctggaactggaacctaccaggttttccttacaggaagtcgtagtttctacctactggattgccgttgtcaccggcggcaacaaagggatcgggctagaggtgtgccggcagctggccggcgccggcgccaccgtcgtcgtcttaacagccagggacgagacgaggggtgcagccgctgcacaagagctcagagaatctgggctctccgatgtcatcttccatcagctggacatcaccgacgctgcgagcgtcagtcggctggctgagttcctcaaggctcgttttggaaagctagatatcctggtaaataatgccgcagttggtgctgttgagtacgtccaagatcctgctgacagttcaacgagcgaggaagagctgagtggcatggatatggtccaaaggcttcagtgcatgcttaagagagtccgggagacctacgacgctgcgacagaaggcatcaagacaaactactatggcataaagcatgtgatcgaagccttgctgcctctgcttcaagcttcctccgatgggaggatcgttaacgtctcctctgacttcggactgctaaggctgatcaacaacgaggaagctaaggcaggagctaaacgacgtggagaagctcaccgaggagaggctggacgaggtgctggccgcgtacctgagagacttcgacgccggcgaggtgggggcgcgcgggtggccggtggacttctcggcctacaaggtggccaaggtggccatgaacgcgtacacgaggatcctagcgaggagccacccggggctgcgcgtcaactgcgcgcaccccggctacgtgagcaccgacatgaccgtccacaccgggcctctcacgcccgagcaaggcgcggccaacgtcgtgaaggtggcgctgctgccggagggcggcccgaccggcgcgtacttcgcgttgggagaggaggcgtcctttatgtgacgaaagcaccgtcgtcgttaagttcgtcgttgttcgccaactccctgttagtcgatttctaaatcgacgtacaatgaaatacatcatcgctgcaaactcacaaatgaaaacaagggaaccttgtagcaaaaaaaaaaagaagtggacagaataatgaataagcatgtcaaatatctcttgagtatctatttgttcaagtatgaatgactttgtacaagtatcaaagattgtgagtggaaccaaattaagcagggctttgtgcatgtatgaacgactccaaatgacagaacgaaggaagctggtaacaccgccggtgtcctgcaaaacatgcatactagccttcatgagattatcatcatcagatagataatgaaattacatcaagc

SEQ ID NO: 213303 - DNA, 2465 bp, Zea Mays
gtctagtcaggtcagccaccccaaacgttgtctcggtcaaattcaattcaattgacctggttcaaccgcgaccaccagagccagcaccggacgggtccaccgaaccgcgtgtacagttgtacagtgtacacacggccaccacgcgacgccttacctctccacgtggtcaacggtttgagttgaccctcctcccctctgctccgtccacctttcaaagccgaggcgccccggccgcctcttccacctccacggctccacctccaccccagtccacagcacccctcccctccggcctcccttcccgcaccgcggacgacaagtcaaataccgcgcgtgcgtaccacttggagccatccggcaccacgccacgagtccacagtccgcgcgccccccacgggccgtcgtcgccccggcttctcctctccttcccggcttcccccaacccctcgcgaaagctcgccgctgctgcgtccgcgccccgtggcggcacggcgcggcacctcgtggggaaaccgacggaggccttcgccgagcctttgggggccggcgctttttcctggtgccgtccttctgtactgcctgcgggtgggttgttccgatcataaccgacaaggcgcggcgtgctctcttccctcgcgttgtagactctcgcgggatctgtctcggcggcggcggcgggggtgggggtgggttactgggctcgcttcatcctcccggatcacggcggcggtttgttcagaacatgttagaagccagggaagatcggtgaaatgcttgcattgatataataagtccaggctgaagttattgagctgacagcactaagatataatagtttgagaatctcaatgggttgcttttctacattttgcaagaaaagaagggcaacgcggcaaccaagttcccaccataatgaagacgtacctggctgttcaaatataacaaaatacacttacaaggagctagtaagggcgacaaataactttaacccattgaacaaaattggtgagggtggttttggttccgtttacaagggacagctcaggaatggtacagttattgctgtcaaggtcctttcgtcggagtcaagacaaggagtaagggagtttctgaatgaactcgtggcaatttccgacatctcacatgataatcttgtgaaactttatgggtattgtgcggaaggagaccaaagaatccttgtttacaatcatcttgaaaataatagccttgcacaaacacttctaggtatggcatagtaactattcttatagatttaaaccaaataatgcataagcatatactatttttctttaactattcatcacaaagtaatataataggccaaccgttgcagtttctgtttaaactttcgatataagttggccctggtctttggtccaaaaaaaaaacttcggttaattcatatatactgtatgtcctaaccctttttatactatttatgatcaggctccagccacagcaatatccagtttgattggaaaacacgagtaaatatttgccttggcattgcacggggattagcatacctccatcatggtgtcagtccccacattgttcatcgagacattaaagcaagcaatatacttcttgatagggaccttaccccaaaaatctctgattttggtctagcaaagcttcttccaccaaacgcaacacatgttagcacaagagttgcaggaacactgggttatttggctcctgagtatgctattcgaggacaggtgacacgcaaatcagatgtgtacagctttggcgtgctgcttctggaaattgtttgcgggagatcaaacagcgatacaagattagcatacggagatcagatactcctcgaaaagacatggatgcactacgagcaggggagtctggagaggatcatagacaggtccttgggcggcggcgacctggacgtggcgcaggcctgcaggttcctgaaggtcgggctgctgtgcacgcaggacgtgacgaggcaccggcccgacatgccgagggtcgtcgccatgctgacgggcgagtgggacgtcgagccggagacggtcagcaagcccgccataatcagcgacttcatggacctcaaggtcaggagcacgaggaaagcgagcgacaacgtggccacgccgcctacgtcctcctcgacgttcctgtcctccctcatggcgcactcctcgcccttgctgtcgaacgagtccacgcaggcctccatggcgttcaccggggtgtcggatcgcgagtgatccttgatcccttcgtcaaagactggtcaggctggctggtagtgacctgagttggttggaggtgtggaagacatgtgtagtgtaggcaggcaggcacagatggatttaattgcttcgtttgtaggcgcaacatcattgttgagtcaaaaggttcaagtacatgtgaggaaactgctttgtgtgcaattttggattgaagacgcgattcttttt

SEQ ID NO: 213304 - DNA, 807 bp, Zea Mays
ccaactccaatacgttggattgaggggcccttcgatcgaatcagattgtgatggccgccttcctccttctcgaatcgaattgaatcgagctcggctgttgtagagacagcaggactatgagaaatcggcagctggaagggcagccaaagcacaaatgaaagcaatgaaggaatcaaaggcatcaaaccaaggtggagagccggttcttaagtggcagatgggatcatgagtttcgtttctgttgatttgcatccctccgcttacttttgatggccgacagaaaattgattgcgactaatttctgataggatgcactgtgattgtgtgattatgccagtgaagtgtacatccggtttaccatctgctatgctgtacatgctatcccatagactgcccaacttcccagttaaaagtcacaagtttgtgtttgtaagtgaacaaaatatatattttatgaacacatgtagtctcgtagcatttgcatggaggcttttaccccacttcatagtatttttcaaagccatgtttcatagtgcgactacagtactgaattctgctgcagccttctttttttcccttcacatcatcaagcatccccatggagattctcatatgtaccatgttctgttagctgatagcttatcaagctttggtatatgaaatgctgaacactcgttgcactttacatggattgttttaatttgagtgttactccatagttcctgagaattcatggaccaagtttgtgtcattgaacgttcacgtggatatcaaatcgtctccattttgcttggcccctgaggtatg

SEQ ID NO: 213305 - DNA, 742 bp, Zea Mays
ctcccgttggttattgggcacgactagttcccttccatagacagcaggactatgagaaatcggcagctggaagggcagccaaagcacaaatgaaagcaatgaaggaatcaaaggcatcaaaccaaggtggagagccggttcttaagtggcagatgggatcatgagtttcgtttctgttgatttgcatccctccgcttacttttgatggccgacagaaaattgattgcgactaatttctgataggatgcactgtgattgtgtgattatgccagtgaagtgtacatccggtttaccatctgctatgctgtacatgctatcccatagactgcccaacttcccagttaaaagtcacaagtttgtgtttgtaagtgaacaaaatatatattttatgaacacatgtagtctcgtagcatttgcatggaggcttttaccccacttcatagtatttttcaaagccatgtttcatagtgcgactacagtactgaattctgctgcagccttctttttttcccttcacatcatcaagcatccccatggagattctcatatgtaccatgttctgttagctgatagcttatcaagctttggtatatgaaatgctgaacactcgttgcactttacatggattgttttaatttgagtgttactccatagttcctgagaattcatggaccaagtttgtgtcattgaacgttcacgtggatatcaaatcgtctccattttgcttggcccctgaggtatg

SEQ ID NO: 213306 - DNA, 2296 bp, Zea Mays
ctaatctccagcaccccagcggccgccagcgctcccgctccttgctcgcctccacccgcggccaccaccgccctgcggcccccgccgcttgctagcctccaccgcgccgcgagtcacgccgttcatgcaccggctggtcctggagcacgggaggacgagcatgtcctggttcggccccagccccaaggtgaccatcgtcgacccggacctggccaaggacgtgctgtccaacaagttcggccacttcgagaagctcaaggtcccggcgctgtccaagatgctgggctccggcgtggccagccacgagggcgagaagtgggtcaagcaccggaggatcctcaaccatgcgttccatcttgagaagctcaagcgcatgctgccggcgttttctacgtgctgcgaggagctggtgagcaggtgggcggcggagtcccttggctccgacggctcgtgcgagctggacgtctggccggagctgcagaacctgacgggagacatcatttctcgcaccgtgttcagcagcagctacagcgaagggagaaggatcttccagctacaggtcgagcaagcttcgcttgtcatgaccaacattcggaagatcatgatccccggctacatgtacttgcctaccgcgaacaacaggaagatgcgcaggaacaacagggaggtggagtcaatcctgcgagagataatcgggaagaggatccaggcgatggaacaaggcgagggcaccaaagacgacctggtgggtctactgctggagacaaacatgagagacgacatggggatgacgatcgaagacgtgatcgaggagtgcaaggtgttctacttcgtcgggatggagaccacgttggtgctgctcatgtggacgatggtggtgctcagcatgcacccggagtggcaggaccgcgcgagggaggaggtgacggctctgttcggcagggacgacaagcccgagtatgacggcctaagccgcctcaaagtcgtgaccatggtgctctacgaggtgctccgactgtacccgccggccacctccgtcgtccgacaaacgtacaaggagatggaggtcggaggcgtcacctaccccgccggcgtgatcctggagctgcccgtgctgctcatccaccacgacccggacatctggggaggcgacgcgcgcgagtttaggcccgataggttctccgagggcgtgtccagggcctccaaggaccccggcgcgttcctcccgttcggttggagcccgcgcatctgcatcggccagaacttcgcgctgctggaggccaagatggcgctctgcatgatcctccagcggtttgagttcgggctcgcgccatcctatgctcatgcgccgcataccatgataaccttgcatcctatgcacggtgcgcagcttaagctcagagcaatatgatctcgacacgatgggtgtcccatcgttgatgccattgttatgtataaccttacaattcagataggcattcggccctgttaatgtctgaaataagtatcttcgcgttggcattttgtaatgtgcttttcacgtaccattggtgctttattgccttttgtatataaacatgtggatatatgtaactcatacattacacaaacaaacacaaacacaccagagccagagctatagggtggagctataaactgtggctctacttttgtacacaaaactggctccacatgttcttccaatcctgcaactgcgtttttcgcatccccgtttgattgcaaaaacgggactgctaagcaagctaagatttcaatggcatattccttcatacataggccattgaaccggaagattttgtcggtattcggtaactataggatcatgtggttgttggtcgagttggaccaattatgctggctcatttgttggatgttttgacaagtcgattctagcttccttatgatctatgttagatttggtaatgcataccagttagtaaagcatttatgatgtacattgttatacatagagctttacatcacaaaaattatcagtttccctcagttacgatatgcatttagtatttatcgtattttgaaaattaataacctattatactatgataggcttgacttcatgtttatctaaataacttagtgcgatgatgcttgaaaacttatcttccattttgccagatcaatgaataaaaggattattcatatcaatgtccatgcaccttctcagaaaatccttttgtgatgttggtgttggtttcctggacctgtactgatgattgcaataagatatcatgaggcgcgccgaggagaacagggg

SEQ ID NO: 213307 - DNA, 2534 bp, Zea Mays
cagcgctcccgctccttgctcgcctccacccgcggccaccaccgccctgcggcccccgccgcttgctagcctccaccgcgccgcgagtcacgccgttcatgcaccggctggtcctggagcacgggaggacgagcatgtcctggttcggccccagccccaaggtgaccatcgtcgacccggacctggccaaggacgtgctgtccaacaagttcggccacttcgagaagctcaaggtcccggcgctgtccaagatgctgggctccggcgtggccagccacgagggcgagaagtgggtcaagcaccggaggatcctcaaccatgcgttccatcttgagaagctcaagcgcatgctgccggcgttttctacgtgctgcgaggagctggtgagcaggtgggcggcggagtcccttggctccgacggctcgtgcgagctggacgtctggccggagctgcagaacctgacgggagacatcatttctcgcaccgtgttcagcagcagctacagcgaagggagaaggatcttccagctacaggtcgagcaagcttcgcttgtcatgaccaacattcggaagatcatgatccccggctacatgtacttgcctaccgcgaacaacaggaagatgcgcaggaacaacagggaggtggagtcaatcctgcgagagataatcgggaagaggatccaggcgatggaacaaggcgagggcaccaaagacgacctggtgggtctactgctggagacaaacatgagagacgacatggggatgacgatcgaagacgtgatcgaggagtgcaaggtgttctacttcgtcgggatggagaccacgttggtgctgctcatgtggacgatggtggtgctcagcatgcacccggagtggcaggaccgcgcgagggaggaggtgacggctctgttcggcagggacgacaagcccgagtatgacggcctaagccgcctcaaagtcgtgaccatggtgctctacgaggtgctccgactgtacccgccggccacctccgtcgtccgacaaacgtacaaggagatggaggtcggaggcgtcacctaccccgccggcgtgatcctggagctgcccgtgctgctcatccaccacgacccggacatctggggaggcgacgcgcgcgagtttaggcccgataggttctccgagggcgtgtccagggcctccaaggaccccggcgcgttcctcccgttcggttggagcccgcgcatctgcatcggccagaacttcgcgctgctggaggccaagatggcgctctgcatgatcctccagcggtttgagttcgggctcgcgccatcctatgctcatgcgccgcataccatgataaccttgcatcctatgcacggtgcgcagcttaagctcagagcaatatgatctcgacacgatgggtgtcccatcgttgatgccattgttatgtataaccttacaattcagataggcattcggccctgttaatgtctgaaataagtatcttcgcgttggcattttgtaatgtgcttttcacgtaccattggtgctttattgccttttgtatataaacatgtggatatatgtaactcatacattacacaaacaaacacaaacacaccagagccagagctatagggtggagctataaactgtggctctacttttgtacacaaaactggctccacatgttcttccaatcctgcaactgcgtttttcgcatccccgtttgattgcaagaacgggactgctaagcaagctaagatttcaatggcctattccttcatacataggccattgaaccggaagattttgtcggtattcggtaactataggatcatgtggttgttggtcgagttggaccaattatgctggctcatttgttggatgttttgacaagtcgattctagcttccttatgatctatgttagatttggtaatgcataccagttagtaaagcatttatgatgtacattgttatacatagagctttacatcacaaaaattatcagtttccctcagttacgatatgcatttagtatttatcgtattttgaaaattaataacctattatactatgataggcttgacttcatgtttatctaaataacttagtgcgatgatgcttgaaaacttatcttccattttgccagatcaatgaataaaaggattattcatatcaatgtccatgcaccttctcagaaaatccttttgtgatgttggtgttggtttcctggacctgtactggtacatatgctaagtcatccacaaatctgacccagaattgtaccgttctttttatagccatgtttggtacttgtttgagtgctccatagttcgcaagtttttttgttatgatgtattttgacatttgaatctcagacatgcttaggaactactgatttgaatttatgggctaacagttccagtatttcaaatagaaagtatgctatatcaaataagttgatgatacttttggtactggagaatgaagctagactgcatttgatattagaagtctgtttgtctgattgcagttgattataaagaagctag

SEQ ID NO: 213308 - DNA, 3012 bp, Zea Mays
cagcgctcccgctccttgctcgcctccacccgcggccaccaccgccctgcggcccccgccgcttgctagcctccaccgcgccgcgagtcacgccgttcatgcaccggctggtcctggagcacgggaggacgagcatgtcctggttcggccccagccccaaggtgaccatcgtcgacccggacctggccaaggacgtgctgtccaacaagttcggccacttcgagaagctcaaggtcccggcgctgtccaagatgctgggctccggcgtggccagccacgagggcgagaagtgggtcaagcaccggaggatcctcaaccatgcgttccatcttgagaagctcaagcgcatgctgccggcgttttctacgtgctgcgaggagctggtgagcaggtgggcggcggagtcccttggctccgacggctcgtgcgagctggacgtctggccggagctgcagaacctgacgggagacatcatttctcgcaccgtgttcagcagcagctacagcgaagggagaaggatcttccagctacaggtcgagcaagcttcgcttgtcatgaccaacattcggaagatcatgatccccggctacatgtacttgcctaccgcgaacaacaggaagatgcgcaggaacaacagggaggtggagtcaatcctgcgagagataatcgggaagaggatccaggcgatggaacaaggcgagggcaccaaagacgacctggtgggtctactgctggagacaaacatgagagacgacatggggatgacgatcgaagacgtgatcgaggagtgcaaggtgttctacttcgtcgggatggagaccacgttggtgctgctcatgtggacgatggtggtgctcagcatgcacccggagtggcaggaccgcgcgagggaggaggtgacggctctgttcggcagggacgacaagcccgagtatgacggcctaagccgcctcaaagtcgtgaccatggtgctctacgaggtgctccgactgtacccgccggccacctccgtcgtccgacaaacgtacaaggagatggaggtcggaggcgtcacctaccccgccggcgtgatcctggagctgcccgtgctgctcatccaccacgacccggacatctggggaggcgacgcgcgcgagtttaggcccgataggttctccgagggcgtgtccagggcctccaaggaccccggcgcgttcctcccgttcggttggagcccgcgcatctgcatcggccagaacttcgcgctgctggaggccaagatggcgctctgcatgatcctccagcggtttgagttcgggctcgcgccatcctatgctcatgcgccgcataccatgataaccttgcatcctatgcacggtgcgcagcttaagctcagagcaatatgatctcgacacgatgggtgtcccatcgttgatgccattgttatgtataaccttacaattcagataggcattcggccctgttaatgtctgaaataagtatcttcgcgttggcattttgtaatgtgcttttcacgtaccattggtgctttattgccttttgtatataaacatgtggatatatgtaactcatacattacacaaacaaacacaaacacaccagagccagagctatagggtggagctataaactgtggctctacttttgtacacaaaactggctccacatgttcttccaatcctgcaactgcgtttttcgcatccccgtttgattgcaaaaacgggactgctaagcaagctaagatttcaatggcatattccttcatacataggccattgagcgacgaggcacgccgcgtcagcactcccttggtggtcacttgcaatgaccagagacgggaggtctccgttgcccagaacatcgctaacaaggaaattgaccgcaccgttgcattcgacaaggtgctaggtccaaagtctcaacagcaggacgtcttcaaccatgctgttgtgccacttgtcagcgaggttttggacggttataattgcacaatatttgcatatggccagactggaactggcaaaacatacataatggaaggaggagggggcaaagcactgtgtcattccaagtgctgttaagcgcatatttgacatcctcgaggcacagagtgcagagtacagcatgaaggtttcttttcttgagctgtacaatgtggagctcactgatcttctagctctacaatgagattgcaagaacgggactgctaagcaagctaagatttcaatggcctattccttcatacataggccattgaaccggaagattttgtcggtattcggtaactataggatcatgtggttgttggtcgagttggaccaattatgctggctcatttgttggatgttttgacaagtcgattctagcttccttatgatctatgttagatttggtaatgcataccagttagtaaagcatttatgatgtacattgttatacatagagctttacatcacaaaaattatcagtttccctcagttacgatatgcatttagtatttatcgtattttgaaaattaataacctattatactatgataggcttgacttcatgtttatctaaataacttagtgcgatgatgcttgaaaacttatcttccattttgccagatcaatgaataaaaggattattcatatcaatgtccatgcaccttctcagaaaatccttttgtgatgttggtgttggtttcctggacctgtactggtacatatgctaagtcatccacaaatctgacccagaattgtaccgttctttttatagccatgtttggtacttgtttgagtgctccatagttcgcaagtttttttgttatgatgtattttgacatttgaatctcagacatgcttaggaactactgatttgaatttatgggctaacagttccagtatttcaaatagaaagtatgctatatcaaataagttgatgatacttttggtactggagaatgaagctagactgcatttgatattagaagtctgtttgtctgattgcagttgattataaagaagctag

SEQ ID NO: 213309 - DNA, 2392 bp, Zea Mays
cagcgctcccgctccttgctcgcctccacccgcggccaccaccgccctgcggcccccgccgcttgctagcctccaccgcgccgcgagtcacgccgttcatgcaccggctggtcctggagcacgggaggacgagcatgtcctggttcggccccagccccaaggtgaccatcgtcgacccggacctggccaaggacgtgctgtccaacaagttcggccacttcgagaagctcaaggtcccggcgctgtccaagatgctgggctccggcgtggccagccacgagggcgagaagtgggtcaagcaccggaggatcctcaaccatgcgttccatcttgagaagctcaagcgcatgctgccggcgttttctacgtgctgcgaggagctggtgagcaggtgggcggcggagtcccttggctccgacggctcgtgcgagctggacgtctggccggagctgcagaacctgacgggagacatcatttctcgcaccgtgttcagcagcagctacagcgaagggagaaggatcttccagctacaggtcgagcaagcttcgcttgtcatgaccaacattcggaagatcatgatccccggctacatgtacttgcctaccgcgaacaacaggaagatgcgcaggaacaacagggaggtggagtcaatcctgcgagagataatcgggaagaggatccaggcgatggaacaaggcgagggcaccaaagacgacctggtgggtctactgctggagacaaacatgagagacgacatggggatgacgatcgaagacgtgatcgaggagtgcaaggtgttctacttcgtcgggatggagaccacgttggtgctgctcatgtggacgatggtggtgctcagcatgcacccggagtggcaggaccgcgcgagggaggaggtgacggctctgttcggcagggacgacaagcccgagtatgacggcctaagccgcctcaaagtcattgcaaaaacgggactgctaagcaagctaagatttcaatggcatattccttcatacataggccattgagcgacgaggcacgccgcgtcagcactcccttggtggtcacttgcaatgaccagagacgggaggtctccgttgcccagaacatcgctaacaaggaaattgaccgcaccgttgcattcgacaaggtgctaggtccaaagtctcaacagcaggacgtcttcaaccatgctgttgtgccacttgtcagcgaggttttggacggttataattgcacaatatttgcatatggccagactggaactggcaaaacatacataatggaaggaggagggggcaaagcactggtgcaatttttattatatatattcacatgctacacatgtttctgaattctgatgcggttagtttgctgcttcaactgacgccataactctactccatttctatagaatgctgacctcccgactgatgctagtgtcattccaagtgctgttaagcgcatatttgacatcctcgaggcacagagtgcagagtacagcatgaaggtttcttttcttgagctgtacaatgtggagctcactgatcttctagctctacaatgagattgcaagaacgggactgctaagcaagctaagatttcaatggcctattccttcatacataggccattgaaccggaagattttgtcggtattcggtaactataggatcatgtggttgttggtcgagttggaccaattatgctggctcatttgttggatgttttgacaagtcgattctagcttccttatgatctatgttagatttggtaatgcataccagttagtaaagcatttatgatgtacattgttatacatagagctttacatcacaaaaattatcagtttccctcagttacgatatgcatttagtatttatcgtattttgaaaattaataacctattatactatgataggcttgacttcatgtttatctaaataacttagtgcgatgatgcttgaaaacttatcttccattttgccagatcaatgaataaaaggattattcatatcaatgtccatgcaccttctcagaaaatccttttgtgatgttggtgttggtttcctggacctgtactggtacatatgctaagtcatccacaaatctgacccagaattgtaccgttctttttatagccatgtttggtacttgtttgagtgctccatagttcgcaagtttttttgttatgatgtattttgacatttgaatctcagacatgcttaggaactactgatttgaatttatgggctaacagttccagtatttcaaatagaaagtatgctatatcaaataagttgatgatacttttggtactggagaatgaagctagactgcatttgatattagaagtctgtttgtctgattgcagttgattataaagaagctag

SEQ ID NO: 213310 - DNA, 2641 bp, Zea Mays
cagcgctcccgctccttgctcgcctccacccgcggccaccaccgccctgcggcccccgccgcttgctagcctccaccgcgccgcgagtcacgccgttcatgcaccggctggtcctggagcacgggaggacgagcatgtcctggttcggccccagccccaaggtgaccatcgtcgacccggacctggccaaggacgtgctgtccaacaagttcggccacttcgagaagctcaaggtcccggcgctgtccaagatgctgggctccggcgtggccagccacgagggcgagaagtgggtcaagcaccggaggatcctcaaccatgcgttccatcttgagaagctcaagcgcatgctgccggcgttttctacgtgctgcgaggagctggtgagcaggtgggcggcggagtcccttggctccgacggctcgtgcgagctggacgtctggccggagctgcagaacctgacgggagacatcatttctcgcaccgtgttcagcagcagctacagcgaagggagaaggatcttccagctacaggtcgagcaagcttcgcttgtcatgaccaacattcggaagatcatgatccccggctacatgaagatgcgcaggaacaacagggaggtggagtcaatcctgcgagagataatcgggaagaggatccaggcgatggaacaaggcgagggcaccaaagacgacctggtgggtctactgctggagacaaacatgagagacgacatggggatgacgatcgaagacgtgatcgaggagtgcaaggtgttctacttcgtcgggatggagaccacgttggtgctgctcatgtggacgatggtggtgctcagcatgcacccggagtggcaggaccgcgcgagggaggaggtgacggctctgttcggcagggacgacaagcccgagtatgacggcctaagccgcctcaaagtcgtgaccatggtgctctacgaggtgctccgactgtacccgccggccacctccgtcgtccgacaaacgtacaaggagatggaggtcggaggcgtcacctaccccgccggcgtgatcctggagctgcccgtgctgctcatccaccacgacccggacatctggggaggcgacgcgcgcgagtttaggcccgataggttctccgagggcgtgtccagggcctccaaggaccccggcgcgttcctcccgttcggttggagcccgcgcatctgcatcggccagaacttcgcgctgctggaggccaagatggcgctctgcatgatcctccagcggtttgagttcgggctcgcgccatcctatgctcatgcgccgcataccatgataaccttgcatcctatgcacggtgcgcagcttaagctcagagcaatatgatctcgacacgatgggtgtcccatcgttgatgccattgttatgtataaccttacaattcagataggcattcggccctgttaatgtctgaaataagtatcttcgcgttggcattttgtaatgtgcttttcacgtaccattggtgctttattgccttttgtatataaacatgtggatatatgtaactcatacattacacaaacaaacacaaacacaccagagccagagctatagggtggagctataaactgtggctctacttttgtacacaaaactggctccacatgttcttccaatcctgcaactgcgtttttcgcatccccgtttggtacagcttctctggctcttcctgtgttcttgatccctttgttccctttgatttcatctccgctcactttctttctgttcgattttgacgcctgcagattgcaaaaacgggactgctaagcaagctaagatttcaatggcatattccttcatacataggccattgagcgacgaggcacgccgcgtcagcactcccttggtggtcacttgcaatgaccagagacgggaggtctccgttgcccagaacatcgctaacaaggaaattgaccgcaccgttgcattcgacaaggtgctaggtccaaagtctcaacagcaggacgtcttcaaccatgctgttgtgccacttgtcagcgaggttttggacggttataattgcacaatatttgcatatggccagactggaactggcaaaacatacataatggaaggaggagggggcaaagcactggtgcaatttttattatatatattcacatgctacacatgtttctgaattctgatgcggttagtttgctgcttcaactgacgccataactctactccatttctatagaatgctgacctcccgactgatgctagtgtcattccaagtgctgttaagcgcatatttgacatcctcgaggcacagagtgcagagtacagcatgaaggtttcttttcttgagctgtacaatgtggagctcactgatcttctagctctacaatgagattgcaagaacgggactgctaagcaagctaagatttcaatggcctattccttcatacataggccattgaaccggaagattttgtcggtattcggtaactataggatcatgtggttgttggtcgagttggaccaattatgctggctcatttgttggatgttttgacaagtcgattctagcttccttatgatctatgttagatttgatgattgcaataagatatcatgaggcgcgccgaggagaacagggg

SEQ ID NO: 213311 - DNA, 1712 bp, Zea Mays
cagcgctcccgctccttgctcgcctccacccgcggccaccaccgccctgcggcccccgccgcttgctagcctccaccgcgccgcgagtcacgccgttcatgcaccggctggtcctggagcacgggaggacgagcatgtcctggttcggccccagccccaaggtgaccatcgtcgacccggacctggccaaggacgtgctgtccaacaagttcggccacttcgagaagctcaaggtcccggcgctgtccaagatgctgggctccggcgtggccagccacgagggcgagaagtgggtcaagcaccggaggatcctcaaccatgcgttccatcttgagaagctcaagcgcatgctgccggcgttttctacgtgctgcgaggagctggtgagcaggtgggcggcggagtcccttggctccgacggctcgtgcgagctggacgtctggccggagctgcagaacctgacgggagacatcatttctcgcaccgtgttcagcagcagctacagcgaagggagaaggatcttccagctacaggtcgagcaagcttcgcttgtcatgaccaacattcggaagatcatgatccccggctacatgtacttgcctaccgcgaacaacaggaagatgcgcaggaacaacagggaggtggagtcaatcctgcgagagataatcgggaagaggatccaggcgatggaacaaggcgagggcaccaaagacgacctggtgggtctactgctggagacaaacatgagagacgacatggggatgacgatcgaagacgtgatcgaggagtgcaaggtgttctacttcgtcgggatggagaccacgttggtgctgctcatgtggacgatggtggtgctcagcatgcacccggagtggcaggaccgcgcgagggaggaggtgacggctctgttcggcagggacgacaagcccgagtatgacggcctaagccgcctcaaagtcattgcaaaaacgggactgctaagcaagctaagatttcaatggcatattccttcatacataggccattgagcgacgaggcacgccgcgtcagcactcccttggtggtcacttgcaatgaccagagacgggaggtctccgttgcccagaacatcgctaacaaggaaattgaccgcaccgttgcattcgacaaggtgctaggtccaaagtctcaacagcaggacgtcttcaaccatgctgttgtgccacttgtcagcgaggttttggacggttataattgcacaatatttgcatatggccagactggaactggcaaaacatacataatggaaggaggagggggcaaagcactgaatgctgacctcccgactgatgctagtgtcattccaagtgctgttaagcgcatatttgacatcctcgaggcacagagtgcagagtacagcatgaaggtttcttttcttgagctgtacaatgtggagctcactgatcttctagctctacaatgagattgcaagaacgggactgctaagcaagctaagatttcaatggcctattccttcatacataggccattgaaccggaagattttgtcggtattcggtaactataggatcatgtggttgttggtcgagttggaccaattatgctggctcatttgttggatgttttgacaagtcgattctagcttccttatgatctatgttagatttgatgattgcaataagatatcatgaggcgcgccgaggagaacagggg

SEQ ID NO: 213312 - DNA, 1099 bp, Zea Mays
catgaagatgcgcaggaacaacagggaggtggagtcaatcctgcgagagataatcgggaagaggatccaggcgatggaacaaggcgagggcaccaaagacgacctggtgggtctactgctggagacaaacatgagagacgacatggggatgacgatcgaagacgtgatcgaggagtgcaaggtgttctacttcgtcgggatggagaccacgttggtgctgctcatgtggacgatggtggtgctcagcatgcacccggagtggcaggaccgcgcgagggaggaggtgacggctctgttcggcagggacgacaagcccgagtatgacggcctaagccgcctcaaagtcattgcaaaaacgggactgctaagcaagctaagatttcaatggcatattccttcatacataggccattgagcgacgaggcacgccgcgtcagcactcccttggtggtcacttgcaatgaccagagacgggaggtctccgttgcccagaacatcgctaacaaggaaattgaccgcaccgttgcattcgacaaggtgctaggtccaaagtctcaacagcaggacgtcttcaaccatgctgttgtgccacttgtcagcgaggttttggacggttataattgcacaatatttgcatatggccagactggaactggcaaaacatacataatggaaggaggagggggcaaagcactgaatgctgacctcccgactgatgctagtgtcattccaagtgctgttaagcgcatatttgacatcctcgaggcacagagtgcagagtacagcatgaaggtttcttttcttgagctgtacaatgtggagctcactgatcttctagctctacaatgagattgcaagaacgggactgctaagcaagctaagatttcaatggcctattccttcatacataggccattgaaccggaagattttgtcggtattcggtaactataggatcatgtggttgttggtcgagttggaccaattatgctggctcatttgttggatgttttgacaagtcgattctagcttccttatgatctatgttagatttgatgattgcaataagatatcatgaggcgcgccgaggagaacagggg

SEQ ID NO: 213313 - DNA, 1937 bp, Zea Mays
cgcagcccaacacccgcatcaaaacacgcacctcggctcctcccctccccaccaggcaccaaggtcgccaccgccaccgctgccccaaagtatcgcacccccaaagccccgctccctcaccttctggaaccttcctcgcatggccccgcccccctccatgcctgccgcctccgatcgcgccggccctggccgcgacgcgggcgactcgtcctcccttcgcctccgccgcgccccctcagccgacgccggcgaccttgccggcgattcctcggtaggcttgcgggagaacggcgagccgcaaccgccgacgaatccgccgccgcaggagcagcagcagcagcacgagatgctatactaccgcgcgtcggcgcccgcccaccgccgcgtcaaggagagccccctcagctctgacgccatcttccggcagagccatgctggtcttctgaatctatgcattgttgttctgatcgcagtgaacagcagactcattattgagaatttaatgaagtatggcctgttgataagagctggattttggtttagtgcaagatcgctgggtgactggccccttctaatgtgctgcctcactctaccagttttcccactagttgcactcatggctgagaagctgatcacaagaaagctcattggtgaacatgtggttattctactccatatcattattacaacatctgccattgtctatccagttgttgtgactcttaagtgtgactcagcagtactatctggatttgtgctaatgtttcttgcgagcatcatgtggatgaagcttgtctcttatgcacatacaaattatgatataagggtattgtccaaaagtactgagaagggtgctgcatatggaaattatgtcgatcctgagaatatgaaagatccaacctttaaaagtctagtgtacttcatgttggccccaacactttgttaccagccaacttatcctcaaactacatgtattagaaagggttgggtgacccagcaactcataaagtgcgtggtttttacaggcttgatgggcttcataattgagcaatatataaacccaattgtgaagaattccaaacatccactgaaagggaattttttgaatgctatagaaagagtcttaaaactctcagtgccaacattatatgctgaacattgtagctgaactcctctgtttcggtgaccgtgaattctataaggactggtggaatgccaaaactgttgaagagtactggaggatgtggaacatgcctgttcataagtggatcatcagacacatatattttccatgtataaggaaaggcttttccaggggtgtagctattctaatctcgtttctggtttcagctgtattccatgagatatgtattgcggtgccgtgccacattttcaaattctgggcattttctgggatcatgtttcagataccgttggtattcttgacaagatatctccatgctacgttcaagcatgtaatggtgggcaacatgatattttggttcttcagtatagtcggacagccgatgtgtgtccttctatactaccatgacgtcatgaacaggcaggcccaggcaagtagatagttcggcagagacatgtacttcaacatcgaccatcagaagcagactggagcgacgcggcaggaagcagcagtagcccctcacttgccattgtttaccatcagctagcagctggtcagcctgaaaatgcttctattccaggcggccgtgctgggatgcagcgtgtacattaccagcgatgcaacgtcaacggttaccaagcgcggataagcagtgctcgtggcatgtgaactctgtacacattgaagtctatatgtccgcggtgctgtgtgcataatgtcgtggtagatgtaatatgtacaatgtatgccacgacttaagaggtcaaaatgaggctcacgtcttgggatggag

SEQ ID NO: 213314 - DNA, 1899 bp, Zea Mays
cgcagcccaacacccgcatcaaaacacgcacctcggctcctcccctccccaccaggcaccaaggtcgccaccgccaccgctgccccaaagtatcgcacccccaaagccccgctccctcaccttctggaaccttcctcgcatggccccgcccccctccatgcctgccgcctccgatcgcgccggccctggccgcgacgcgggcgactcgtcctcccttcgcctccgccgcgccccctcagccgacgccggcgaccttgccggcgattcctcggtaggcttgcgggagaacggcgagccgcaaccgccgacgaatccgccgccgcaggagcagcagcagcagcacgagatgctatactaccgcgcgtcggcgcccgcccaccgccgcgtcaaggagagccccctcagctctgacgccatcttccggcagagccatgctggtcttctgaatctatgcattgttgttctgatcgcagtgaacagcagactcattattgagaatttaatgaagtatggcctgttgataagagctggattttggtttagtgcaagatcgctgggtgactggccccttctaatgtgctgcctcactctaccagttttcccactagttgcactcatggctgagaagctgatcacaagaaagctcattggtgaacatgtggttattctactccatatcattattacaacatctgccattgtctatccagttgttgtgactcttaagtgtgactcagcagtactatctggatttgtgctaatgtttcttgcgagcatcatgtggatgaagcttgtctcttatgcacatacaaattatgatataagggtattgtccaaaagtactgagaagggtgctgcatatggaaattatgtcgatcctgagaatatgaaagatccaacctttaaaagtctagtgtacttcatgttggccccaacactttgttaccaggcttgatgggcttcataattgagcaatatataaacccaattgtgaagaattccaaacatccactgaaagggaattttttgaatgctatagaaagagtcttaaaactctcagtgccaacattatatgtatggctttgcatgttctattgcttttttcatttatggctgaacattgtagctgaactcctctgtttcggtgaccgtgaattctataaggactggtggaatgccaaaactgttgaagagtactggaggatgtggaacatgcctgttcataagtggatcatcagacacatatattttccatgtataaggaaaggcttttccaggggtgtagctattctaatctcgtttctggtttcagctgtattccatgagatatgtattgcggtgccgtgccacattttcaaattctgggcattttctgggatcatgtttcagataccgttggtattcttgacaagatatctccatgctacgttcaagcatgtaatggtgggcaacatgatattttggttcttcagtatagtcggacagccgatgtgtgtccttctatactaccatgacgtcatgaacaggcaggcccaggcaagtagatagttcggcagagacatgtacttcaacatcgaccatcagaagcagactggagcgacgcggcaggaagcagcagtagcccctcacttgccattgtttaccatcagctagcagctggtcagcctgaaaatgcttctattccaggcggccgtgctgggatgcagcgtgtacattaccagcgatgcaacgtcaacggttaccaagcgcggataagcagtgctcgtggcatgtgaactctgtacacattgaagtctatatgtccgcggtgctgtgtgcataatgtcgtggtagatgtaatatgtacaatgtatgccacgacttaagaggtcaaaatgaggctcacgtcttgggatggag

SEQ ID NO: 213315 - DNA, 1906 bp, Zea Mays
cgcagcccaacacccgcatcaaaacacgcacctcggctcctcccctccccaccaggcaccaaggtcgccaccgccaccgctgccccaaagtatcgcacccccaaagccccgctccctcaccttctggaaccttcctcgcatggccccgcccccctccatgcctgccgcctccgatcgcgccggccctggccgcgacgcgggcgactcgtcctcccttcgcctccgccgcgccccctcagccgacgccggcgaccttgccggcgattcctcggtaggcttgcgggagaacggcgagccgcaaccgccgacgaatccgccgccgcaggagcagcagcagcagcacgagatgctatactaccgcgcgtcggcgcccgcccaccgccgcgtcaaggagagccccctcagctctgacgccatcttccggcagagccatgctggtcttctgaatctatgcattgttgttctgatcgcagtgaacagcagactcattattgagaatttaatgaagtatggcctgttgataagagctggattttggtttagtgcaagatcgctgggtgactggccccttctaatgtgctgcctcactctaccagttttcccactagttgcactcatggctgagaagctgatcacaagaaagctcattggtgaacatgtggttattctactccatatcattattacaacatctgccattgtctatccagttgttgtgactcttaagtgtgactcagcagtactatctggatttgtgctaatgtttcttgcgagcatcatgtggatgaagcttgtctcttatgcacatacaaattatgatataagggtattgtccaaaagtactgagaagggtgctgcatatggaaattatgtcgatcctgagaatatgaaagatccaacctttaaaagtctagtgtacttcatgttggccccaacactttgttaccagccaacttatcctcaaactacatgtattagaaagggttgggtgacccagcaactcataaagtgcgtggtttttacaggcttgatgggcttcataattgagcaatatataaacccaattgtgaagaattccaaacatccactgaaagggaattttttgaatgctatagaaagagtcttaaaactctcagtgccaacattatatgtatggctttgcatgttctattgcttttttcatttatggctgaacattgtagctgaactcctctgtttcggtgaccgtgaattctataaggactggtggaatgccaaaactgttgaagagtactggaggatgtggaacatgcctgttcataagtggatcatcagacacatatattttccatgtataaggaaaggcttttccaggggtgtagctattctaatctcgtttctggtttcagctgtattccatgagatatgtattgcggtgccgtgccacattttcaaattctgggcattttctgggatcatgtttcagataccgttggtattcttgacaagatatctccatgctacgttcaagcatgtaatggtgggcaacatgatattttggttcttcagtatagtcggacagccgatgtgtgtccttctatactaccatgacgtcatgaacaggcaggcccaggcaagtagatagttcggcagagacatgtacttcaacatcgaccatcagaagcagactggagcgacgcggcaggaagcagcagcggccgtgctgggatgcagcgtgtacattaccagcgatgcaacgtcaacggttaccaagcgcggataagcagtgctcgtggcatgtgaactctgtacacattgaagtctatatgtccgcggtgctgtgtgcataatgtcgtggtagatgtaatatgtacaatgtatgccacgacttaagaggtcaaaatgaggctcacgtcttgggatggag

SEQ ID NO: 213316 - DNA, 2711 bp, Zea Mays
cttggaggcgaagtcaccaacaaaacaagcgtctccctccaccggtccaccccccctctggctctctgcttctgcacctgcgtgtgctagcgcgagcgcgtgcgtcccttccccggcacgagcggcgcacaccgtcacatccgcgctccgttcgccttccagaaaatttaaaccccagcggagccggccacggccagtcagccgccacacggtctccgacgcgctgcccgctcgcctgccaaacccccaccccctcggcggcgatgctgacacgtcgccgtagcaaccacccgggctgctccttccccctcccgttcctcgtctgcggcctgctcctcgctgcggccgtcgcattttccccagctgcggccgccgaagcagctgacggcggcgctgggcacgagggccgcgcggggaaaccggaggtagaggccgaggcggaggcgcgcggggatggggttgccgtggcggaagccggcggcgaggtggtggctcagggcaatgccacggaggccaaggagggcagccttgccgacatgatcgaccgcgcgctggagaaggagttcccggagtccgagggcgagcagggcggtggagagaccgaccctggcagcttcaacaacacggtagctgagaagcagggagttcttgaaactgtagctagaagagtaacaaagaagaatgaaaccaaagataacaagtcatttccttttaaggaggttttcttggatcgaactgagcaagaggatgttcccacgttgatagatcggaaggataatgtttttatcatctcaaacccaaagtcaaaataccctgtgctgcagctggaccttaggttgatatcagatcttgttgttgttatcgtatccgctacatgtggtggaattgcctttgcttgccttgggcaaccggtgattacaggttatctacttgcaggatctataattgggcctggaggttttagctttgtcaatgaaatggtgcaagttgaaacggtagcccagtttggtgtgatatttctcctgtttgcattgggacttgagttttctactgcaaaacttcgagttgttcgtgctgttgctgttctcggaggattgctccaaattatgttgttcatgtttctttgtggtattttggctaccctatgtggaggcaaaactaaagaaggtgtttttgttggtgttcttctctccatgtcttcaacagctgtcgttttaaagtttctgatggaaagaaatagtatcaatgctcttcatggccaggttacagtcgggatacttatattgcaggattgtgctgttggcctgctgtttgcgcttcttccaattttgagtggtacatctggccttcttcacggagttgcatcaatgatgaagtcgctggtggtattgataacattcctgaccattctctctatcctctcccgtaccggcgttccttggtttcttaaactgatgataagtctgtcatcacagacaaatgaactatatcagctggcagcagttgcattctgcttgttatttgcttggtgtagtgataagttgggcctgagtctcgagttgggttcttttgcagctggagtaatgatatcaacaacagaccttgcacaacatactcttgaacaaatcgaacccatccgcaactttttcgctgctcttttccttgccagcattgggatgctaattaatgtccatttcttgtggaaccatgtggatatactccttgcagcagtaattttggtgatcaccgtaaagacctttattgttgctattgttgtaaaagggtttgggtatagcaacaaaacatctcttcttgtcggcatgtcacttgcacaaataggagagtttgcttttgttctcttaagccgtgcttcaagtattcatctaatcgagggcaagctatacctgcttcttcttggaaccactgcacttagtttggtgacaacccctctgctattcaaaatgatccctgcaatggtccacctcggggttcttttgagatggttttctgtcgataccaatcaggtggaggtacacgatcataccactgggcctgaaaaatgatgtcctccgcatcgatagcggcaagcgcataaatctgatagtccaaggctcacatgactcatgacacatttgacacactgcaagctactttttgtatggcttaagtttacaagctctgtaaagtgttttcacctgtactgaagagtttctagcagatatacgagggtggaggcaagagaactcaactcagatcttgctcctagtgcaagatcaatcctcccccgtcatgacggctgcaagggcaaagtcgggttttgccgttcttgagagcagtgtgtcttggatgattggtgcagtgagtggctgtcgaccccaaatgagggtctcgtgtaacatatgaatgtatggtgattaattaattggattagcatgataggatgtaggcctgatcctcagtaaaggttatgcccttgtgttctttcaccaaagttgtgtatcctcactacacgaaagtgtgtacgacatccatcagatcacgaattttgttgtgtagccatatatgtcagtttcttaacatgtccaagttcatgagtttttttttcctcacgggaagcttttgagtaacctttgttcagatatcactttgttggatcgagtccaggatctcaatgatgggtgtgtttcaatgaatttgttcactttttatta

SEQ ID NO: 213317 - DNA, 2713 bp, Zea Mays
ccacactcgtctccatctacaggatcaaaagtttaaaactgcagagaccaaaaatcgccatccacgccagggaaacaaaagcttccacccaaacaaactcccctcgctgaaactcgccgccgtctcctcgccttccgcctcagcacaggccccgtcgcggtctcctaggccacgcttccgcctctcctcgtcggctgcccgcctccgcccggcggccggagcaggctaggttaccagcgccccccacttcgcggtcgagctggaggacacgcgtagcaacgccgggttcttctgcggcgacctgtggtgtggcctcatggagcccaagggcgagtcaggccagaagcctattgaagaagcaatcgacagcttgaagactgatgctagcatgaaggcaaacaatgtcaacttgctagtactgtgaaggatagagaaatgaaccaagaaacttcttttggcgaccaagggatgcattactatggatattattatcctggtgcatacggaggatgggatgagaatggctactttgttggatataatggcctagaggtggttcaagctgacaatggttcatatctgtgttatcctctggggtatgaaaatggatatgcttcttatattccggttgttcctggaggcattgccagtgtggatggtcagtatgtcagcaaagaaccatattactccagtgcacttccaattcaggatcctagcacacctggcatttttgctcagccaattgcatatggaactgaactagtacctgcctactcatgggacccttttgttcttctggatggggttcagggacatccagttggtgtgcatcatacaaattatgctccaagaccaaaatattcttctaataagcatgttgttccttctttgaaagcttcccacagtgcaaaatccacagcagatactgtcaaaggatcatcatcagctctagaaactgtaccaaatgctgccaatagcagcacatcatcaaagggtgcaaataaggcacctggtgcttccataacaaaaggatatcttccatctagcaagtttgtgatgcacagtaataaccaagcaaaaagcagtgtttatcaaagcaaaggcatcaatctgaaagaaagtggtagaagctggcacagcagtgagaagcttaaagcgagaagtaagctaaatggacatggcgattctgaatctaatgagaacaaccacactgataactcgaaatatagtttgagctctcaatctgatgttgttggattgtcaagtgtaggggatgctaacgccagcataccttcacctgtcgtaataagaaaaactgcatacaatctttcagattttgttacaaagtatgagcaagctctattctttgtaattaagtcctacagtgaagatgatattcacaagagtattaagtacaatgtttgggcaagtactcctaatggaaataaaaggcttgacaatgcctataggcttgcacaggaaaggatggcagaaaaaggaaccaaatgtcctgttttccttttcttctcagttaatgcaagtggtcagttctgtggcgtggctgagatggttggcccagtagatttcaacaggaacatgaacttctggcaacaggacaagtggaatggtttcttctctgtaaaatggcacattattaaggatgttcccaatccacaatttcgccatataattttggagaataatgagaataaacctgtgacaaacagcagggacacgcaagaggtcaaattttcacaaggtacagagatgttgaacattttcaagaacttcacgtgtaaagcatcaatactggatgactttgacttctacgaaaatcggcagaaagtaatgcaggatagaagaggcaagccacttacatcgtttggtcacccattgccaaaagctgaaaaaactgcagaagttaaaaggcaaacacaattgataagtgccacggaagttggtagagccgatacaaccaaggaaaatgaggagaagagcagcagtgttccagaaatactcaacgcagcatgtagtaacaaggagaaacccaacaaaatcgcaacagacggatgatgccttggctagttgactgggaaaatgagatagcttctggaacggacttcaacttgaattcctgaaatcataagttcgatgtgcgcaatgtcaagaaaccacaattggtcatgggttctcttgcattttctcatggaagtgaagaaacgaaaaaagtgaagcaacggaactgtcttcccacgagaaatgttcaatgactgggaaaaaggttctaggacgcatttaggttgaggcccctggtgctaaggcattagagcgccctccttgtctgtttttcccccatattggagggtcgtttcttttcttttgtcgtgcccctttttcccctcttcttttgcctattattctgcagctgagattttgggaagcagtttgcacttaggtccaaagaaagggaatgtctgttgctttgtgggttgtcctctaggatgtggtaggtgttgactgttttttagaatctgtgcacgttctagaaactgacagaaaaaaagagaaaaaaggattgtgagggattagaaataaaaaggatcttaaaaagatacatggtatcttatgtttactgcttcttccattatcaagaaaactaacaatgggtctagatgctttcaatagtaagactatatttatataaagttcaatt

SEQ ID NO: 213318 - DNA, 2293 bp, Zea Mays
attcctaaaataagtaaccgagctcgggattcttcgcaatttgatttgcgagatcacccccataaaggcatcatgaatctttatgcctgtaaagacatcccactgtctctttcgttttcgataagatgttttggccgttacataatgcctgtaaggtagaatgccattgcagttgttgcatcagaaagcagccatttaacgccattgtaaagtgagtgatgattaaatacaaccacacttctgtctctcaggtttctgtacatggagtttttattgcacctcttcttccccagcaattagtacttgcagttagactaaatgaatcttgaatgccccttaactgttggctttacatggaactacttttgcatataccagacaactattttgaacttcaatatgtttttcaattccagcaattgatcgaaacatgatatatttgacatattcatgatggatttttgtatttgatgtgtcgctttttcatctatcaatgtaattcttggacataacattgcgcacaggtaccaaattcacacccttgttattgcgagttctgtaaatcatgatgttcacatgtgatggtttgattcagttcaatggttagcaagctatttgaacatgatactatagtagtgcatatttgctgtacaaatggccactgcccagctatttgcataagatattatgtttctcctgtgacattttctatgccacatacatttatatggcatttttgtgcaatttagtaccggtttttggttgatggtgtctggaggtgtgatgagacaaaaccctttgtacgtgatgaatatggactgatcagcaatgaagtgcttgtggaaaacaatgtactacccgttgtgcagccagagccttctatcagaggaactaatatggataaggatgcccctggagccatcatctcagaacccaagcatgcaaatagcagttatccgccatgtggtctctggaatattattacacaataccatatatgacgttgttcccctttctagcaagggaaccataacaggcatgctcactgcatcagattttgttttaatcttgagaaagttgcagagaaacattcaagttattggcaacgaagagcccatttctgcttggaaagaagcaaagctacagttctatggtgggcctgatggtgctgtcatgcagagaacgccattaatccatacaggcaacattgatctcagggccaagaaagaagctcaactcggcatgcttcctgtttgaagcaagggcaacaaacttaccccaccagatctctgtcgccaaagcagggctagtgaataagctgtgtttcctcccggattgtcactgcttttatatttgtgcatttattttgagggaaacattttgcccaaaaaaggcctgcagtgcacgttttaaacaagtcatttgaaccaactcttatgctgaaaactgtatgtgatactgcagaaggcaacacactagcttgataggaaagttggttggcaagcatagtctggttctcatggcaggtggactctggtgccttcatatatctatatatatattttaagttgacgatcttcgtgatgctgaaactgatgaagacctccgatgaaaaaagagacatgctgcacatgcacgagggtacttgcagatcgatgtcggctctatggacgaacactcgaccaagtcagatgaggagtatgagggcctagccatgcgcgacgtgatggctactggtccgacgatgagcagcaagctgtgagttaaagatgaactcacctgccctggagagtaacatccataggagtgaggcaaaatggctggtaccaccacaacatggacccgttcctgaagatgtccaaggaggtggtagccgacaccataatgtcttgtgtcattgtgtcaccggtcggcaacacactgcgctggtaccggcgggtgttgtgtttcttaggcgtctgcttctgtgctttgagttgtgctatagagtggttgtgccaactactgattttaaaagaaaaaggtgagctgagaatcattgttgaaaacaaacatgtaattgttcgttctcatcagttgtgccaactaccaagcatttcattgatcagaatttatcgttgctcatgagaaccaaaagtaagacacttctcaataacattggatgcaaatttctgctagcttatcttcactatcttttctcgtatcaatataacacacatttatacataatttttgtgttattatatgttttcgttgcaacgcacgggcactcacctagttatagaataaaaat

SEQ ID NO: 213319 - DNA, 2422 bp, Zea Mays
gaacagagaaaataccaggagcaaatgactgcatttttagttaatccttttattcctaaattaattgtgtttgttaatgcttttattcctaaaataagtaaccgagctcgggattcttcgcaatttgatttgcgagatcacccccataaaggcatcatgaatctttatgcctgtaaagacatcccactgtctctttcgttttcgataagatgttttggccgttacataatgcctgtaaggtagaatgccattgcagttgttgcatcagaaagcagccatttaacgccattgtaaagtgagtgatgattaaatacaaccacacttctgtctctcaggtttctgtacatggagtttttattgcacctcttcttccccagcaattagtacttgcagttagactaaatgaatcttgaatgccccttaactgttggctttacatggaactacttttgcatataccagacaactattttgaacttcaatatgtttttcaattccagcaattgatcgaaacatgatatatttgacatattcatgatggatttttgtatttgatgtgtcgctttttcatctatcaatgtaattcttggacataacattgcgcacaggtaccaaattcacacccttgttattgcgagttctgtaaatcatgatgttcacatgtgatggtttgattcagttcaatggttagcaagctatttgaacatgatactatagtagtgcatatttgctgtacaaatggccactgcccagctatttgcataagatattatgtttctcctgtgacattttctatgccacatacatttatatggcatttttgtgcaatttagtaccggtttttggttgatggtgtctggaggtgtgatgagacaaaaccctttgtacgtgatgaatatggactgatcagcaatgaagtgcttgtggaaaacaatgtactacccgttgtgcagccagagccttctatcagaggaactaatatggataagggtaccattttgaaaacaatgcccctggagccatcatctcagaacccaagcatgcaaatagcagttatccgccatgtggtctctggaatattattacacaataccatatatgacgttgttcccctttctagcaagggtcttgctctggttcctttttgggatgaccgtcagggaaccataacaggcatgctcactgcatcagattttgttttaatcttgagaaagttgcagagaaacattcaagttattggcaacgaagagcccatttctgcttggaaagaagcaaagctacagttctatggtgggcctgatggtgctgtcatgcagagaacgccattaatccattttgtacagacaggcaacattgatctcagggccaagaaagaagctcaactcggcatgcttcctgtttgaagcaagggcaacaaacttaccccaccagatctctgtcgccaaagcagggctagtgaataagctgtgtttcctcccggattgtcactgcttttatatttgtgcatttattttgagggaaacattttgcccaaaaaaggcctgcagtgcacgttttaaacaagtcatttgaaccaactcttatgctgaaaactgtatgtgatactgcagaaggcaacacactagcttgataggaaagttggttggcaagcataggtggactctggtgccttcatatatctatatatatattttaagttgacgatcttcgtgatgctgaaactgatgaagacctccgatgaaaaaagagacatgctgcacatgcacgagggtacttgcagatcgatgtcggctctatggacgaacactcgaccaagtcagatgaggagtatgagggcctagccatgcgcgacgtgatggctactggtccgacgatgagcagcaagctgtgagttaaagatgaactcacctgccctggagagtaacatccataggagtgaggcaaaatggctggtaccaccacaacatggacccgttcctgaagatgtccaaggaggtggtagccgacaccataatgtcttgtgtcattgtgtcaccggtcggcaacacactgcgctggtaccggcgggtgttgtgtttcttaggcgtctgcttctgtgctttgagttgtgctatagagtggttgtgccaactactgattttaaaagaaaaaggtgagctgagaatcattgttgaaaacaaacatgtaattgttcgttctcatcagttgtgccaactaccaagcatttcattgatcagaatttatcgttgctcatgagaaccaaaagtaagacacttctcaataacattggatgcaaatttctgctagcttatcttcactatcttttctcgtatcaatataacacacatttatacataatttttgtgttattatatgttttcgttgcaacgcacgggcactcacctagttatagaataaaaat

SEQ ID NO: 213320 - DNA, 2565 bp, Zea Mays
gctgtcaatcgcctccccactgcggcagatccgcaatccgctcctccaccaccgcgctcctcacccacgccagggacaagactgtctacctccacgcccgcctcaccaactccgcggccaccgccaccgccacgcccctcccccatggtcgtcgagtccgagtggtggaaccagcgacgcatgcgcgtcgagggcgacgtgaaataggtgctccaccgcgggcacaacgggcacagtggaggtggaacgagcaccatcgagttctggttccaccgaatccaccgctcgcacaccggatccatcgctcccacatgcccgcacaccggatccaccgctccctcccccgcgatggcctggttccaccgagacaactgcggggctagggtttggattcgtgggtggagcccaaggctagatccagcagggggagggaggtagaggaggggagggaactgctggtggtcggcagtgggcgaaggcgcgacaatccaggatatggattcctgagcgtcacccacccgcccatccacgtcgcgcggtgtagtcatcccctatccgcagccgcctcgctccctctcccacaacaaatccattctcctcctcccactcgacgaggatcgcgaggatgctggaggacgtcgtcgctgtcacgcttgacgttagggcctccgatgcttgacgttagggcctctcgcttgaagaggaacacaaacagagctcatgttttttattttgctctgcattatctactgcttctctgtgggggcgttatttacagtatgtggcctgtttgttgtgttgttcctgcggaagggcgggcgggccgaaggtgtttaagaaaatgttgttgtcaacatcaacctcctggaagggccagaacgcaggcagcgcctcaactcgtcaccccatcagcacgatgctacttcatgtggagctggtatgtaggatgattatcacgagtacttcaagcgctcattttaggaagacatcgctgcgcaagtgcctcaaggagtggaatgcaatgaagtgcttgtggaaaacaatgtactacccgttgtgcagccagagccttctatcagaggaactaatatggataaggatgcccctggagccatcatctcagaacccaagcatgcaaatagcagttatccgccatgtggtctctggaatattattacacaataccatatatgacgttgttcccctttctagcaagttaacagttttggacactcagcttcctgttaaacaagcatttaaaataatgcatgatgtgggtcttgctctggttcctttttgggatgaccgtcagggaaccataacaggcatgctcactgcatcagattttgttttaatcttgagaaagttgcagagaaacattcaagttattggcaacgaagagcccatttctgcttggaaagaagcaaagctacagttctatggtgggcctgatggtgctgtcatgcagagaacgccattaatccatacaggcaacattgatctcagggccaagaaagaagctcaactcggcatgcttcctgtttgaagcaagggcaacaaacttaccccaccagatctctgtcgccaaagcagggctagtgaataagctgtgtttcctcccggattgtcactgcttttatatttgtgcatttattttgagggaaacattttgcccaaaaaaggcctgcagtgcacgttttaaacaagtcatttgaaccaactcttatgctgaaaactgtatgtgatactgcagaaggcaacacactagcttgataggaaagttggttggcaagcataggtggactctggtgccttcatatatctatatatatattttaagttgacgatcttcgtgatgctgaaactgatgaagacctccgatgaaaaaagagacatgctgcacatgcacgagggtacttgcagatcgatgtcggctctatggacgaacactcgaccaagtcagatgaggagtatgagggcctagccatgcgcgacgtgatggctactggtccgacgatgagcagcaagctgtgagttaaagatgaactcacctgccctggagagtaacatccataggagtgaggcaaaatggctggtaccaccacaacatggacccgttcctgaagatgtccaaggaggtggtagccgacaccataatgtcttgtgtcattgtgtcaccggtcggcaacacactgcgctggtaccggcgggtgttgtgtttcttaggcgtctgcttctgtgctttgagttgtgctatagagtggttgtgccaactactgattttaaaagaaaaaggtgagctgagaatcattgttgaaaacaaacatgtaattgttcgttctcatcagttgtgccaactaccaagcatttcattgatcagaatttatcgttgctcatgagaaccaaaagtaagacacttctcaataacattggatgcaaatttctgctagcttatcttcactatcttttctcgtatcaatataacacacatttatacataatttttgtgttattatatgttttcgttgcaacgcacgggcactcacctagttatagaataaaaat

SEQ ID NO: 213321 - DNA, 3407 bp, Zea Mays
gctgtcaatcgcctccccactgcggcagatccgcaatccgctcctccaccaccgcgctcctcacccacgccagggacaagactgtctacctccacgcccgcctcaccaactccgcggccaccgccaccgccacgcccctcccccatggtcgtcgagtccgagtggtggaaccagcgacgcatgcgcgtcgagggcgacgtgaaataggtgctccaccgcgggcacaacgggcacagtggaggtggaacgagcaccatcgagttctggttccaccgaatccaccgctcgcacaccggatccatcgctcccacatgcccgcacaccggatccaccgctccctcccccgcgatggcctggttccaccgagacaactgcggggctagggtttggattcgtgggtggagcccaaggctagatccagcagggggagggaggtagaggaggggagggaactgctggtggtcggcagtgggcgaaggcgcgacaatccaggatatggattcctgagcgtcacccacccgcccatccacgtcgcgcggtgtagtcatcccctatccgcagccgcctcgctccctctcccacaacaaatccattctcctcctcccactcgacgaggatcgcgaggatgctggaggacgtcgtcgctgtcacgcttgacgttagggcctccgatgcttgacgttagggcctctcgcttgaagaggaacacaaacagagctcatgttttttattttgctctgcattatctactgcttctctgtgggggcgttatttacagtatgtggcctgtttgttgtgttgttcctgcggaagggcgggcgggccgaaggtgtttaagaaaatgttgttgtcaacatcaacctcctggaagggccagaacgcaggcagcgcctcaactcgtcaccccatcagcacggatgattatcacgagtacttcaagcgctcattttaggaagacatcgctgcgcaagtgcctcaaggagtggaatggtgagcccctgtccatctactgaacagagaaaataccaggagcaaatgactgcatttttagttaatccttttattcctaaattaattgtgtttgttaatgcttttattcctaaaataagtaaccgagctcgggattcttcgcaatttgatttgcgagatcacccccataaaggcatcatgaatctttatgcctgtaaagacatcccactgtctctttcgttttcgataagatgttttggccgttacataatgcctgtaaggtagaatgccattgcagttgttgcatcagaaagcagccatttaacgccattgtaaagtgagtgatgattaaatacaaccacacttctgtctctcaggtttctgtacatggagtttttattgcacctcttcttccccagcaattagtacttgcagttagactaaatgaatcttgaatgccccttaactgttggctttacatggaactacttttgcatataccagacaactattttgaacttcaatatgtttttcaattccagcaattgatcgaaacatgatatatttgacatattcatgatggatttttgtatttgatgtgtcgctttttcatctatcaatgtaattcttggacataacattgcgcacaggtaccaaattcacacccttgttattgcgagttctgtaaatcatgatgttcacatgtgatggtttgattcagttcaatggttagcaagctatttgaacatgatactatagtagtgcatatttgctgtacaaatggccactgcccagctatttgcataagatattatgtttctcctgtgacattttctatgccacatacatttatatggcatttttgtgcaatttagtaccggtttttggttgatggtgtctggaggtgtgatgagacaaaaccctttgtacgtgatgaatatggactgatcagcaatgaagtgcttgtggaaaacaatgtactacccgttgtgcagccagagccttctatcagaggaactaatatggataaggatgcccctggagccatcatctcagaacccaagcatgcaaatagcagttatccgccatgtggtctctggaatattattacacaataccatatatgacgttgttcccctttctagcaagggtcttgctctggttcctttttgggatgaccgtcagggaaccataacaggcatgctcactgcatcagattttgttttaatcttgagaaagttgcagagaaacattcaagttattggcaacgaagagcccatttctgcttggaaagaagcaaagctacagttctatggtgggcctgatggtgctgtcatgcagagaacgccattaatccatacaggcaacattgatctcagggccaagaaagaagctcaactcggcatgcttcctgtttgaagcaagggcaacaaacttaccccaccagatctctgtcgccaaagcagggctagtgaataagctgtgtttcctcccggattgtcactgcttttatatttgtgcatttattttgagggaaacattttgcccaaaaaaggcctgcagtgcacgttttaaacaagtcatttgaaccaactcttatgctgaaaactgtatgtgatactgcagaaggcaacacactagcttgataggaaagttggttggcaagcataggtggactctggtgccttcatatatctatatatatattttaagttgacgatcttcgtgatgctgaaactgatgaagacctccgatgaaaaaagagacatgctgcacatgcacgagggtacttgcagatcgatgtcggctctatggacgaacactcgaccaagtcagatgaggagtatgagggcctagccatgcgcgacgtgatggctactggtccgacgatgagcagcaagctgtgagttaaagatgaactcacctgccctggagagtaacatccataggagtgaggcaaaatggctggtaccaccacaacatggacccgttcctgaagatgtccaaggaggtggtagccgacaccataatgtcttgtgtcattgtgtcaccggtcggcaacacactgcgctggtaccggcgggtgttgtgtttcttaggcgtctgcttctgtgctttgagttgtgctatagagtggttgtgccaactactgattttaaaagaaaaaggtgagctgagaatcattgttgaaaacaaacatgtaattgttcgttctcatcagttgtgccaactaccaagcatttcattgatcagaatttatcgttgctcatgagaaccaaaagtaagacacttctcaataacattggatgcaaatttctgctagcttatcttcactatcttttctcgtatcaatataacacacatttatacataatttttgtgttattatatgttttcgttgcaacgcacgggcactcacctagttatagaataaaaat

SEQ ID NO: 213322 - DNA, 2584 bp, Zea Mays
gctgtcaatcgcctccccactgcggcagatccgcaatccgctcctccaccaccgcgctcctcacccacgccagggacaagactgtctacctccacgcccgcctcaccaactccgcggccaccgccaccgccacgcccctcccccatggtcgtcgagtccgagtggtggaaccagcgacgcatgcgcgtcgagggcgacgtgaaataggtgctccaccgcgggcacaacgggcacagtggaggtggaacgagcaccatcgagttctggttccaccgaatccaccgctcgcacaccggatccatcgctcccacatgcccgcacaccggatccaccgctccctcccccgcgatggcctggttccaccgagacaactgcggggctagggtttggattcgtgggtggagcccaaggctagatccagcagggggagggaggtagaggaggggagggaactgctggtggtcggcagtgggcgaaggcgcgacaatccaggatatggattcctgagcgtcacccacccgcccatccacgtcgcgcggtgtagtcatcccctatccgcagccgcctcgctccctctcccacaacaaatccattctcctcctcccactcgacgaggatcgcgaggatgctggaggacgtcgtcgctgtcacgcttgacgttagggcctccgatgcttgacgttagggcctctcgcttgaagaggaacacaaacagagctcatgttttttattttgctctgcattatctactgcttctctgtgggggcgttatttacagtatgtggcctgtttgttgtgttgttcctgcggaagggcgggcgggccgaaggtgtttaagaaaatgttgttgtcaacatcaacctcctggaagggccagaacgcaggcagcgcctcaactcgtcaccccatcagcacggatgattatcacgagtacttcaagcgctcattttaggaagacatcgctgcgcaagtgcctcaaggagtggaatggtgtgatgagacaaaaccctttgtacgtgatgaatatggactgatcagcaatgaagtgcttgtggaaaacaatgtactacccgttgtgcagccagagccttctatcagaggaactaatatggataaggatgcccctggagccatcatctcagaacccaagcatgcaaatagcagttatccgccatgtggtctctggaatattattacacaataccatatatgacgttgttcccctttctagcaagttaacagttttggacactcagcttcctgttaaacaagcatttaaaataatgcatgatgtgggtcttgctctggttcctttttgggatgaccgtcagggaaccataacaggcatgctcactgcatcagattttgttttaatcttgagaaagttgcagagaaacattcaagttattggcaacgaagagcccatttctgcttggaaagaagcaaagctacagttctatggtgggcctgatggtgctgtcatgcagagaacgccattaatccatacaggcaacattgatctcagggccaagaaagaagctcaactcggcatgcttcctgtttgaagcaagggcaacaaacttaccccaccagatctctgtcgccaaagcagggctagtgaataagctgtgtttcctcccggattgtcactgcttttatatttgtgcatttattttgagggaaacattttgcccaaaaaaggcctgcagtgcacgttttaaacaagtcatttgaaccaactcttatgctgaaaactgtatgtgatactgcagaaggcaacacactagcttgataggaaagttggttggcaagcataggtggactctggtgccttcatatatctatatatatattttaagttgacgatcttcgtgatgctgaaactgatgaagacctccgatgaaaaaagagacatgctgcacatgcacgagggtacttgcagatcgatgtcggctctatggacgaacactcgaccaagtcagatgaggagtatgagggcctagccatgcgcgacgtgatggctactggtccgacgatgagcagcaagctgtgagttaaagatgaactcacctgccctggagagtaacatccataggagtgaggcaaaatggctggtaccaccacaacatggacccgttcctgaagatgtccaaggaggtggtagccgacaccataatgtcttgtgtcattgtgtcaccggtcggcaacacactgcgctggtaccggcgggtgttgtgtttcttaggcgtctgcttctgtgctttgagttgtgctatagagtggttgtgccaactactgattttaaaagaaaaaggtgagctgagaatcattgttgaaaacaaacatgtaattgttcgttctcatcagttgtgccaactaccaagcatttcattgatcagaatttatcgttgctcatgagaaccaaaagtaagacacttctcaataacattggatgcaaatttctgctagcttatcttcactatcttttctcgtatcaatataacacacatttatacataatttttgtgttattatatgttttcgttgcaacgcacgggcactcacctagttatagaataaaaat

SEQ ID NO: 213323 - DNA, 3177 bp, Zea Mays
gctgtcaatcgcctccccactgcggcagatccgcaatccgctcctccaccaccgcgctcctcacccacgccagggacaagactgtctacctccacgcccgcctcaccaactccgcggccaccgccaccgccacgcccctcccccatggtcgtcgagtccgagtggtggaaccagcgacgcatgcgcgtcgagggcgacgtgaaataggtgctccaccgcgggcacaacgggcacagtggaggtggaacgagcaccatcgagttctggttccaccgaatccaccgctcgcacaccggatccatcgctcccacatgcccgcacaccggatccaccgctccctcccccgcgatggcctggttccaccgagacaactgcggggctagggtttggattcgtgggtggagcccaaggctagatccagcagggggagggaggtagaggaggggagggaactgctggtggtcggcagtgggcgaaggcgcgacaatccaggatatggattcctgagcgtcacccacccgcccatccacgtcgcgcggtgtagtcatcccctatccgcagccgcctcgctccctctcccacaacaaatccattctcctcctcccactcgacgaggatcgcgaggatgctggaggacgtcgtcgctgtcacgcttgacgttagggcctccgatgcttgacgttagggcctctcgcttgaagaggaacacaaacagagctcatgttttttattttgctctgcattatctactgcttctctgtgggggcgttatttacagtatgtggcctgtttgttgtgttgttcctgcggaagggcgggcgggccgaaggtgtttaagaaaatgttgttgtcaacatcaacctcctggaagggccagaacgcaggcagcgcctcaactcgtcaccccatcagcacggtgagccccttatctggattgttatcatggtacgcggtgcgctgcaagcctgcaagtgacatcaaattggattggtagtcagcgggtgtcatagtgtcagttcgatggaatggttctgcagtgcatgtgcttctgtaatttccgcaagaagcagtcaacttctccctgatatggcactaggacattgtagtgattcccgcacgtttgtggaactcgacaacctaccagagcgccagatgtttcattgagaagagaactcctccagtctggctttccactggtctagtctctcctttaaaccaaatttgataccactcattgaagtcaatagctgggatgtagacatgtgaaaccacacctgtggaactttcagcgtgtgatgactgggtcactggtggaataccgtgttttttgagctgctcgctttcagttcgcggtcatagtcctgtgttttttgccttcagtttcttgatgtagttattgcctaaaatttctatatcttgttcatcgtactggagatgctacttcatgtggagctggtatgtaggatgattatcacgagtacttcaagcgctcattttaggaagacatcgctgcgcaagtgcctcaaggagtggaatgtaccggtttttggttgatggtgtctggaggtgtgatgagacaaaaccctttgtacgtgatgaatatggactgatcagcaatgaagtgcttgtggaaaacaatgtactacccgttgtgcagccagagccttctatcagaggaactaatatggataagggtaccattttgaaaacaatgcccctggagccatcatctcagaacccaagcatgcaaatagcagttatccgccatgtggtctctggaatattattacacaataccatatatgacgttgttcccctttctagcaagttaacagttttggacactcagcttcctgttaaacaagcatttaaaataatgcatgatgtgggtcttgctctggttcctttttgggatgaccgtcagggaaccataacaggcatgctcactgcatcagattttgttttaatcttgagaaagttgcagagaaacattcaagttattggcaacgaagagcccatttctgcttggaaagaagcaaagctacagttctatggtgggcctgatggtgctgtcatgcagagaacgccattaatccatacaggcaacattgatctcagggccaagaaagaagctcaactcggcatgcttcctgtttgaagcaagggcaacaaacttaccccaccagatctctgtcgccaaagcagggctagtgaataagctgtgtttcctcccggattgtcactgcttttatatttgtgcatttattttgagggaaacattttgcccaaaaaaggcctgcagtgcacgttttaaacaagtcatttgaaccaactcttatgctgaaaactgtatgtgatactgcagaaggcaacacactagcttgataggaaagttggttggcaagcataggtggactctggtgccttcatatatctatatatatattttaagttgacgatcttcgtgatgctgaaactgatgaagacctccgatgaaaaaagagacatgctgcacatgcacgagggtacttgcagatcgatgtcggctctatggacgaacactcgaccaagtcagatgaggagtatgagggcctagccatgcgcgacgtgatggctactggtccgacgatgagcagcaagctgtgagttaaagatgaactcacctgccctggagagtaacatccataggagtgaggcaaaatggctggtaccaccacaacatggacccgttcctgaagatgtccaaggaggtggtagccgacaccataatgtcttgtgtcattgtgtcaccggtcggcaacacactgcgctggtaccggcgggtgttgtgtttcttaggcgtctgcttctgtgctttgagttgtgctatagagtggttgtgccaactactgattttaaaagaaaaaggtgagctgagaatcattgttgaaaacaaacatgtaattgttcgttctcatcagttgtgccaactaccaagcatttcattgatcagaatttatcgttgctcatgagaaccaaaagtaagacacttctcaataacattggatgcaaatttctgctagcttatcttcactatcttttctcgtatcaatataacacacatttatacataatttttgtgttattatatgttttcgttgcaacgcacgggcactcacctagttatagaataaaaat

SEQ ID NO: 213324 - DNA, 2659 bp, Zea Mays
gctgtcaatcgcctccccactgcggcagatccgcaatccgctcctccaccaccgcgctcctcacccacgccagggacaagactgtctacctccacgcccgcctcaccaactccgcggccaccgccaccgccacgcccctcccccatggtcgtcgagtccgagtggtggaaccagcgacgcatgcgcgtcgagggcgacgtgaaataggtgctccaccgcgggcacaacgggcacagtggaggtggaacgagcaccatcgagttctggttccaccgaatccaccgctcgcacaccggatccatcgctcccacatgcccgcacaccggatccaccgctccctcccccgcgatggcctggttccaccgagacaactgcggggctagggtttggattcgtgggtggagcccaaggctagatccagcagggggagggaggtagaggaggggagggaactgctggtggtcggcagtgggcgaaggcgcgacaatccaggatatggattcctgagcgtcacccacccgcccatccacgtcgcgcggtgtagtcatcccctatccgcagccgcctcgctccctctcccacaacaaatccattctcctcctcccactcgacgaggatcgcgaggatgctggaggacgtcgtcgctgtcacgcttgacgttagggcctccgatgcttgacgttagggcctctcgcttgaagaggaacacaaacagagctcatgttttttattttgctctgcattatctactgcttctctgtgggggcgttatttacagtatgtggcctgtttgttgtgttgttcctgcggaagggcgggcgggccgaaggtgtttaagaaaatgttgttgtcaacatcaacctcctggaagggccagaacgcaggcagcgcctcaactcgtcaccccatcagcacgatgctacttcatgtggagctggtatgtaggatgattatcacgagtacttcaagcgctcattttaggaagacatcgctgcgcaagtgcctcaaggagtggaatgtaccggtttttggttgatggtgtctggaggtgtgatgagacaaaaccctttgtacgtgatgaatatggactgatcagcaatgaagtgcttgtggaaaacaatgtactacccgttgtgcagccagagccttctatcagaggaactaatatggataagggtaccattttgaaaacaatgcccctggagccatcatctcagaacccaagcatgcaaatagcagttatccgccatgtggtctctggaatattattacacaataccatatatgacgttgttcccctttctagcaagttaacagttttggacactcagcttcctgttaaacaagcatttaaaataatgcatgatgtgggtcttgctctggttcctttttgggatgaccgtcagggaaccataacaggcatgctcactgcatcagattttgttttaatcttgagaaagttgcagagaaacattcaagttattggcaacgaagagcccatttctgcttggaaagaagcaaagctacagttctatggtgggcctgatggtgctgtcatgcagagaacgccattaatccatacaggcaacattgatctcagggccaagaaagaagctcaactcggcatgcttcctgtttgaagcaagggcaacaaacttaccccaccagatctctgtcgccaaagcagggctagtgaataagctgtgtttcctcccggattgtcactgcttttatatttgtgcatttattttgagggaaacattttgcccaaaaaaggcctgcagtgcacgttttaaacaagtcatttgaaccaactcttatgctgaaaactgtatgtgatactgcagaaggcaacacactagcttgataggaaagttggttggcaagcataggtggactctggtgccttcatatatctatatatatattttaagttgacgatcttcgtgatgctgaaactgatgaagacctccgatgaaaaaagagacatgctgcacatgcacgagggtacttgcagatcgatgtcggctctatggacgaacactcgaccaagtcagatgaggagtatgagggcctagccatgcgcgacgtgatggctactggtccgacgatgagcagcaagctgtgagttaaagatgaactcacctgccctggagagtaacatccataggagtgaggcaaaatggctggtaccaccacaacatggacccgttcctgaagatgtccaaggaggtggtagccgacaccataatgtcttgtgtcattgtgtcaccggtcggcaacacactgcgctggtaccggcgggtgttgtgtttcttaggcgtctgcttctgtgctttgagttgtgctatagagtggttgtgccaactactgattttaaaagaaaaaggtgagctgagaatcattgttgaaaacaaacatgtaattgttcgttctcatcagttgtgccaactaccaagcatttcattgatcagaatttatcgttgctcatgagaaccaaaagtaagacacttctcaataacattggatgcaaatttctgctagcttatcttcactatcttttctcgtatcaatataacacacatttatacataatttttgtgttattatatgttttcgttgcaacgcacgggcactcacctagttatagaataaaaat

SEQ ID NO: 213325 - DNA, 2613 bp, Zea Mays
gctgtcaatcgcctccccactgcggcagatccgcaatccgctcctccaccaccgcgctcctcacccacgccagggacaagactgtctacctccacgcccgcctcaccaactccgcggccaccgccaccgccacgcccctcccccatggtcgtcgagtccgagtggtggaaccagcgacgcatgcgcgtcgagggcgacgtgaaataggtgctccaccgcgggcacaacgggcacagtggaggtggaacgagcaccatcgagttctggttccaccgaatccaccgctcgcacaccggatccatcgctcccacatgcccgcacaccggatccaccgctccctcccccgcgatggcctggttccaccgagacaactgcggggctagggtttggattcgtgggtggagcccaaggctagatccagcagggggagggaggtagaggaggggagggaactgctggtggtcggcagtgggcgaaggcgcgacaatccaggatatggattcctgagcgtcacccacccgcccatccacgtcgcgcggtgtagtcatcccctatccgcagccgcctcgctccctctcccacaacaaatccattctcctcctcccactcgacgaggatcgcgaggatgctggaggacgtcgtcgctgtcacgcttgacgttagggcctccgatgcttgacgttagggcctctcgcttgaagaggaacacaaacagagctcatgttttttattttgctctgcattatctactgcttctctgtgggggcgttatttacagtatgtggcctgtttgttgtgttgttcctgcggaagggcgggcgggccgaaggtgtttaagaaaatgttgttgtcaacatcaacctcctggaagggccagaacgcaggcagcgcctcaactcgtcaccccatcagcacggatgattatcacgagtacttcaagcgctcattttaggaagacatcgctgcgcaagtgcctcaaggagtggaatgtaccggtttttggttgatggtgtctggaggtgtgatgagacaaaaccctttgtacgtgatgaatatggactgatcagcaatgaagtgcttgtggaaaacaatgtactacccgttgtgcagccagagccttctatcagaggaactaatatggataaggatgcccctggagccatcatctcagaacccaagcatgcaaatagcagttatccgccatgtggtctctggaatattattacacaataccatatatgacgttgttcccctttctagcaagttaacagttttggacactcagcttcctgttaaacaagcatttaaaataatgcatgatgtgggtcttgctctggttcctttttgggatgaccgtcagggaaccataacaggcatgctcactgcatcagattttgttttaatcttgagaaagttgcagagaaacattcaagttattggcaacgaagagcccatttctgcttggaaagaagcaaagctacagttctatggtgggcctgatggtgctgtcatgcagagaacgccattaatccatacaggcaacattgatctcagggccaagaaagaagctcaactcggcatgcttcctgtttgaagcaagggcaacaaacttaccccaccagatctctgtcgccaaagcagggctagtgaataagctgtgtttcctcccggattgtcactgcttttatatttgtgcatttattttgagggaaacattttgcccaaaaaaggcctgcagtgcacgttttaaacaagtcatttgaaccaactcttatgctgaaaactgtatgtgatactgcagaaggcaacacactagcttgataggaaagttggttggcaagcataggtggactctggtgccttcatatatctatatatatattttaagttgacgatcttcgtgatgctgaaactgatgaagacctccgatgaaaaaagagacatgctgcacatgcacgagggtacttgcagatcgatgtcggctctatggacgaacactcgaccaagtcagatgaggagtatgagggcctagccatgcgcgacgtgatggctactggtccgacgatgagcagcaagctgtgagttaaagatgaactcacctgccctggagagtaacatccataggagtgaggcaaaatggctggtaccaccacaacatggacccgttcctgaagatgtccaaggaggtggtagccgacaccataatgtcttgtgtcattgtgtcaccggtcggcaacacactgcgctggtaccggcgggtgttgtgtttcttaggcgtctgcttctgtgctttgagttgtgctatagagtggttgtgccaactactgattttaaaagaaaaaggtgagctgagaatcattgttgaaaacaaacatgtaattgttcgttctcatcagttgtgccaactaccaagcatttcattgatcagaatttatcgttgctcatgagaaccaaaagtaagacacttctcaataacattggatgcaaatttctgctagcttatcttcactatcttttctcgtatcaatataacacacatttatacataatttttgtgttattatatgttttcgttgcaacgcacgggcactcacctagttatagaataaaaat

SEQ ID NO: 213326 - DNA, 4112 bp, Zea Mays
gctgtcaatcgcctccccactgcggcagatccgcaatccgctcctccaccaccgcgctcctcacccacgccagggacaagactgtctacctccacgcccgcctcaccaactccgcggccaccgccaccgccacgcccctcccccatggtcgtcgagtccgagtggtggaaccagcgacgcatgcgcgtcgagggcgacgtgaaataggtgctccaccgcgggcacaacgggcacagtggaggtggaacgagcaccatcgagttctggttccaccgaatccaccgctcgcacaccggatccatcgctcccacatgcccgcacaccggatccaccgctccctcccccgcgatggcctggttccaccgagacaactgcggggctagggtttggattcgtgggtggagcccaaggctagatccagcagggggagggaggtagaggaggggagggaactgctggtggtcggcagtgggcgaaggcgcgacaatccaggatatggattcctgaggttacttcattcgctttgtgctctcccgcgttcttgattcattcgcttttgtgttctccctaaacctttacgcctgccctgcctggcagcgtcacccacccgcccatccacgtcgcgcggtgtagtcatcccctatccgcagccgcctcgctccctctcccacaacaaatccattctcctcctcccactcgacgaggatcgcgaggatgctggaggacgtcgtcgctgtcacgcttgacgttagggcctccgatgcttgacgttagggcctctcgcttgaagaggaacacaaacagagctcatgttttttattttgctctgcattatctactgcttctctgtgggggcgttatttacagtatgtggcctgtttgttgtgttgttcctgcggaagggcgggcgggccgaaggtgtttaagaaaatgttgttgtcaacatcaacctcctggaagggccagaacgcaggcagcgcctcaactcgtcaccccatcagcacggtgagccccttatctggattgttatcatggtacgcggtgcgctgcaagcctgcaagtgacatcaaattggattggtagtcagcgggtgtcatagtgtcagttcgatggaatggttctgcagtgcatgtgcttctgtaatttccgcaagaagcagtcaacttctccctgatatggcactaggacattgtagtgattcccgcacgtttgtggaactcgacaacctaccagagcgccagatgtttcattgagaagagaactcctccagtctggctttccactggtctagtctctcctttaaaccaaatttgataccactcattgaagtcaatagctgggatgtagacatgtgaaaccacacctgtggaactttcagcgtgtgatgactgggtcactggtggaataccgtgttttttgagctgctcgctttcagttcgcggtcatagtcctgtgttttttgccttcagtttcttgatgtagttattgcctaaaatttctatatcttgttcatcgtactggagatgctacttcatgtggagctggtatgtaggatgattatcacgagtacttcaagcgctcattttaggaagacatcgctgcgcaagtgcctcaaggagtggaatggtgagcccctgtccatctactgaacagagaaaataccaggagcaaatgactgcatttttagttaatccttttattcctaaattaattgtgtttgttaatgcttttattcctaaaataagtaaccgagctcgggattcttcgcaatttgatttgcgagatcacccccataaaggcatcatgaatctttatgcctgtaaagacatcccactgtctctttcgttttcgataagatgttttggccgttacataatgcctgtaaggtagaatgccattgcagttgttgcatcagaaagcagccatttaacgccattgtaaagtgagtgatgattaaatacaaccacacttctgtctctcaggtttctgtacatggagtttttattgcacctcttcttccccagcaattagtacttgcagttagactaaatgaatcttgaatgccccttaactgttggctttacatggaactacttttgcatataccagacaactattttgaacttcaatatgtttttcaattccagcaattgatcgaaacatgatatatttgacatattcatgatggatttttgtatttgatgtgtcgctttttcatctatcaatgtaattcttggacataacattgcgcacaggtaccaaattcacacccttgttattgcgagttctgtaaatcatgatgttcacatgtgatggtttgattcagttcaatggttagcaagctatttgaacatgatactatagtagtgcatatttgctgtacaaatggccactgcccagctatttgcataagatattatgtttctcctgtgacattttctatgccacatacatttatatggcatttttgtgcaatttagtaccggtttttggttgatggtgtctggaggtgtgatgagacaaaaccctttgtacgtgatgaatatggactgatcagcaatgaagtgcttgtggaaaacaatgtactacccgttgtgcagccagagccttctatcagaggaactaatatggataaggatgcccctggagccatcatctcagaacccaagcatgcaaatagcagttatccgccatgtggtctctggaatattattacacaataccatatatgacgttgttcccctttctagcaagttaacagttttggacactcagcttcctgttaaacaagcatttaaaataatgcatgatgtgggtcttgctctggttcctttttgggatgaccgtcagggaaccataacaggcatgctcactgcatcagattttgttttaatcttgagaaagttgcagagaaacattcaagttattggcaacgaagagcccatttctgcttggaaagaagcaaagctacagttctatggtgggcctgatggtgctgtcatgcagagaacgccattaatccattttgtacagacaggcaacattgatctcagggccaagaaagaagctcaactcggcatgcttcctgtttgaagcaagggcaacaaacttaccccaccagatctctgtcgccaaagcagggctagtgaataagctgtgtttcctcccggattgtcactgcttttatatttgtgcatttattttgagggaaacattttgcccaaaaaaggcctgcagtgcacgttttaaacaagtcatttgaaccaactcttatgctgaaaactgtatgtgatactgcagaaggcaacacactagcttgataggaaagttggttggcaagcataggtggactctggtgccttcatatatctatatatatattttaagttgacgatcttcgtgatgctgaaactgatgaagacctccgatgaaaaaagagacatgctgcacatgcacgagggtacttgcagatcgatgtcggctctatggacgaacactcgaccaagtcagatgaggagtatgagggcctagccatgcgcgacgtgatggctactggtccgacgatgagcagcaagctgtgagttaaagatgaactcacctgccctggagagtaacatccataggagtgaggcaaaatggctggtaccaccacaacatggacccgttcctgaagatgtccaaggaggtggtagccgacaccataatgtcttgtgtcattgtgtcaccggtcggcaacacactgcgctggtaccggcgggtgttgtgtttcttaggcgtctgcttctgtgctttgagttgtgctatagagtggttgtgccaactactgattttaaaagaaaaaggtgagctgagaatcattgttgaaaacaaacatgtaattgttcgttctcatcagttgtgccaactaccaagcatttcattgatcagaatttatcgttgctcatgagaaccaaaagtaagacacttctcaataacattggatgcaaatttctgctagcttatcttcactatcttttctcgtatcaatataacacacatttatacataatttttgtgttattatatgttttcgttgcaacgcacgggcactcacctagttatagaataaaaat

SEQ ID NO: 213327 - DNA, 4003 bp, Zea Mays
gctgtcaatcgcctccccactgcggcagatccgcaatccgctcctccaccaccgcgctcctcacccacgccagggacaagactgtctacctccacgcccgcctcaccaactccgcggccaccgccaccgccacgcccctcccccatggtcgtcgagtccgagtggtggaaccagcgacgcatgcgcgtcgagggcgacgtgaaataggtgctccaccgcgggcacaacgggcacagtggaggtggaacgagcaccatcgagttctggttccaccgaatccaccgctcgcacaccggatccatcgctcccacatgcccgcacaccggatccaccgctccctcccccgcgatggcctggttccaccgagacaactgcggggctagggtttggattcgtgggtggagcccaaggctagatccagcagggggagggaggtagaggaggggagggaactgctggtggtcggcagtgggcgaaggcgcgacaatccaggatatggattcctgaggttacttcattcgctttgtgctctcccgcgttcttgattcattcgcttttgtgttctccctaaacctttacgcctgccctgcctggcagcgtcacccacccgcccatccacgtcgcgcggtgtagtcatcccctatccgcagccgcctcgctccctctcccacaacaaatccattctcctcctcccactcgacgaggatcgcgaggatgctggaggacgtcgtcgctgtcacgcttgacgttagggcctccgatgcttgacgttagggcctctcgcttgaagaggaacacaaacagagctcatgttttttattttgctctgcattatctactgcttctctgtgggggcgttatttacagtatgtggcctgtttgttgtgttgttcctgcggaagggcgggcgggccgaaggtgtttaagaaaatgttgttgtcaacatcaacctcctggaagggccagaacgcaggcagcgcctcaactcgtcaccccatcagcacggtgagccccttatctggattgttatcatggtacgcggtgcgctgcaagcctgcaagtgacatcaaattggattggtagtcagcgggtgtcatagtgtcagttcgatggaatggttctgcagtgcatgtgcttctgtaatttccgcaagaagcagtcaacttctccctgatatggcactaggacattgtagtgattcccgcacgtttgtggaactcgacaacctaccagagcgccagatgtttcattgagaagagaactcctccagtctggctttccactggtctagtctctcctttaaaccaaatttgataccactcattgaagtcaatagctgggatgtagacatgtgaaaccacacctgtggaactttcagcgtgtgatgactgggtcactggtggaataccgtgttttttgagctgctcgctttcagttcgcggtcatagtcctgtgttttttgccttcagtttcttgatgtagttattgcctaaaatttctatatcttgttcatcgtactggagatgctacttcatgtggagctggtatgtaggatgattatcacgagtacttcaagcgctcattttaggaagacatcgctgcgcaagtgcctcaaggagtggaatggtgagcccctgtccatctactgaacagagaaaataccaggagcaaatgactgcatttttagttaatccttttattcctaaattaattgtgtttgttaatgcttttattcctaaaataagtaaccgagctcgggattcttcgcaatttgatttgcgagatcacccccataaaggcatcatgaatctttatgcctgtaaagacatcccactgtctctttcgttttcgataagatgttttggccgttacataatgcctgtaaggtagaatgccattgcagttgttgcatcagaaagcagccatttaacgccattgtaaagtgagtgatgattaaatacaaccacacttctgtctctcaggtttctgtacatggagtttttattgcacctcttcttccccagcaattagtacttgcagttagactaaatgaatcttgaatgccccttaactgttggctttacatggaactacttttgcatataccagacaactattttgaacttcaatatgtttttcaattccagcaattgatcgaaacatgatatatttgacatattcatgatggatttttgtatttgatgtgtcgctttttcatctatcaatgtaattcttggacataacattgcgcacaggtaccaaattcacacccttgttattgcgagttctgtaaatcatgatgttcacatgtgatggtttgattcagttcaatggttagcaagctatttgaacatgatactatagtagtgcatatttgctgtacaaatggccactgcccagctatttgcataagatattatgtttctcctgtgacattttctatgccacatacatttatatggcatttttgtgcaatttagtaccggtttttggttgatggtgtctggaggtgtgatgagacaaaaccctttgtacgtgatgaatatggactgatcagcaatgaagtgcttgtggaaaacaatgtactacccgttgtgcagccagagccttctatcagaggaactaatatggataaggatgcccctggagccatcatctcagaacccaagcatgcaaatagcagttatccgccatgtggtctctggaatattattacacaataccatatatgacgttgttcccctttctagcaagggaaccataacaggcatgctcactgcatcagattttgttttaatcttgagaaagttgcagagaaacattcaagttattggcaacgaagagcccatttctgcttggaaagaagcaaagctacagttctatggtgggcctgatggtgctgtcatgcagagaacgccattaatccatgcaacattgatctcagggccaagaaagaagctcaactcggcatgcttcctgtttgaagcaagggcaacaaacttaccccaccagatctctgtcgccaaagcagggctagtgaataagctgtgtttcctcccggattgtcactgcttttatatttgtgcatttattttgagggaaacattttgcccaaaaaaggcctgcagtgcacgttttaaacaagtcatttgaaccaactcttatgctgaaaactgtatgtgatactgcagaaggcaacacactagcttgataggaaagttggttggcaagcataggtggactctggtgccttcatatatctatatatatattttaagttgacgatcttcgtgatgctgaaactgatgaagacctccgatgaaaaaagagacatgctgcacatgcacgagggtacttgcagatcgatgtcggctctatggacgaacactcgaccaagtcagatgaggagtatgagggcctagccatgcgcgacgtgatggctactggtccgacgatgagcagcaagctgtgagttaaagatgaactcacctgccctggagagtaacatccataggagtgaggcaaaatggctggtaccaccacaacatggacccgttcctgaagatgtccaaggaggtggtagccgacaccataatgtcttgtgtcattgtgtcaccggtcggcaacacactgcgctggtaccggcgggtgttgtgtttcttaggcgtctgcttctgtgctttgagttgtgctatagagtggttgtgccaactactgattttaaaagaaaaaggtgagctgagaatcattgttgaaaacaaacatgtaattgttcgttctcatcagttgtgccaactaccaagcatttcattgatcagaatttatcgttgctcatgagaaccaaaagtaagacacttctcaataacattggatgcaaatttctgctagcttatcttcactatcttttctcgtatcaatataacacacatttatacataatttttgtgttattatatgttttcgttgcaacgcacgggcactcacctagttatagaataaaaat

SEQ ID NO: 213328 - DNA, 4504 bp, Zea Mays
gctgtcaatcgcctccccactgcggcagatccgcaatccgctcctccaccaccgcgctcctcacccacgccagggacaagactgtctacctccacgcccgcctcaccaactccgcggccaccgccaccgccacgcccctcccccatggtcgtcgagtccgagtggtggaaccagcgacgcatgcgcgtcgagggcgacgtgaaataggtgctccaccgcgggcacaacgggcacagtggaggtggaacgagcaccatcgagttctggttccaccgaatccaccgctcgcacaccggatccatcgctcccacatgcccgcacaccggatccaccgctccctcccccgcgatggcctggttccaccgagacaactgcggggctagggtttggattcgtgggtggagcccaaggctagatccagcagggggagggaggtagaggaggggagggaactgctggtggtcggcagtgggcgaaggcgcgacaatccaggatatggattcctgaggttacttcattcgctttgtgctctcccgcgttcttgattcattcgcttttgtgttctccctaaacctttacgcctgccctgcctggcagcgtcacccacccgcccatccacgtcgcgcggtgtagtcatcccctatccgcagccgcctcgctccctctcccacaacaaatccattctcctcctcccactcgacgaggatcgcgaggatgctggaggacgtcgtcgctgtcacgcttgacgttagggcctccgatgcttgacgttagggcctctcgcttgaagaggaacacaaacagagctcatgttttttattttgctctgcattatctactgcttctctgtgggggcgttatttacagtatgtggcctgtttgttgtgttgttcctgcggaagggcgggcgggccgaaggtgtttaagaaaatgttgttgtcaacatcaacctcctggaagggccagaacgcaggcagcgcctcaactcgtcaccccatcagcacggtgagccccttatctggattgttatcatggtacgcggtgcgctgcaagcctgcaagtgacatcaaattggattggtagtcagcgggtgtcatagtgtcagttcgatggaatggttctgcagtgcatgtgcttctgtaatttccgcaagaagcagtcaacttctccctgatatggcactaggacattgtagtgattcccgcacgtttgtggaactcgacaacctaccagagcgccagatgtttcattgagaagagaactcctccagtctggctttccactggtctagtctctcctttaaaccaaatttgataccactcattgaagtcaatagctgggatgtagacatgtgaaaccacacctgtggaactttcagcgtgtgatgactgggtcactggtggaataccgtgttttttgagctgctcgctttcagttcgcggtcatagtcctgtgttttttgccttcagtttcttgatgtagttattgcctaaaatttctatatcttgttcatcgtactggagatgctacttcatgtggagctggtatgtaggatgattatcacgagtacttcaagcgctcattttaggaagacatcgctgcgcaagtgcctcaaggagtggaatggtgagcccctgtccatctactgaacagagaaaataccaggagcaaatgactgcatttttagttaatccttttattcctaaattaattgtgtttgttaatgcttttattcctaaaataagtaaccgagctcgggattcttcgcaatttgatttgcgagatcacccccataaaggcatcatgaatctttatgcctgtaaagacatcccactgtctctttcgttttcgataagatgttttggccgttacataatgcctgtaaggtagaatgccattgcagttgttgcatcagaaagcagccatttaacgccattgtaaagtgagtgatgattaaatacaaccacacttctgtctctcaggtttctgtacatggagtttttattgcacctcttcttccccagcaattagtacttgcagttagactaaatgaatcttgaatgccccttaactgttggctttacatggaactacttttgcatataccagacaactattttgaacttcaatatgtttttcaattccagcaattgatcgaaacatgatatatttgacatattcatgatggatttttgtatttgatgtgtcgctttttcatctatcaatgtaattcttggacataacattgcgcacaggtaccaaattcacacccttgttattgcgagttctgtaaatcatgatgttcacatgtgatggtttgattcagttcaatggttagcaagctatttgaacatgatactatagtagtgcatatttgctgtacaaatggccactgcccagctatttgcataagatattatgtttctcctgtgacattttctatgccacatacatttatatggcatttttgtgcaatttagtaccggtttttggttgatggtgtctggaggtgtgatgagacaaaaccctttgtacgtgatgaatatggactgatcagcaatgaagtgcttgtggaaaacaatgtactacccgttgtgcagccagagccttctatcagaggaactaatatggataagggtaccattttgaaaacagtatgtcttagaagtttaacattatattttcttgttctccatattcctgataactaatggtctgttatttactgtggccttaaataaacaaagatgcccctggagccatcatctcagaacccaagcatgcaaatagcagttatccgccatgtggtctctggaatattattacacaataccatatatgacgttgttcccctttctagcaagttaacagttttggacactcagcttcctgttaaacaagcatttaaaataatgcatgatgtgggaaccataacaggcatgctcactgcatcagattttgttttaatcttgagaaagttgcagagaaacattcaagttattggcaacgaagagcccatttctgcttggaaagaagcaaagctacagttctatggtgggcctgatggtgctgtcatgcagagaacgccattaatccatgtacttctccatatatttgctgattctttcatttgattcaatgtgtaagcagttgcaagatcagcactttcataatataaatatattacttgtatgaaattctagatatggtctccaatacaacattaagcttaatgtcgtttgtgttaaaaaattacaaatcatcttatgtcttgaaataaggagaaattgtttgggtttctcctccccaactttcagaattacctatttctattgtatgtttgatcatttggacttccattccatcaacaattttggtttattcagtgaggaactatgtttttaaccactctgtagtttgtacagacaggcaacattgatctcagggccaagaaagaagctcaactcggcatgcttcctgtttgaagcaagggcaacaaacttaccccaccagatctctgtcgccaaagcagggctagtgaataagctgtgtttcctcccggattgtcactgcttttatatttgtgcatttattttgagggaaacattttgcccaaaaaaggcctgcagtgcacgttttaaacaagtcatttgaaccaactcttatgctgaaaactgtatgtgatactgcagaaggcaacacactagcttgataggaaagttggttggcaagcataggtggactctggtgccttcatatatctatatatatattttaagttgacgatcttcgtgatgctgaaactgatgaagacctccgatgaaaaaagagacatgctgcacatgcacgagggtacttgcagatcgatgtcggctctatggacgaacactcgaccaagtcagatgaggagtatgagggcctagccatgcgcgacgtgatggctactggtccgacgatgagcagcaagctgtgagttaaagatgaactcacctgccctggagagtaacatccataggagtgaggcaaaatggctggtaccaccacaacatggacccgttcctgaagatgtccaaggaggtggtagccgacaccataatgtcttgtgtcattgtgtcaccggtcggcaacacactgcgctggtaccggcgggtgttgtgtttcttaggcgtctgcttctgtgctttgagttgtgctatagagtggttgtgccaactactgattttaaaagaaaaaggtgagctgagaatcattgttgaaaacaaacatgtaattgttcgttctcatcagttgtgccaactaccaagcatttcattgatcagaatttatcgttgctcatgagaaccaaaagtaagacacttctcaataacattggatgcaaatttctgctagcttatcttcactatcttttctcgtatcaatataacacacatttatacataatttttgtgttattatatgttttcgttgcaacgcacgggcactcacctagttatagaataaaaat

SEQ ID NO: 213329 - DNA, 3401 bp, Zea Mays
gctgtcaatcgcctccccactgcggcagatccgcaatccgctcctccaccaccgcgctcctcacccacgccagggacaagactgtctacctccacgcccgcctcaccaactccgcggccaccgccaccgccacgcccctcccccatggtcgtcgagtccgagtggtggaaccagcgacgcatgcgcgtcgagggcgacgtgaaataggtgctccaccgcgggcacaacgggcacagtggaggtggaacgagcaccatcgagttctggttccaccgaatccaccgctcgcacaccggatccatcgctcccacatgcccgcacaccggatccaccgctccctcccccgcgatggcctggttccaccgagacaactgcggggctagggtttggattcgtgggtggagcccaaggctagatccagcagggggagggaggtagaggaggggagggaactgctggtggtcggcagtgggcgaaggcgcgacaatccaggatatggattcctgagcgtcacccacccgcccatccacgtcgcgcggtgtagtcatcccctatccgcagccgcctcgctccctctcccacaacaaatccattctcctcctcccactcgacgaggatcgcgaggatgctggaggacgtcgtcgctgtcacgcttgacgttagggcctccgatgcttgacgttagggcctctcgcttgaagaggaacacaaacagagctcatgttttttattttgctctgcattatctactgcttctctgtgggggcgttatttacagtatgtggcctgtttgttgtgttgttcctgcggaagggcgggcgggccgaaggtgtttaagaaaatgttgttgtcaacatcaacctcctggaagggccagaacgcaggcagcgcctcaactcgtcaccccatcagcacggatgattatcacgagtacttcaagcgctcattttaggaagacatcgctgcgcaagtgcctcaaggagtggaatggtgagcccctgtccatctactgaacagagaaaataccaggagcaaatgactgcatttttagttaatccttttattcctaaattaattgtgtttgttaatgcttttattcctaaaataagtaaccgagctcgggattcttcgcaatttgatttgcgagatcacccccataaaggcatcatgaatctttatgcctgtaaagacatcccactgtctctttcgttttcgataagatgttttggccgttacataatgcctgtaaggtagaatgccattgcagttgttgcatcagaaagcagccatttaacgccattgtaaagtgagtgatgattaaatacaaccacacttctgtctctcaggtttctgtacatggagtttttattgcacctcttcttccccagcaattagtacttgcagttagactaaatgaatcttgaatgccccttaactgttggctttacatggaactacttttgcatataccagacaactattttgaacttcaatatgtttttcaattccagcaattgatcgaaacatgatatatttgacatattcatgatggatttttgtatttgatgtgtcgctttttcatctatcaatgtaattcttggacataacattgcgcacaggtaccaaattcacacccttgttattgcgagttctgtaaatcatgatgttcacatgtgatggtttgattcagttcaatggttagcaagctatttgaacatgatactatagtagtgcatatttgctgtacaaatggccactgcccagctatttgcataagatattatgtttctcctgtgacattttctatgccacatacatttatatggcatttttgtgcaatttagtaccggtttttggttgatggtgtctggaggtgtgatgagacaaaaccctttgtacgtgatgaatatggactgatcagcaatgaagtgcttgtggaaaacaatgtactacccgttgtgcagccagagccttctatcagaggaactaatatggataaggatgcccctggagccatcatctcagaacccaagcatgcaaatagcagttatccgccatgtggtctctggaatattattacacaataccatatatgacgttgttcccctttctagcaagggtcttgctctggttcctttttgggatgaccgtcagggaaccataacaggcatgctcactgcatcagattttgttttaatcttgagaaagagaaacattcaagttattggcaacgaagagcccatttctgcttggaaagaagcaaagctacagttctatggtgggcctgatggtgctgtcatgcagagaacgccattaatccatacaggcaacattgatctcagggccaagaaagaagctcaactcggcatgcttcctgtttgaagcaagggcaacaaacttaccccaccagatctctgtcgccaaagcagggctagtgaataagctgtgtttcctcccggattgtcactgcttttatatttgtgcatttattttgagggaaacattttgcccaaaaaaggcctgcagtgcacgttttaaacaagtcatttgaaccaactcttatgctgaaaactgtatgtgatactgcagaaggcaacacactagcttgataggaaagttggttggcaagcataggtggactctggtgccttcatatatctatatatatattttaagttgacgatcttcgtgatgctgaaactgatgaagacctccgatgaaaaaagagacatgctgcacatgcacgagggtacttgcagatcgatgtcggctctatggacgaacactcgaccaagtcagatgaggagtatgagggcctagccatgcgcgacgtgatggctactggtccgacgatgagcagcaagctgtgagttaaagatgaactcacctgccctggagagtaacatccataggagtgaggcaaaatggctggtaccaccacaacatggacccgttcctgaagatgtccaaggaggtggtagccgacaccataatgtcttgtgtcattgtgtcaccggtcggcaacacactgcgctggtaccggcgggtgttgtgtttcttaggcgtctgcttctgtgctttgagttgtgctatagagtggttgtgccaactactgattttaaaagaaaaaggtgagctgagaatcattgttgaaaacaaacatgtaattgttcgttctcatcagttgtgccaactaccaagcatttcattgatcagaatttatcgttgctcatgagaaccaaaagtaagacacttctcaataacattggatgcaaatttctgctagcttatcttcactatcttttctcgtatcaatataacacacatttatacataatttttgtgttattatatgttttcgttgcaacgcacgggcactcacctagttatagaataaaaat

SEQ ID NO: 213330 - DNA, 574 bp, Zea Mays
cgaaagggcataagcccgtggatcatgtgaaagggctacgtctcaatctctcaggcatccgcaccgccgtgctgcttacagggaggtggcgctcgctgggaggcggcagcgcgacgctcgcaaggaggcaacgcgatacctgtaggcggcctcgttgagacgttgtccctatcgtggaggtcttcctctcgacccagcagccgtagcccagctgtagcccaactcagatctctgctgtaacgtcatccaataggctaaggagttccttggtgcttccggtgattctctttctgttgtaaagcagctatcctgcgagtgcctctacacattgaggagtcctgccttcactcgttgaggagtcttgccgagcaacattgttaagttcagttatctgaattcagttggatcatggctgtcgataaacattttagtataatggatattgtagtcctcctgcgagcagtttctcttcgtgcatggagcgtctttgcttgtgagttgataaacattttagtataatggaggatactaatttcatggttgcactttgtggttgttttctatcatttgtttg

SEQ ID NO: 213331 - DNA, 668 bp, Zea Mays
gaaagggctacgtctcaatctctcaggcatccgcaccgccgtgctgcttacagggaggtggcgctcgctgggaggcggcagcgcgacgctcgcaaggaggcaacgcgatacctgtaggcggcctcgttgagacgttgtccctatcgtggaggtcttcctctcgacccagcagccgtagcccagctgtagcccaactcagatctctgctgtaacgtcatccaataggtgcggttctttctaggaggaaagcttcaggctaaggagttccttggtgcttccggtgacaagcgaaaggaagtcatctgcagtatggaggaggcagataagctcagtggttctgctgcaaggctaaggagttccttggtgcttccggtgattctctttctgttgtaaagcagctatcctgcgagtgcctctacacattgaggagtcctgccttcactcgttgaggagtcttgccgagcaacattgttaagttcagttatctgaattcagttggatcatggctgtcgataaacattttagtataatggatattgtagtcctcctgcgagcagtttctcttcgtgcatggagcgtctttgcttgtgagttgataaacattttagtataatggaggatactaatttcatggttgcactttgtggttgttttctatcatttgtttg

SEQ ID NO: 213332 - DNA, 3251 bp, Zea Mays
ctagcaaatagacgacgcgggggagcatcgcagagaaaagagaatggcggcaatgacgcgccacttccgcgactcctccacctccagtgaccccgctgccgccacgccgccgctgccgcccccactccccgacctcggagtggccctctccgccgccgatctccgcgtcaccgcctacgagcttctcgttgccgcttcacgggccaccggcgccaagcccctcacctacattcctcagcccacgacggcagctagcaagctcaagggcgcgttcggtctcgggtcctcgccgccgtccaaggtcgggagggcggcggtgctggagctggtgcgggtgcggatgggggttacagagcaggccgacgctacgatccgccggctgctactccgcgtcgccgccggacagcttggcagacctgcagaatctatggttttgcccttagagttcctgcagaagtgtaaagcatcagattttcctgaccctctagagtacgaggcttggcagatgaggaatttcaagcttcttgaggctggtgtgctggtccacccacttattcctttaaagaaatcagacattcctgcaaagagaatgcagcgaataatacataaagcatatgttgggcaagttgaagctgggaggaattcagaatccatgcaaatattgcacaacactgtcatgtcccttgcgtgtagatccctttgtgaaacttccaatgagtgtcattgggcagatggttttccctttaatctccatatctacaaaatgttggtggaagcttgctttgatgttgaggaaggcactgtagtagatgagattgatgaaatgatggagctgttgaagaagacttggcctgttttcggagtcactcaaatgctccacaacctttactttacctgggttttgttcaaccattttgtcattttgggccaagaagataatgggttattttctgctatagagaatctattagttgaagttgcaaaagatgctaaaataaccaaagatccagattactgtgatgtattgagctccactttaatctcaataatgggttgggaagagaaaagactgcttgcataccatgaaactttcggtggtagtaatctttattccatgcaatatactatttcaattggaatctcagctgcaaagattctctttgaagatgtatcttatgaataccatagtggaacaaacagagatattgatgttgtgcgcagcaggattgaaacttatataaaatcatcaatccgcactacttttgctcaaaaaatgaaagaggcaggttcaaatcggtcatccagaaatcgtacacctgttctgtctattcttgcaaagaaaacaactgagcttgctattaaggagaaaaatgtatacagtccaatactgaagaaatggcacccctttgctgcaggtgttgctgttgcaactcttcatggttgctttggaaatgagctaaaaaagtttatagttgggcttacagagctcacaccagatacagctcaagtgcttaaggcggctgacaagttagaaaaggatctagttcatattgctattgaagattctatggacgttggtgatagtggcaagtcattgattagtcaaatgccacgttatgaagctggaactgtaatggataatctggtaaaatcatgggcaaaagaacaacttgacaggcttaagatttggactgaccagaagctacaacagcagacttggaacccagaggataaggacaaggataattttgctcactcatctgtggagatgctgcacagaattgaggaaactatggatgcatttgtacgattgtctataccaatccgctctactctgcttgctgatctgacagctggactcgataaatgtctacattattatgtctctaatgtgaaatcgggctgcgctacctcatctgacaaggtgtgacgttggatccaagttattcaagaaaaacgagaaaccacagtttcttatgaagagaggatcacaagttggatcaacaactgggaatgaagcctcgagccttcgtggactatgttttcgaataaataccatttactacatccaaactgaacttgaaaacctgcatatgaagacgaaagaatgcttgcagaaagttgagttatttcagcctgataatgctgatgatctgaacataaactttgggctatcccaggcagcttgccaagaaggaattcgacagctgtgtgagactactgcatatatggtgatgttcaatgatctgagccacgttctcctgaatactctctatgttgggagccctgcgtcaaacaggatcctgcctttgttaaaagagcttggtcctatccttaggattatatctgacacagtgcacaatgaagtgcaaaatcgtctcataactgcattgatgaaagcctcttttgatggcttcttgttggtgcttcttgctggtggaccgacacgtgctttcagctgccaggactaccaggtaatagaggacgatttccgagccctaagaggcttatatttgtcatattgtgatgggctgcctgaggaattagttggcaaggcttcctcggaggtgaagaacattctgccactcctacggacagacacagaaaccctcattgaacggttcaagcagctaatttctgaatcttatgaacctacaaccgcatctaggttcccgatgcctcctgtacctgctcgttggagtccggacaaccccaacacaatattgcgtgtattatgctatcgaaatgacgagatagctactaagttcctcaagaaaacatatgatctgccaaagaccctttgatttctgcaaataaataacttgcaaactattgtgtatagtgtatttctgcagctttgaaagtttatggtaactggtacattggattgtactgtctacttgtgaaggataacacagcatgaacatgcaagtagagaactattaagtttgaatgcagcagatttcatggatggaaacaggagatttggctctgagttttacactttcatccgattattaatgagctctgctggccgtgccatttgtgtgcttgtgatatgctcatctgtgaaggaggaaccatacaacagaatgtaaagtacctgaatatattgcaattttttatttacttggctattatgattgccattgactgtacagaggaaaacatggcagatttgtataagtgagatacttcacttgactgctttcttgttcaaataacgtttcaaaataaactggaaattatgt

SEQ ID NO: 213333 - DNA, 3894 bp, Zea Mays
cttgcctccaaaaagcgctgctcgcttcggcactcgttgataaagcggctagccgagcgccgtggcagaaccgcggaacgcaatagccaataggtagcggagcaccgcaccgcgaagcaaacgagaggggaaaaaaaagcacgaggaggccgcgcccgcgaaggaatcacttgcccgggcgtgggccgcccaccggccaccgcccagccgctgccgcagtgccgcccgcctgcctgcctgcctggtgcggtggtgcctgcccacgggaacgggatagctggctgacggacgcattgcggagcggactgggagactacgggtaagataataaaagggccaggcgtggcggggcgcaaccaccgctgtgcctcggagaggaggacagctctcgcgccgcggctgccgccatgtggacgccgtcgcgcgggagcaacgcccggcgcagcggccaccgccgcatcgcggactacctggcggacgaccagaccaccaccacagccaccgacgcctccgacaacgagtcctacactaccgcctatggggaggagttcttcgccgccgccgccgccgggagcggcggcgccggcggcatgctgccggcattcctggcggaccagggggacctggtggaggtcatgctggagctggacgaggagtccatggtggtgcgcagcgtcacgcccaccagcgcggcgctctacggcgccgcctccctcccggcgccgccgtccgcgggggtcctcggggtgtcgccgtcgccgcgccgcgcgccttcggagggcggcggccgcctgagccggtgctcgtcgacgtcgtcgcggatacggaagaagttcgcgtggctccggtcgccgtcgccctccccgtccccgtaccgccccacgcccgccgagcttcagcgggaggccgccatggcggcgcgcgagcggcggcgggagcaggcgcagctcaaccggtcccgcgccggcgccaggcgcgcgctcaagggcctccgcttcatcagccgcaccacgggctccgtcgaggccgccgagctctggcgccgcgtcgaggagcgcttcaacgacctcgcccgcgaagggctgctctcccgcgacgacttcggcgaatgcatcggaatggtggactccaaggagttcgcggtgggcatcttcgacgcgctggcgcggcggcggcggcagaacctggagcggatcaccaaggaggagctctacgacttctggctccagatctccgatcagagcttcgacgcgcggctccagatcttcttcgacatggtggacaccaacgtggacgggaggataacgagggaggaagtacaggagctgatcgtgctcagcgcgtcggccaacaagctggcaaagctcaaggagcaggcggaggagtacgcgtcgctcatcatggaggagctcgacccggagaagcttggctacattgagctgtggcagctcgaagcgctgctgctccagcgcgacacctacatgaactacagccgcccgctgagcacggccagcggggcccagtggagccagaacctcggcgtcggcggcgcgctgacgataacagggggaggaggagacggcggctgcggcgtggacggcgaccacccggggcctccgcgcgagcgtcgccggagctggggcgtgcggaaggcggcggcgcgggtgcgcgtggcggcggaggagaactggcgccgcgcctgggtgctggcgttgtggttcgcggccatggcggcgctgttcgtgtggaagttcgtccagtaccggcgcatggcggcgttccaggtgatggggtactgcctccccacggccaagggcgccgcggagacgctcaagctcaacatggcgctcgtgctgctccccgtctgccgcaacacgctcacgtggctccgctcctcctgggcccgcttcttcgtccccttcgacgacaacatcaccttccacaagatgatcgcgacggcgatcgtggtggggatcacgctgcacgcggggaaccacctggcgtgcgacttcccgcgggtgatcgcggcgagcccggaggagtacgcgctcgtcgcgggcgcgttcggcgcggacaagccgacgtacgcggggctcctgtcgggcacggagggcgtgacgggcgtggccatggtggtgctgatgaccgtctccttcacgctggccacgcacccgttccgcaagggggagcccaagggcgcgggcgcggccgccggcacgtcgcggctcccggcgccactgaaccggctcaccggcttcaacgccttctggtactcgcaccacctcctcggcatcgtgtacgcgctcctgctcgcgcacggctacttcctcttcctcgtccggaggtggtacgagaagacgacatggatgtacatttcggtcccgctgctgctctacgtcggtgaaaggatgcttagagccttgaggtcaaatgcttataccgtgaaaattctcaaggtgtgtcttctacctggaaatgtgttgaccataacgatgtcaaagccctatggatttcgttacagaagtggacagtacatatttcttcaatgtccaataatttctccatttgaatggcatcctttctccatcacttcagcacctggagatgactacctcagtgtccacatccggacaaacggtgactggacacaggagctcaagcgcatatttgtggagaactacttctcgccgcatctcaacagaagagcttcgtttagcgagctaggtgcggcagaaccaagaagcttgccaaaattactcgtagatggtccctatggtgcccctgcgcaggattttagaaactacgacgttctacttctcgtcggcctcggaatcggggcaacaccgttcataagcattctacgggatctgcttaataacattaagatagctgacgagctgatggacttggcaatggagaccagcaggtctgaagacagcgccaacagctttagcgtctcaacggcgagtagcaaccggaagagagcatacagaacaagccgtgcacatttctactgggtcacccgagaagccggatcctttgaatggttcaaaggggtgatgaatgaggttgcagaaatggacaagaagggtatcatagagctgcacaattacctcactagcgtttacgaggaacgcgacgcacggacaactctgctgtccatggtccaggctctgaaccacgccaagcacggcgtcgatatcgtatcggggaccagggtgaggacgcatttcgccagacccaactggaaggaagtcttcaccaggatcgcctccaagcatccgaattcaacagttggtgtgttctactgcggcgcaccgacgcttgccaaggagctgaaggctctggcgcacgagatgagccacaggacgggcactcgcttccatttccacaaggagtacttctgagtttcgacggatagaatgggcagtcgatgctcgttctaacgtgatctggtcttttctgatctgatctcgatagcgttaggtaccggtaaagaagacagaattttgcacagatgcaagacaaaccaagctgacctctcctcctgatctggaactgtacatagcataaaagaagcaccacagggttagcttagtatacgtagcacaattcaaataaatatattgacaaagaaaagagagacagagaaagggcaggatagaggctgttgttgttaactcgaagatattgatgataggcatggcggtatacgtgtatacattatagttaggtgctaggtggtagttatatatatactgtatatgatatgggtcgatgaatatacgaggagccacatgctgctgccattctcaaatgtggacgtgcattcttcaggcgtgttcgtgactgtttggctggtggttgcccatgtgaggggttgctaaaaatgat

SEQ ID NO: 213334 - DNA, 3839 bp, Zea Mays
gccgagcgccgtggcagaaccgcggaacgcaatagccaataggtagcggagcaccgcaccgcgaagcaaacgagaggggaaaaaaaagcacgaggaggccgcgcccgcgaaggaatcacttgcccgggcgtgggccgcccaccggccaccgcccagccgctgccgcagtgccgcccgcctgcctgcctgcctggtgcggtggtgcctgcccacgggaacgggatagctggctgacggacgcattgcggagcggactgggagactacgggtaagataataaaagggccaggcgtggcggggcgcaaccaccgctgtgcctcggagaggaggacagctctcgcgccgcggctgccgccatgtggacgccgtcgcgcgggagcaacgcccggcgcagcggccaccgccgcatcgcggactacctggcggacgaccagaccaccaccacagccaccgacgcctccgacaacgagtcctacactaccgcctatggggaggagttcttcgccgccgccgccgccgggagcggcggcgccggcggcatgctgccggcattcctggcggaccagggggacctggtggaggtcatgctggagctggacgaggagtccatggtggtgcgcagcgtcacgcccaccagcgcggcgctctacggcgccgcctccctcccggcgccgccgtccgcgggggtcctcggggtgtcgccgtcgccgcgccgcgcgccttcggagggcggcggccgcctgagccggtgctcgtcgacgtcgtcgcggatacggaagaagttcgcgtggctccggtcgccgtcgccctccccgtccccgtaccgccccacgcccgccgagcttcagcgggaggccgccatggcggcgcgcgagcggcggcgggagcaggcgcagctcaaccggtcccgcgccggcgccaggcgcgcgctcaagggcctccgcttcatcagccgcaccacgggctccgtcgaggccgccgagctctggcgccgcgtcgaggagcgcttcaacgacctcgcccgcgaagggctgctctcccgcgacgacttcggcgaatgcatcggaatggtggactccaaggagttcgcggtgggcatcttcgacgcgctggcgcggcggcggcggcagaacctggagcggatcaccaaggaggagctctacgacttctggctccagatctccgatcagagcttcgacgcgcggctccagatcttcttcgacatggtggacaccaacgtggacgggaggataacgagggaggaagtacaggagctgatcgtgctcagcgcgtcggccaacaagctggcaaagctcaaggagcaggcggaggagtacgcgtcgctcatcatggaggagctcgacccggagaagcttggctacattgagctgtggcagctcgaagcgctgctgctccagcgcgacacctacatgaactacagccgcccgctgagcacggccagcggggcccagtggagccagaacctcggcgtcggcggcgcgctgacgataacagggggaggaggagacggcggctgcggcgtggacggcgaccacccggggcctccgcgcgagcgtcgccggagctggggcgtgcggaaggcggcggcgcgggtgcgcgtggcggcggaggagaactggcgccgcgcctgggtgctggcgttgtggttcgcggccatggcggcgctgttcgtgtggaagttcgtccagtaccggcgcatggcggcgttccaggtgatggggtactgcctccccacggccaagggcgccgcggagacgctcaagctcaacatggcgctcgtgctgctccccgtctgccgcaacacgctcacgtggctccgctcctcctgggcccgcttcttcgtccccttcgacgacaacatcaccttccacaagatgatcgcgacggcgatcgtggtggggatcacgctgcacgcggggaaccacctggcgtgcgacttcccgcgggtgatcgcggcgagcccggaggagtacgcgctcgtcgcgggcgcgttcggcgcggacaagccgacgtacgcggggctcctgtcgggcacggagggcgtgacgggcgtggccatggtggtgctgatgaccgtctccttcacgctggccacgcacccgttccgcaagggggagcccaagggcgcgggcgcggccgccggcacgtcgcggctcccggcgccactgaaccggctcaccggcttcaacgccttctggtactcgcaccacctcctcggcatcgtgtacgcgctcctgctcgcgcacggctacttcctcttcctcgtccggaggtggtacgagaagacgacatggatgtacatttcggtcccgctgctgctctacgtcggtgaaaggatgcttagagccttgaggtcaaatgcttataccgtgaaaattctcaaggtgtgtcttctacctggaaatgtgttgaccataacgatgtcaaagccctatggatttcgttacagaagtggacagtacatatttcttcaatgtccaataatttctccatttgaatggcatcctttctccatcacttcagcacctggagatgactacctcagtgtccacatccggacaaacggtgactggacacaggagctcaagcgcatatttgtggagaactacttctcgccgcatctcaacagaagagcttcgtttagcgagctaggtgcggcagaaccaagaagcttgccaaaattactcgtagatggtccctatggtgcccctgcgcaggattttagaaactacgacgttctacttctcgtcggcctcggaatcggggcaacaccgttcataagcattctacgggatctgcttaataacattaagatagctgacgagctgatggacttggcaatggagaccagcaggtctgaagacagcgccaacagctttagcgtctcaacggcgagtagcaaccggaagagagcatacagaacaagccgtgcacatttctactgggtcacccgagaagccggatcctttgaatggttcaaaggggtgatgaatgaggttgcagaaatggacaagaagggtatcatagagctgcacaattacctcactagcgtttacgaggaacgcgacgcacggacaactctgctgtccatggtccaggctctgaaccacgccaagcacggcgtcgatatcgtatcggggaccagggtgaggacgcatttcgccagacccaactggaaggaagtcttcaccaggatcgcctccaagcatccgaattcaacagtgtgttctactgcggcgcaccgacgcttgccaaggagctgaaggctctggcgcacgagatgagccacaggacgggcactcgcttccatttccacaaggagtacttctgagtttcgacggatagaatgggcagtcgatgctcgttctaacgtgatctggtcttttctgatctgatctcgatagcgttaggtaccggtaaagaagacagaattttgcacagatgcaagacaaaccaagctgacctctcctcctgatctggaactgtacatagcataaaagaagcaccacagggttagcttagtatacgtagcacaattcaaataaatatattgacaaagaaaagagagacagagaaagggcaggatagaggctgttgttgttaactcgaagatattgatgataggcatggcggtatacgtgtatacattatagttaggtgctaggtggtagttatatatatactgtatatgatatgggtcgatgaatatacgaggagccacatgctgctgccattctcaaatgtggacgtgcattcttcaggcgtgttcgtgactgtttggctggtggttgcccatgtgaggggttgctaaaaatgat

SEQ ID NO: 213335 - DNA, 3795 bp, Zea Mays
caatagccaataggtagcggagcaccgcaccgcgaagcaaacgagaggggaaaaaaaagcacgaggaggccgcgcccgcgaaggaatcacttgcccgggcgtgggccgcccaccggccaccgcccagccgctgccgcagtgccgcccgcctgcctgcctgcctggtgcggtggtgcctgcccacgggaacgggatagctggctgacggacgcattgcggagcggactgggagactacgggtaagataataaaagggccaggcgtggcggggcgcaaccaccgctgtgcctcggagaggaggacagctctcgcgccgcggctgccgccatgtggacgccgtcgcgcgggagcaacgcccggcgcagcggccaccgccgcatcgcggactacctggcggacgaccagaccaccaccacagccaccgacgcctccgacaacgagtcctacactaccgcctatggggaggagttcttcgccgccgccgccgccgggagcggcggcgccggcggcatgctgccggcattcctggcggaccagggggacctggtggaggtcatgctggagctggacgaggagtccatggtggtgcgcagcgtcacgcccaccagcgcggcgctctacggcgccgcctccctcccggcgccgccgtccgcgggggtcctcggggtgtcgccgtcgccgcgccgcgcgccttcggagggcggcggccgcctgagccggtgctcgtcgacgtcgtcgcggatacggaagaagttcgcgtggctccggtcgccgtcgccctccccgtccccgtaccgccccacgcccgccgagcttcagcgggaggccgccatggcggcgcgcgagcggcggcgggagcaggcgcagctcaaccggtcccgcgccggcgccaggcgcgcgctcaagggcctccgcttcatcagccgcaccacgggctccgtcgaggccgccgagctctggcgccgcgtcgaggagcgcttcaacgacctcgcccgcgaagggctgctctcccgcgacgacttcggcgaatgcatcggaatggtggactccaaggagttcgcggtgggcatcttcgacgcgctggcgcggcggcggcggcagaacctggagcggatcaccaaggaggagctctacgacttctggctccagatctccgatcagagcttcgacgcgcggctccagatcttcttcgacatggtggacaccaacgtggacgggaggataacgagggaggaagtacaggagctgatcgtgctcagcgcgtcggccaacaagctggcaaagctcaaggagcaggcggaggagtacgcgtcgctcatcatggaggagctcgacccggagaagcttggctacattgagctgtggcagctcgaagcgctgctgctccagcgcgacacctacatgaactacagccgcccgctgagcacggccagcggggcccagtggagccagaacctcggcgtcggcggcgcgctgacgataacagggggaggaggagacggcggctgcggcgtggacggcgaccacccggggcctccgcgcgagcgtcgccggagctggggcgtgcggaaggcggcggcgcgggtgcgcgtggcggcggaggagaactggcgccgcgcctgggtgctggcgttgtggttcgcggccatggcggcgctgttcgtgtggaagttcgtccagtaccggcgcatggcggcgttccaggtgatggggtactgcctccccacggccaagggcgccgcggagacgctcaagctcaacatggcgctcgtgctgctccccgtctgccgcaacacgctcacgtggctccgctcctcctgggcccgcttcttcgtccccttcgacgacaacatcaccttccacaagatgatcgcgacggcgatcgtggtggggatcacgctgcacgcggggaaccacctggcgtgcgacttcccgcgggtgatcgcggcgagcccggaggagtacgcgctcgtcgcgggcgcgttcggcgcggacaagccgacgtacgcggggctcctgtcgggcacggagggcgtgacgggcgtggccatggtggtgctgatgaccgtctccttcacgctggccacgcacccgttccgcaagggggagcccaagggcgcgggcgcggccgccggcacgtcgcggctcccggcgccactgaaccggctcaccggcttcaacgccttctggtactcgcaccacctcctcggcatcgtgtacgcgctcctgctcgcgcacggctacttcctcttcctcgtccggaggtggtacgagaagacgacatggatgtacatttcggtcccgctgctgctctacgtcggtgaaaggatgcttagagccttgaggtcaaatgcttataccgtgaaaattctcaaggtgtgtcttctacctggaaatgtgttgaccataacgatgtcaaagccctatggatttcgttacagaagtggacagtacatatttcttcaatgtccaataatttctccatttgaatggcatcctttctccatcacttcagcacctggagatgactacctcagtgtccacatccggacaaacggtgactggacacaggagctcaagcgcatatttgtggagaactacttctcgccgcatctcaacagaagagcttcgtttagcgagctagcttgccaaaattactcgtagatggtccctatggtgcccctgcgcaggattttagaaactacgacgttctacttctcgtcggcctcggaatcggggcaacaccgttcataagcattctacgggatctgcttaataacattaagatagctgacgagctgatggacttggcaatggagaccagcaggtctgaagacagcgccaacagctttagcgtctcaacggcgagtagcaaccggaagagagcatacagaacaagccgtgcacatttctactgggtcacccgagaagccggatcctttgaatggttcaaaggggtgatgaatgaggttgcagaaatggacaagaagggtatcatagagctgcacaattacctcactagcgtttacgaggaacgcgacgcacggacaactctgctgtccatggtccaggctctgaaccacgccaagcacggcgtcgatatcgtatcggggaccagggtgaggacgcatttcgccagacccaactggaaggaagtcttcaccaggatcgcctccaagcatccgaattcaacagttggtgtgttctactgcggcgcaccgacgcttgccaaggagctgaaggctctggcgcacgagatgagccacaggacgggcactcgcttccatttccacaaggagtacttctgagtttcgacggatagaatgggcagtcgatgctcgttctaacgtgatctggtcttttctgatctgatctcgatagcgttaggtaccggtaaagaagacagaattttgcacagatgcaagacaaaccaagctgacctctcctcctgatctggaactgtacatagcataaaagaagcaccacagggttagcttagtatacgtagcacaattcaaataaatatattgacaaagaaaagagagacagagaaagggcaggatagaggctgttgttgttaactcgaagatattgatgataggcatggcggtatacgtgtatacattatagttaggtgctaggtggtagttatatatatactgtatatgatatgggtcgatgaatatacgaggagccacatgctgctgccattctcaaatgtggacgtgcattcttcaggcgtgttcgtgactgtttggctggtggttgcccatgtgaggggttgctaaaaatgat

SEQ ID NO: 213336 - DNA, 1154 bp, Zea Mays
aggacttcgttcctatctcgtgctcagcgttatcttctccgtggcgctcatctccctgatattttcactgcgccgcggcttccagcgctcagcctccagctcccacgcgcactccacctcgtccatggccgccgatcgagtccctccccatctcctacaaccggccgccctgctcgttctccctagctgcgatgtggagctcgccctggacgatcgtccttgcccctcctctctgatctgcgtgcaggggtttccctcccatggcgcctggtcttcttcccttgactccatgccgagcgccccagtcgagctcgtcctggctccagcttcttccttggacggcggagccctcccattcctgcagcaggccagcgtccctctctccatcatcttctctgcttggttcctggcgagctccccctgctcttctgctcgccctggccctgtgccatttttccattcctgcggcaagcaccagtccctccccacgccaacatccctttcctacggacgctgcccctctctggtttctggtggccggccacctctgctgctcccatgtaaaatctctggagaattaggtggaggagaaggttaagttcaacgctccttaggtgttctatgaagtgcttgaactgaagttcgttgtcgttctgttcaccgcggttcgttaattgatcacgtgatgcggacgacaagagccgagttgatcccaaaatgatgctggtgaacgaacctgaagcttggatgatctggtcaagtaccaggacgagagatgctccccaagcggacatcatctaacaacactgacttagtgttatctcagacaagccccggtgtatttgccacctccttctgttttaaaaacttttatcacttacctgctgtattaggtgataggagttgtgtgaataaacaattgatgcattatcattccttggaatttgattatcctccttgctacttgttttataaagagaactaatgaggctaagcccttcctagagaactaaaacttgattatttttaaaagaatgttgtgtaacactgggtatgggtttgttttatgaaaaaggacttgtaatggtgagagcatcatctgtagtgatgaattcatcattcaagtatgatacctctgtctggtacatggtttt

SEQ ID NO: 213337 - DNA, 1134 bp, Zea Mays
aggacttcgttcctatctcgtgctcagcgttatcttctccgtggcgctcatctccctgatattttcactgcgccgcggcttccagcgctcagcctccagctcccacgcgcactccacctcgtccatggccgccgatcgagtccctccccatctcctacaaccggccgccctgctcgttctccctagctgcgatgtggagctcgccctggacgatcgtccttgcccctcctctctgatctgcgtgcaggggtttccctcccatggcgcctggtcttcttcccttgactccatgccgagcgccccagtcgagctcgtcctggctccagcttcttccttggacggcggagccctcccattcctgcagcaggccagcgtccctctctccatcatcttctctgcttggttcctggcgagctccccctgctcttctgctcgccctggccctgtgccatttttccattcctgcggcaagcaccagtccctccccacgccaacatccctttcctacggacgctgcccctctctggtttctggtggccggccacctctgctgctcccatggtggaggagaaggttaagttcaacgctccttaggtgttctatgaagtgcttgaactgaagttcgttgtcgttctgttcaccgcggttcgttaattgatcacgtgatgcggacgacaagagccgagttgatcccaaaatgatgctggtgaacgaacctgaagcttggatgatctggtcaagtaccaggacgagagatgctccccaagcggacatcatctaacaacactgacttagtgttatctcagacaagccccggtgtatttgccacctccttctgttttaaaaacttttatcacttacctgctgtattaggtgataggagttgtgtgaataaacaattgatgcattatcattccttggaatttgattatcctccttgctacttgttttataaagagaactaatgaggctaagcccttcctagagaactaaaacttgattatttttaaaagaatgttgtgtaacactgggtatgggtttgttttatgaaaaaggacttgtaatggtgagagcatcatctgtagtgatgaattcatcattcaagtatgatacctctgtctggtacatggtttt

SEQ ID NO: 213338 - DNA, 3546 bp, Zea Mays
cgccgtcgctgatggcgatcccccgtcgcctatcttgccttcccacggttgccgcggccaccaagtggtcggccgggaatctcgccatagacatcggcacaatcggcgcgagaccctcaacggcagccctggctgccgccgcgacggcggccgccgccgccggccgcgcctcggagtgccagtccctcctcctccgcatgtcgcgccgccgcggcgcctctcgacgcgagatcgtctcttccctcctcgcctcgtcccccactccgcagccgcaggtgttcgacctcctcatccgcacctacacccagtcgcggaagccccgggaggcctttgaggccttccgcctcctcctcgaccaccgcgtccccgtcccagcctctgcgtccaacgctctccttgccgtgctctcccgcgccgggtggcctcacctcgcccaggaggcctaccgcctcgtcctctcgtctgactcggaggtaaacgcctacacgcttaacatcatggtccacagctactgtaaaaccctagagttcgatggggctgacactgtcatctccgagatggagaagagatgcgtgttcccggatgtggttacacacaatgtgttgattgatgccagattccgtgctggagatgtggatgcagcgatcgcattggttgattccatggccaatagggggttgaagcctgggattgtgacatacaattcggttttgaaggggttgtgtaagcacagaaggtttgataaggcaaaggaggtgttcaggacaatggaccagtgcagtgttgcaccagatgttcggagtttcaatattttgatcggaggattttgtagggttggggaggttaaggaggcagtgaagttttacaaggagatgcaacatcgttatgttacaccagatgtggtcagctttagctgtttgattggattattctcgaggagaggggagatggaccatgcaggggcatacttgagggaaatgaaggggcttggattggtgcctgatggtgtgatttacacaatggtcataggtgggttttgtagggctggatcaatgtcagaggctctaagagttagggatgagatggttggctttggatgtctgccagatgtggtaacatacaataccctgttgaatgggctctgtaagcagcacaggttgcttgacgcggagaaacttttgaatgagatggaggagagaggggttacaccagatttatgcactttcacaactttgattcatgggtactgtaggcaaggtaactttgagaatgcattgcaattgtttgacacactgttgcgccagcgtttgaggccagatgtcgtgacatacaatagtttgattgatgggatgtgcagaaaaggtgatctggccaaagctaatgagctatgggatgatatgcatgctcgagaaatcttacccaatcacattacctacagtatcctaatagacagccactgtgagaagggacaagttgaggatgcattcggttttctggatgaaatggtcaagaagggaaatttgcctaatatcaggacctataattccatcatcaagggttattgccgatcaggtaatgtaaaaaaggggcagcagtttttgcaaaagatgaggcaagataacgtattcccagatctgattactttcaacaccctgatccatggttatataaaagaagaaaacatgcatggagctttcaatgtgtttaatataatggagaaggaaatggtacggccagatgctgtcacgtataatatgatcataaatgggttttctgaacaaggcaatatgcaagatgctggtcgtgttttcaagggaatgggtgacagtggaattgaaccggatagatatacatacatgtcattgataaatggtcatgttacagctggcaactcgaagcaggcgttccaacttcatgacgagatgatccatagagggtttgctcccgatgacaaattttgaggcttgtcagttctgacctattggacataagcaagagaaatgcatgtgttgtgtgtttgacagtgtctttgaaaatcacacctccagaaatttgtgatttcgaagcgtcgaagggacaggtccagaaaaaaaggggagattgttaaaattccattacttgggagtgaccgcacgaactatggtaatgttggcatgttgctccaactatgttctaaagattccatggcgtggtaagattttaagaaatacgaacatgttatttgagtatataattattgttcacacttaaatctcatctttcacttaacctttattagacaactacatgatctatggggtcaatcaaacaaaaagtttatgataaaaatgtcctttaattcttttttcccaaatctactgattcactcttttttgaacaaaaaactactgctacacttctttgttatctatagagttacacagtgaccacaccttcagatattgctctgttttataagctttgtctagagattttattttagtgcaaaaagcaacatagtgcctactgcctcctatctgatcaggaaatgttacacacagacctatagacagttacatactgaccacagcttcagatattgctctgcttgataagcttcatatggagagtttattttagtgcaaacaggcctcctactacctgatcagggattgttacacagcactgcatcactaaatttattatgtggtaatttccgctaccttgattatcctaaagatcctgaggtgaaactgtgcctttttgatcgggcactgctgaatttgaaaaaggaaaacaaattgctcttacaatttaaagcctggaggatattatgtgaggagtgagcggatcctaacttctgagcaaaaggcttatgatagcagatatggtaaagatggaattggccccaaaaaactcattatatttatcttctgtatgaacaacagccttctacggaagatgtacaaggtatcatatttacaaacttacactgttttacatgcaggctaagcaaaactgctgcacaaaaaggaaacagaatttgactggacgtctgaatatcttcccttcagtctgagctccagaccagagtgcaaaaagaaacattgaaccaatggaaaaaatgaataaaagaacaatcagtaactacagtgcatgtctgaagattctcatgggcgtgggcatcttcctccaggattgttgggatcaaatgtgcagccagacgctccaggcatcgaggatgtcagggacaccgagcttcctcgttgtggctgtgatttctctctcaggacacggaatgcagcgatggtagtggcttgtgccgccagggccaggcagattatgagaaccagaggaaaaaataatccacagcaataccacaaaacttctgcgtcagttctgtcatctttcattggagcatccctgatccgtgcctcgcaaggttctacaaatgtcaacctcatttcgttgcaggttcacaactataattttatagttttacctgaccgaccaggctcacgtgagactgggtgtgcggacacagtaaaccaatcaggcgcaatataa

SEQ ID NO: 213339 - DNA, 2993 bp, Zea Mays
atggcgatcccccgtcgcctatcttgccttcccacggttgccgcggccaccaagtggtcggccgggaatctcgccatagacatcggcacaatcggcgcgagaccctcaacggcagccctggctgccgccgcgacggcggccgccgccgccggccgcgcctcggagtgccagtccctcctcctccgcatgtcgcgccgccgcggcgcctctcgacgcgagatcgtctcttccctcctcgcctcgtcccccactccgcagccgcaggtgttcgacctcctcatccgcacctacacccagtcgcggaagccccgggaggcctttgaggccttccgcctcctcctcgaccaccgcgtccccgtcccagcctctgcgtccaacgctctccttgccgtgctctcccgcgccgggtggcctcacctcgcccaggaggcctaccgcctcgtcctctcgtctgactcggaggtaaacgcctacacgcttaacatcatggtccacagctactgtaaaaccctagagttcgatggggctgacactgtcatctccgagatggagaagagatgcgtgttcccggatgtggttacacacaatgtgttgattgatgccagattccgtgctggagatgtggatgcagcgatcgcattggttgattccatggccaatagggggttgaagcctgggattgtgacatacaattcggttttgaaggggttgtgtaagcacagaaggtttgataaggcaaaggaggtgttcaggacaatggaccagtgcagtgttgcaccagatgttcggagtttcaatattttgatcggaggattttgtagggttggggaggttaaggaggcagtgaagttttacaaggagatgcaacatcgttatgttacaccagatgtggtcagctttagctgtttgattggattattctcgaggagaggggagatggaccatgcaggggcatacttgagggaaatgaaggggcttggattggtgcctgatggtgtgatttacacaatggtcataggtgggttttgtagggctggatcaatgtcagaggctctaagagttagggatgagatggttggctttggatgtctgccagatgtggtaacatacaataccctgttgaatgggctctgtaagcagcacaggttgcttgacgcggagaaacttttgaatgagatggaggagagaggggttacaccagatttatgcactttcacaactttgattcatgggtactgtaggcaaggtaactttgagaatgcattgcaattgtttgacacactgttgcgccagcgtttgaggccagatgtcgtgacatacaatagtttgattgatgggatgtgcagaaaaggtgatctggccaaagctaatgagctatgggatgatatgcatgctcgagaaatcttacccaatcacattacctacagtatcctaatagacagccactgtgagaagggacaagttgaggatgcattcggttttctggatgaaatggtcaagaagggaaatttgcctaatatcaggacctataattccatcatcaagggttattgccgatcaggtaatgtaaaaaaggggcagcagtttttgcaaaagatgaggcaagataacgtattcccagatctgattactttcaacaccctgatccatggttatataaaagaagaaaacatgcatggagctttcaatgtgtttaatataatggagaaggaaatggtacggccagatgctgtcacgtataatatgatcataaatgggttttctgaacaaggcaatatgcaagatgctggtcgtgttttcaagggaatgggtgacagtggaattgaaccggatagatatacatacatgtcattgataaatggtcatgttacagctggcaactcgaagcaggcgttccaacttcatgacgagatgatccatagagggtttgctcccgatgacaaattttgaggcttgtcagttctgacctattggacataagcaagagaaatgcatgtgttgtgtgtttgacagtgtctttgaaaatcacacctccagaaatttgtgatttcgaagcgtcgaagggacaggtccagaaaaaaaggggagattgttaaaattccattacttgggagtgaccgcacgaactatggctaagcaaaactgctgcacaaaaaggaaacagaatttgactggacgtctgaatatcttcccttcagtctgagctccagaccagagtgcaaaaagaaacattgaaccaatggaaaaaatgaataaaagaacaatcagtaactacagtgcatgtctgaagattctcatgggcgtgggcatcttcctccaggattgttgggatcaaatgtgcagccagacgctccaggcatcgaggatgtcagggacaccgagcttcctcgttgtggctgtgatttctctctcaggacacggaatgcagcgatggtagtggcttgtgccgccagggccaggcagattatgagaaccagaggtagaacttggtttctttggaacatcgtggtatcttgtgaacttcagtatcgagtgagatgcgaagctaggatttgaggctattatatattaagtttatggtctgcgtgttggtttccttggcgatcacggtttttacgcgttctcccatgtggacgagtattcacaaggttgaccgcatgtatacagagtcgctcaactcgtcgtgaacaagttcacagaaggatctctattgcacaagcacaatgtatttcagaagtagaaataagaccattggttactgtgtcgcaatgtcttccttaggaaaaaataatccacagcaataccacaaaacttctgcgtcagttctgtcatctttcattggagcatccctgatccgtgcctcgcaaggttctacaaatgtcaacctcatttcgttgcaggttcacaactataattttatagttttacctgaccgaccaggctcacgtgagactgggtgtgcggacacagtaaaccaatcaggcgcaatataa

SEQ ID NO: 213340 - DNA, 3720 bp, Zea Mays
atggcgatcccccgtcgcctatcttgccttcccacggttgccgcggccaccaagtggtcggccgggaatctcgccatagacatcggcacaatcggcgcgagaccctcaacggcagccctggctgccgccgcgacggcggccgccgccgccggccgcgcctcggagtgccagtccctcctcctccgcatgtcgcgccgccgcggcgcctctcgacgcgagatcgtctcttccctcctcgcctcgtcccccactccgcagccgcaggtgttcgacctcctcatccgcacctacacccagtcgcggaagccccgggaggcctttgaggccttccgcctcctcctcgaccaccgcgtccccgtcccagcctctgcgtccaacgctctccttgccgtgctctcccgcgccgggtggcctcacctcgcccaggaggcctaccgcctcgtcctctcgtctgactcggaggtaaacgcctacacgcttaacatcatggtccacagctactgtaaaaccctagagttcgatggggctgacactgtcatctccgagatggagaagagatgcgtgttcccggatgtggttacacacaatgtgttgattgatgccagattccgtgctggagatgtggatgcagcgatcgcattggttgattccatggccaatagggggttgaagcctgggattgtgacatacaattcggttttgaaggggttgtgtaagcacagaaggtttgataaggcaaaggaggtgttcaggacaatggaccagtgcagtgttgcaccagatgttcggagtttcaatattttgatcggaggattttgtagggttggggaggttaaggaggcagtgaagttttacaaggagatgcaacatcgttatgttacaccagatgtggtcagctttagctgtttgattggattattctcgaggagaggggagatggaccatgcaggggcatacttgagggaaatgaaggggcttggattggtgcctgatggtgtgatttacacaatggtcataggtgggttttgtagggctggatcaatgtcagaggctctaagagttagggatgagatggttggctttggatgtctgccagatgtggtaacatacaataccctgttgaatgggctctgtaagcagcacaggttgcttgacgcggagaaacttttgaatgagatggaggagagaggggttacaccagatttatgcactttcacaactttgattcatgggtactgtaggcaaggtaactttgagaatgcattgcaattgtttgacacactgttgcgccagcgtttgaggccagatgtcgtgacatacaatagtttgattgatgggatgtgcagaaaaggtgatctggccaaagctaatgagctatgggatgatatgcatgctcgagaaatcttacccaatcacattacctacagtatcctaatagacagccactgtgagaagggacaagttgaggatgcattcggttttctggatgaaatggtcaagaagggaaatttgcctaatatcaggacctataattccatcatcaagggttattgccgatcaggtaatgtaaaaaaggggcagcagtttttgcaaaagatgaggcaagataacgtattcccagatctgattactttcaacaccctgatccatggttatataaaagaagaaaacatgcatggagctttcaatgtgtttaatataatggagaaggaaatggtacggccagatgctgtcacgtataatatgatcataaatgggttttctgaacaaggcaatatgcaagatgctggtcgtgttttcaagggaatgggtgacagtggaattgaaccggatagatatacatacatgtcattgataaatggtcatgttacagctggcaactcgaagcaggcgttccaacttcatgacgagatgatccatagagggtttgctcccgatgacaaattttgaggcttgtcagttctgacctattggacataagcaagagaaatgcatgtgttgtgtgtttgacagtgtctttgaaaatcacacctccagaaatttgtgatttcgaagcgtcgaagggacaggtccagaaaaaaaggggagattgttaaaattccattacttgggagtgaccgcacgaactatggtaatgttggcatgttgctccaactatgttctaaagattccatggcgtggtaagattttaagaaatacgaacatgttatttgagtatataattattgttcacacttaaatctcatctttcacttaacctttattagacaactacatgatctatggggtcaatcaaacaaaaagtttatgataaaaatgtcctttaattcttttttcccaaatctactgattcactcttttttgaacaaaaaactactgctacacttctttgttatctatagagttacacagtgaccacaccttcagatattgctctgttttataagctttgtctagagattttattttagtgcaaaaagcaacatagtgcctactgcctcctatctgatcaggaaatgttacacacagacctatagacagttacatactgaccacagcttcagatattgctctgcttgataagcttcatatggagagtttattttagtgcaaacaggcctcctactacctgatcagggattgttacacagcactgcatcactaaatttattatgtggtaatttccgctaccttgattatcctaaagatcctgaggtgaaactgtgcctttttgatcgggcactgctgaatttgaaaaaggaaaacaaattgctcttacaatttaaagcctggaggatattatgtgaggagtgagcggatcctaacttctgagcaaaaggcttatgatagcagatatggctaagcaaaactgctgcacaaaaaggaaacagaatttgactggacgtctgaatatcttcccttcagtctgagctccagaccagagtgcaaaaagaaacattgaaccaatggaaaaaatgaataaaagaacaatcagtaactacagtgcatgtctgaagattctcatgggcgtgggcatcttcctccaggattgttgggatcaaatgtgcagccagacgctccaggcatcgaggatgtcagggacaccgagcttcctcgttgtggctgtgatttctctctcaggacacggaatgcagcgatggtagtggcttgtgccgccagggccaggcagattatgagaaccagaggtagaacttggtttctttggaacatcgtggtatcttgtgaacttcagtatcgagtgagatgcgaagctaggatttgaggctattatatattaagtttatggtctgcgtgttggtttccttggcgatcacggtttttacgcgttctcccatgtggacgagtattcacaaggttgaccgcatgtatacagagtcgctcaactcgtcgtgaacaagttcacagaaggatctctattgcacaagcacaatgtatttcagaagtagaaataagaccattggttactgtgtcgcaatgtcttccttaggaaaaaataatccacagcaataccacaaaacttctgcgtcagttctgtcatctttcattggagcatccctgatccgtgcctcgcaaggttctacaaatgtcaacctcatttcgttgcaggttcacaactataattttatagttttacctgaccgaccaggctcacgtgagactgggtgtgcggacacagtaaaccaatcaggcgcaatataa

SEQ ID NO: 213341 - DNA, 1556 bp, Zea Mays
ccattaacgagacaccccataaacctcccactgccacggcccagcccacaagtccaagacttcgccagatatttcggcctcgaagcagctaaataccacaccaggtgcggcttaaacccttatcgccaccagtggccgcgtcctcttcatttccgccatccgtatcgtctccctagggtttggcactttggccgccgccatggcgtcggcgtcgcgtgcgctcctcctctcccgtgcgctccaggccggcgcgtctcgccgcgtccccgccctcctgcgcccggtcgctgcggccgcgagcctcctcccagcggtggcggggccggcaggggccgccctcggcgctagggtgcggtgcttcgcgacccagccggcgacgtcctcgctgcgggactcgtccccaaactggagcaatcgcccgcccaaggagacgatcctcctcgacggctgcgacttcgagcactggctcgtcatcatggagccgccgcctggtgacgcctccaaccccgacatcacacgcgacgagatcatcgatagctatatcaagactctcgcccaagtcgtcgggagtgaggaagaagctaggcaaaagatatactctgtatcgactcgtcattactttggctttggtgctcttgtatctgaggaactttcttacaaactgaaagaaattcccaaggtccgctgggttcttcctgattcatacttggatgtcaaaaacaaggactatggaggcgaacccttcataaatgggcaagctgttccttatgatcctaaatatcatgaagagtgggtgagaaacaatgcccgtgccaatgacagaaaccgatgccatcccaccatagtcagggcaacatgtctccgcaaccaccacatgctggtggtggccaaccaaactatcagccccaaatgcaaaacccacagacgggctacaaccctggcggtgctcctcactaccagcaaggtgctgctcctggctaccaaggtggtaacactggttatcaaggtggcaacccaccacctccctaccaaggaagcaacccaccacctccttaccagggaggcagcccaccagggccaccacctccctaccgaggaggcagcccaccagggccaccacctccctaccgaggaggcaaccccaacgtaccgccatattcgggtggtggcaatcctggctaccctggtggcagccctggctaccagggtcaaggaggcaactccaacttccagtgaacatgaccacgagtactaagttggcacccctgtttcagagtagccttctgcaagagatggtgcgccgtagcctagcataaatcgaacccttgttgctatcggattttcatggattgtcgctgtttgcacttaatgttctatatatagtactcaaaactatgcttggtgtctgagtgatgtacgtggaattctgaaactatggatcagctcttgtgtgcacttgctgaaccagatacccagcaatcatcatgaaatctgttgttgaaggaaaatggtggtgacatattttgccttttagtggatgagtcagccgatgtgag

SEQ ID NO: 213342 - DNA, 1512 bp, Zea Mays
tccaaaaataaaatccaatcgaggggaaaaataatccttttcccgttcttctgaagctgtcctcttcttcccgtcgcttcgccgtcccgcaccagggaggagaggaggcttcaccgcgaagctcgccatgatctcgccggagaggagttcgtcacagagcccgcggtcgcaggcggtggcgggggcgccattcctgtggatatctgtcatggatcccgtcagatgggcaccggcgtgcaggcctacatctcctaccgcgtcatcaccaagaccaacctccctgaatttgagggaccagagaaaattgttattcgacgctatagtgattttgaatggttgcatgatcggcttgctgagaggtacaaaggcgtttttatacctccccttccggagaagaatgctgttgagaaattccggtttagcaaggagttcattgaattgcgtcgtcaagctttggatttatttgttaacaggatagcttcacaccctgaactcaagcaaagtgatgtcttgaggacatttttgcaggcagatgaagagataatggatagggcaagatcttatgagaccggtatttttaagaaaccatcagattttttacagatgtttaaggacgtacagtcaaaagtcagtgatgttgttctgggaaaagaaaagcccgtggaggaatctactcctgaatatgagaagcttaaaagttacatatttgagctagaaattcatttagcagaggcccaaaaacaagcataccgtcttgtgaaaagacacagagaacttggacaatctttggcggacttcggaaaggcgattaagcttttgggctcttgtgaaggagatttgatggaaaaggtgttttctgaagttggttcaaagtcagagatgttgtcaataaagctacaaagagaggcagacaaccttctctttaactttgaagaacccttgaaagattatgtgcgtgctctacaatctataaaagccactatgctggatcgagctaatgctttcaggcagcactttgatttggatcaggagaggaagtataaagagcttaatcttgaaaaattgaagttcatgaaccctgagaagtatgccgaagcagaatctgagtttagagggttgaaagcagacagtgaggaggctacgaagaagtttgaacacatagctaagctagctaaggacattgcggatgcatggcgcagcgtcctcccaaagctcgaagcttgttccacatcataaagtgtgatccgtgtttcctcatgatgtttgggaaggggttggtagctggtgaggtttaggctgttttttttttccagcctgttttgacacggattcctgtatacttgaactgcgggttggaaatgtaccagctgttagattcagttgacataatttcttgctgtttgagcctgtaaccatcatctcttcttagatcaattgacacaactgctggaatcgcgtaataatggtaatcaataatgaagaaatgctgtaccacggtgctggttcctgtaa

SEQ ID NO: 213343 - DNA, 949 bp, Zea Mays
gaacaaaccccgcacgactcgttctcattccactctccaacgcgcaccgggcggtttttcgttcctttctttttttttcccctcttccccttccccttctccttccagcggcgctcaggccaccgccggccaatcccatcacccgccggatagggatcgacccgttcgttgattggcgcgcgcctgcgatcgatcgattggattgcagggttagggcggccgccgtcgagatagatcgatccatccatcgatcgaattggttttgttggtggatcggagatattcattcgggtccatgggtcggctgctgctggtgagcctcccggcgacgggcgccgtcatctaccgctgcaagcactgcgacacccacctcgcctacgacaccgacatcatcgcaaggacgttccgctgcaagaacggcaaggcctacctcttcaacaggatcgtgaatgtgaatgttggtacgaaggaggaggaccggatgatgacgacgggcctgcacaccgtgtgcgacatcttctgcgtcgcctgcggagccatactcggctggaaatacctcgtcgccttcgacaagagccagaggtacaaggaaggcaagttcatcctcgacaggtccaccgccttggcagccgctcctggtgatgccgctgctgaccaccaccaccaccacgctcgcgtagcaagctccgatgacgaagatgaccatatgtgaatgatgatgatgatgaatgtcatctgcattgcattcaccataatcccttgctatctcgacagttacaaacagatctccattgcctgcttgcgctgttgattgctctgctctgttctcttatgttgctaaccgactctgctcttcaaccagccgagttcggctgcttctgcctcgagctgctgacacaagaatactgtaacataatgtttgggacagctttatatttggtgaaactag

SEQ ID NO: 213344 - DNA, 1330 bp, Zea Mays
cgtccgtcgtcccctttgtgaatcgtgcatgacaggtagatatcgcctagctctggaaccgctctcgggagccctggcggccggcaacgccgtggtggtgaagccgtcggagctcgcgccggccacctcggcgttcctcgcggccaacatacccaagtacctggactccaaggccgtgaaggtggtggagggcgggccggaggtgggggagaagctcatggagcaccgatgggacaaggttctcttcactggcagcagccgcgttgggcgccttatcatggcccaggccgccaagcacctcaccccggtggcgctggagctcggctccaagtgcccctgcatcgtcgactggcttgacagcgacagggacagccaggtagctgtgaatcgcatcatcggagcgaaatggtccacctgttccggccaagcctgcatcgccatcgactacctgctggtggaggaggagtttgctccgattctgatcgagatgctcaagtcgacgctggagaggttcttcaccaagccagagtacatggcgcgcatcctgaacgagaagcagttccagaggctgagcggcttcctggccgaccgcagggtggcgtcttccgtggtccacggcggccacttcaaccccaagacgctgagcatggagcccacgcttctgctcaaccctccgctcgactccgacatcatgacggaggagatattcggcccgctgctcccgatcatcacggtgaagaagatcgaagacagcatcaagttcctcaggtccaagcccaagccgctggcgatctacgccttcaccaggaacgagaagctgaagcaacgcatcatagacgagacgtcgtcggggagcatcacgttcaacgacgccatcgtgcagcatcccgttcggtggcgtggggcacagcgggttcggccagtaccacggcaagtactcgtttgacatgttcagccacaagaaggcggtgctcaagaggagcttcctcgtcgagttcatgttccgctacccgccgtgggacgagaccaagatcggaatgctcaggcgcgtctaccgcttcgactacgtctcgctcttcctcgcgctcatcggcctcaggagatgaagcagacggcggagagtgcgtgaacaatcgagccaacagaatttgcacccacacccaacacacagttgctagtggtcaattgtcgttcatactgatcgatgaatatgtaattgtcccttctgtacaccaaaacgtctgtagtgtcgtttactcgttttatacgtgtctgtctatttatcgcaccaaaagatatttaataataatggattattatctttctagtt

SEQ ID NO: 213345 - DNA, 1620 bp, Zea Mays
cgccgagcactatatagcacgtgttcgcgtgcaccggcggcaaccacagcccaggctcgagactacaacgttacagcacaacacactgctgcacgtacatacgcagatagagaccagcagcaagctcgatcgagactcgagaggcatggggagtgtaccggaggagaaggccaagctgggcttcggcggcctggtgggcgacctgagggaggtgtacgagagcggcaggacgcagggcctggagtggcggcagtcgcagctcaggggcctcgtcaggctcctggaggagaaggaggaggagatcttcgacgtgctccacgaggacctggggaagcaccgcggcgaggccttcagagacgaggttggggttctgaagaagtccgtcgtcgacaagctgcaaaacctcaagaactgggcggctccggagaaggctcacacgccgctcgttgccttcccggcgaccgcgctggtggtgccagagccgctcggggtcgtgctcgtcttctcatgctggaacctcccaataggcagcagccgcgttgggcgccttatcatggcccaggccgccaagcacctcaccccggtggcgctggagctcggctccaagtgcccctgcatcgtcgactggcttgacagcgacagggacagccaggtagctgtgaatcgcatcatcggagcgaaatggtccacctgttccggccaagcctgcatcgccatcgactacctgctggtggaggaggagtttgctccgattctgatcgagatgctcaagtcgacgctggagaggttcttcaccaagccagagtacatggcgcgcatcctgaacgagaagcagttccagaggctgagcggcttcctggccgaccgcagggtggcgtcttccgtggtccacggcggccacttcaaccccaagacgctgagcatggagcccacgcttctgctcaaccctccgctcgactccgacatcatgacggaggagatattcggcccgctgctcccgatcatcacggtgaagaagatcgaagacagcatcaagttcctcaggtccaagcccaagccgctggcgatctacgccttcaccaggaacgagaagctgaagcaacgcatcatagacgagacgtcgtcggggagcatcacgttcaacgacgccatcgtgcagtatggcctggacagcatcccgttcggtggcgtggggcacagcgggttcggccagtaccacggcaagtactcgtttgacatgttcagccacaagaaggcggtgctcaagaggagcttcctcgtcgagttcatgttccgctacccgccgtgggacgagaccaagatcggaatgctcaggcgcgtctaccgcttcgactacgtctcgctcttcctcgcgctcatcggcctcaggagatgaagcagacggcggagagtgcgtgaacaatcgagccaacagaatttgcacccacacccaacacacagttgctagtggtcaattgtcgttcatactgatcgatgaatatgtaattgtcccttctgtacaccaaaacgtctgtagtgtcgtttactcgttttatacgtgtctgtctatttatcgcaccaaaagatatttaataataatggattattatctttctagtt

SEQ ID NO: 213346 - DNA, 2470 bp, Zea Mays
cttctcaacaagaaagcaaattccctgtccgaatcctcattttccacgaaccaaaatcactatttcttatatattctattccctctcctctctgcaccgcccgccgcgccgagcacgcctctccctccctcgatccagatccaccccatacctccgcggcgccaccccttcccgctccttctagccggcgtcggcgcgggccggagatctgttttctccggtaggaaaaatcctattgcgatctaaatatgggttcgaaatcggtagacgaggtgctcgacgccgccgccgccggagtccattactccgcactccgtctggacggccaggcttccgcaacgacgtctggcctggagaacggccaccaggagccctttgtcattggtgttgctgggggtgcatcgtcaggcaagagtaccgtgtgcaagatgatcattgatcagctccgtgaccagcgtgtcgtggttgttacgcaggagtccttttattatggattgacggatgaagaattagtacatgtccataattataactttgatcatccagacgcatttcatacagagctacttctctcttgtatgcaaaacttgaaatgtggcaaagctgttgacatccctaactacaacttcaagacatacaaaagtgtcccaaatgcaaggaaggttaatccttcggatgttattattttggaaggaattctagtttttcatgattcacgcctcagggatttgatgaacatgaagattttcgttgatacagacgctgacgtacggttaacaaggaggatccatcgtgataccattgacaagggtagagatctcaaagctgtgttagaacagttctcaaaatttgttaagcctgcttttgaagacttcatcctcccaacgaagaagtatgctgatgttatcatcccacgcggaggagacaatgatgtggcaattgacctaatcgttcagcatattcggactaaacttggacaacatgatcttcgtaaaatacaccctaatctgtatgtaattcagactacttatcagatacgaggcatgcacacaataataagggatgctgccacagcaacacatgatttcatattttatgctgatcggttgattcgattggttgtcgaacatggtcttggtcatcttcctttccaggaaaagcaggtcatcactccgactgggtctgtttacactggtgtggagttctccaaaaggttgtgtggtatctcagtgatcaggaggcactcacataaggagggggaaatgagctttgtacaagtataacagtgatatcattatgttgatactatgccttagatagcctgtgaattattttttgccgcattggcacttcacaaatgctcgacacttggccatattgaaaacttcatcccagtctcagttatctttgctatatatatgtactgttcattgttcctacaaatacagtatggttgttttagctataaaacatgcacaattgacccctcatgcactagaattcaattcatcagtcatcacaagaacatctatgtactctacaaatgatttgctacaactggtttccagtggcgaaagtatggagaatgcactacgtgcatgctgtaaaggtataaagattgggaagattcttattcatcgggaaggtgacaatggacaacagctcatctatcaaaatttaccaaaagatattgcaaataggcatgttctgctgttggaccccatattgggaacaggaaactcagcagttcaagccatctcccttctattaaagaagggtgtacaggaagcaaatatcatatttcttaatcttatttcagcgccccaaggagtgcatgtggtgtgcaagagattccctagaatgaagatcgttacttcggagattgagtccggtctaaatgatgatttccgtgtcgtacctgggatgggcgaatttggagacagatacttcggaacagatgaatatcagtcatcgacgccatttttctgtgacgataaaaatcgtgtcaggctcttgtgagaagacaacataagccatggacgcggcatattctccaattttttagaaacttatatctgcatttcgaactctagaatgcacatataatgatgctttctttaccatacagacagcacagaacacctcttggtataattggacccattccatttttgtctgtttggaaagcagtgtcatgttcagtagcctctagaaggaacattttttttctttcatgtaataaattagggtaaaaaggatgttttggatcggaacttaattcacataaaaagtgtgaagcttaaatacgaactcctgtcgacttttgattttttttttgaagtatcaataagtgtgtaatctttttcttattcagctattcccccttcctcttgcccctcgtaaggatgctcatacgaggtttaagcttgcggtcgagtaacttcctggatagccccaaactatctccatg

SEQ ID NO: 213347 - DNA, 3826 bp, Zea Mays
cggggatgttccagcgcgtcgtcgtcgtccgattctgtctccctcaggtcgagattcgagagttcccgtgttcgtccatccgcgctgtgaggttctccgatggccgagaagtcacccagctccgcgccgcagggtggttctggtgggaatgaatcattcgataatcttgtaattcaagctccacagcttatgagggaggattacatacagaatgctgtgaagtttctttcacatccgaaagtgaagggttctccagtatttcacaggcgttccttcctggaaaagaaaggccttacaagtgaagaaattgatgaggccttttgtagagttcctgaccctaagccaaatggaacagatgctgtagctgctggtaggcaacaagcaaacaatcccagtcaatctgttgtgctgcaaccttatacagaagttcaaccacaagcagctactgcctctgccactgctggaccaattgttccacatacaaaggcacagttgagctgggtaaacacactccttggtgcaggtctttttcttggtttaggggctagtgctgccataaccctaaagaaattggtcatccctagtctgaaatcttggactcgtagagtcgttgctgaaggagatgaaaatgcaaagagtgaacatacttccaaactttgtgaagaaattagggaagccataaaagtttctgcatcagccttttctgatattgctaaaataaaccaagaagtgcttgcttcaaaagatgaaggtttcagaatttgtttttgataatttatcatatttgaaagtacagtagccattatatttttggattttgttactttagtgagttaactcctttttacagataggaaggtactcatgaagttaacagaagcattcgagtcacaagaaaatgtgtttaaatcattgagtgagaccttaaatcgtatcagggagaatcagctttcggattgcaatttcagaaattttgggctgctcaattcagccctcattacccttttgccaaagcttgagggtgcagcccttgtgaaggacttccgtccgatcagcctcatacatagcttcgccaagctggtaacaaagatgatggcaaataggctggctggacacttgggtgcaatggtttcacccaatcagacggcttttatcaaaaaaaggttcattcttgacaacttcatattggtgcagcgtacggccagatatctccatcaacaaagacaggctcgtatcctcttcaagttagacatttctaaggcttttgattcggtgtcatggccgtttctcattgaggttttgaggaaaatggggtttgggcagatttggtgtgatgttgtgtgtggactgttggcttcttcctccacaagaattttgctaaatggcgttcctggggagatcatttcacaccagaggggccttaggcaaggagacccactatcccctttgttgttcattttggttatggatgttctgaacttgctcattcaaaaggcttccgatgaagggttacttcagcagctatcttctgggactttacatcacaggctttctctctacgcggatgacgcggtggtttttcttaggccggtggcttcagacatcagcttggtcctggagatccttcggctttttggggaagcctcggggctcaagaccaatgtcctgaaaagtagtgtgttccccattcgttgtaccgaagatgatttgatgcgggtccaagcttctctcccctgccccatttctgattttccgtgtcaatatcttggactgcccctgtccttgggaaagctttcaaaggcccagttacaggcattggtggacaaggcagctagtgttctcccaggttggaaggccgacctgatgacaaaggcgggtcgtgctgtttatgttcagtttgttctcacggcaaaaatgatttatgctgcgatggctttggacctccctatttggaccatcaaagctattgacaagataagaagaggtttcctttggaaaggaagaaaacaagccaatggtggtcactgtttagtggcgtggggcaaggtcactaggcctaaagttctgggcggccttgggatcactgatctttggcttttgagcgtggcgcttcgagctaggtggccttggctccagagaaccgatcactctaagccttggtcggttctccctgttcaggcatgtggtgcggtggaagccttgatcaatgttgcagttgtgtctcaattgggtgatggacaggatatcctcttttggaaggatcggtggctgaatggtagaagaatcagtgaggtggcacctgaggttcttgagcatgtacctaagtgtgttgtttccaaaaggctggtaaaagatgctttaacaaatctgaattgggtggctgatataaggggtgcgctttcagttagggcgcttgcacaggttttggatctctgtgacttgctggagggcttagttcttcaacctgggattcctgataagcattcttggaagttcagcgcgtcgggggattactcctctagttctgcctaccaggttcttctccttggagctgttgaatttaggccggctgaacggatttggaagacctgggcaccaaggaaatgcaaattttttatgtggctggttgtgcatgatagatgttggacagctgacaggttggcaaaaaggggaatggatcatcccgtctgctgtccgctttgtgaccaggcggatgaaactattaatcacttattggtcgagtgcagctttgcgaagcagttttggttccttttccttcggtctggggacttccaggtgctctgtccctctacaggggatggctgctttgactcttggtgggagaagagtgccgaggtggtgggcaagcctttgtcgggtggtttcaactcgctggtcatattggggccaattgactatcaagggagagcttttcagcaaactaatatgtatgcaacaccaccaaacaacagttttgacacagggaggaactcattcatgccattagctgctgaatcttcttatggaccatttccaggatcctactctgagcagcgggtgcagaggcctggtggatacggattccagcaacagacaagcagcgaccgattgaatgttgttggcccacggagcagctaccaagggggttcttctaatcaccatgctggtagtaatgccatggatgacccggcagcggttgcagcagaattgcagcgccgctgggttcccccacagccaccaggcgtcatcatgccagaggctgcggccgccatccgacaggccaggtcggttccgaggcagctgccaagcggcgatgggcgcctgggcgctgatgtcccgagacagcctgagcctgccattgccatggcgacaacagagcacgtgaacgttgcccctgaagcacctggcggggagttgccaagcgatggtggtggtgccatgactgctgatgccagcaacggtggtgggagtggagagcagcaggagcaggaagcctcttgagtgaagctttttggacgccctttgatttggttctttgagaggatctagcttgcacctgtacctgtgtgtgtagcatatgcatatgcatctgcataggtttgtgacataatgtgcctcgtgttcgaaactgcagctgtattgtagatatataaactgatcaactttacacgtgtgttacctgtgtgttctgtcataagtgtatcagctatgaggacgtatttgcttcggcccatgctaaaatattcgcaaagtttgggccaagcatgggctgaactgagcattctaatcagcaatggcccaattttgagccatgtgctttcagata

SEQ ID NO: 213348 - DNA, 3755 bp, Zea Mays
cggggatgttccagcgcgtcgtcgtcgtccgattctgtctccctcaggtcgagattcgagagttcccgtgttcgtccatccgcgctgtgaggttctccgatggccgagaagtcacccagctccgcgccgcagggtggttctggtgggaatgaatcattcgataatcttgtaattcaagctccacagcttatgagggaggattacatacagaatgctgtgaagtttctttcacatccgaaagtgaagggttctccagtatttcacaggcgttccttcctggaaaagaaaggccttacaagtgaagaaattgatgaggccttttgtagagttcctgaccctaagccaaatggaacagatgctgtagctgctggtaggcaacaagcaaacaatcccagtcaatctgttgtgctgcaaccttatacagaagttcaaccacaagcagctactgcctctgccactgctggaccaattgttccacatacaaaggcacagttgagctgggtaaacacactccttggtgcaggtctttttcttggtttaggggctagtgctgccataaccctaaagaaattggtcatccctagtctgaaatcttggactcgtagagtcgttgctgaaggagatgaaaatgcaaagagtgaacatacttccaaactttgtgaagaaattagggaagccataaaagtttctgcatcagccttttctgatattgctaaaataaaccaagaagtgcttgcttcaaaagatgaagataggaaggtactcatgaagttaacagaagcattcgagtcacaagaaaatgtgtttaaatcattgagtgagaccttaaatcgtatcagggagaatcagctttcggattgcaatttcagaaattttgggctgctcaattcagccctcattacccttttgccaaagcttgagggtgcagcccttgtgaaggacttccgtccgatcagcctcatacatagcttcgccaagctggtaacaaagatgatggcaaataggctggctggacacttgggtgcaatggtttcacccaatcagacggcttttatcaaaaaaaggttcattcttgacaacttcatattggtgcagcgtacggccagatatctccatcaacaaagacaggctcgtatcctcttcaagttagacatttctaaggcttttgattcggtgtcatggccgtttctcattgaggttttgaggaaaatggggtttgggcagatttggtgtgatgttgtgtgtggactgttggcttcttcctccacaagaattttgctaaatggcgttcctggggagatcatttcacaccagaggggccttaggcaaggagacccactatcccctttgttgttcattttggttatggatgttctgaacttgctcattcaaaaggcttccgatgaagggttacttcagcagctatcttctgggactttacatcacaggctttctctctacgcggatgacgcggtggtttttcttaggccggtggcttcagacatcagcttggtcctggagatccttcggctttttggggaagcctcggggctcaagaccaatgtcctgaaaagtagtgtgttccccattcgttgtaccgaagatgatttgatgcgggtccaagcttctctcccctgccccatttctgattttccgtgtcaatatcttggactgcccctgtccttgggaaagctttcaaaggcccagttacaggcattggtggacaaggcagctagtgttctcccaggttggaaggccgacctgatgacaaaggcgggtcgtgctgtttatgttcagtttgttctcacggcaaaaatgatttatgctgcgatggctttggacctccctatttggaccatcaaagctattgacaagataagaagaggtttcctttggaaaggaagaaaacaagccaatggtggtcactgtttagtggcgtggggcaaggtcactaggcctaaagttctgggcggccttgggatcactgatctttggcttttgagcgtggcgcttcgagctaggtggccttggctccagagaaccgatcactctaagccttggtcggttctccctgttcaggcatgtggtgcggtggaagccttgatcaatgttgcagttgtgtctcaattgggtgatggacaggatatcctcttttggaaggatcggtggctgaatggtagaagaatcagtgaggtggcacctgaggttcttgagcatgtacctaagtgtgttgtttccaaaaggctggtaaaagatgctttaacaaatctgaattgggtggctgatataaggggtgcgctttcagttagggcgcttgcacaggttttggatctctgtgacttgctggagggcttagttcttcaacctgggattcctgataagcattcttggaagttcagcgcgtcgggggattactcctctagttctgcctaccaggttcttctccttggagctgttgaatttaggccggctgaacggatttggaagacctgggcaccaaggaaatgcaaattttttatgtggctggttgtgcatgatagatgttggacagctgacaggttggcaaaaaggggaatggatcatcccgtctgctgtccgctttgtgaccaggcggatgaaactattaatcacttattggtcgagtgcagctttgcgaagcagttttggttccttttccttcggtctggggacttccaggtgctctgtccctctacaggggatggctgctttgactcttggtgggagaagagtgccgaggtggtgggcaagcctttgtcgggtggtttcaactcgctggtcatattgggtgcgtggtcgatctggaaacacaggaatagggccaattgactatcaagggagagcttttcagcaaactaatatgtatgcaacaccaccaaacaacagttttgacacagggaggaactcattcatgccattagctgctgaatcttcttatggaccatttccaggatcctactctgagcgggtgcagaggcctggtggatacggattccagcaacagacaagcagcgaccgattgaatgttgttggcccacggagcagctaccaagggggttcttctaatcaccatgctggtagtaatgccatggatgacccggcagcggttgcagcagaattgcagcgccgctgggttcccccacagccaccaggcgtcatcatgccagaggctgcggccgccatccgacaggccaggtcggttccgaggcagctgccaagcggcgatgggcgcctgggcgctgatgtcccgagacagcctgagcctgccattgccatggcgacaacagagcacgtgaacgttgcccctgaagcacctggcggggagttgccaagcgatggtggtggtgccatgactgctgatgccagcaacggtggtgggagtggagagcagcaggagcaggaagcctcttgagtgaagctttttggacgccctttgatttggttctttgagaggatctagcttgcacctgtacctgtgtgtgtagcatatgcatatgcatctgcataggtttgtgacataatgtgcctcgtgttcgaaactgcagctgtattgtagatatataaactgatcaactttacacgtgtgttacctgtgtgttctgtcataagtgtatcagctatgaggacgtatttgcttcggcccatgctaaaatattcgcaaagtttgggccaagcatgggctgaactgagcattctaatcagcaatggcccaattttgagccatgtgctttcagata

SEQ ID NO: 213349 - DNA, 1018 bp, Zea Mays
atatggatgcatgctgaggtcctgagttcgaattcccgtggaaatgaatttcaagctgagattaaaaaaatccctttgaccgactctgcgacaaagcacggcttaaggctcggcccacgctcacatgggcaacttggccgccatgaaagggtggaggaaagaagatttagaggttttcttgatctgcatgagattttccctatcaggttcagatcgctcaggcatatgagaaaaacggagcagcatgccttagtgttcttacagatgaaaagtactttcagggaagtttttacaacttggaggctatacgcaatgctggagtccaggttcatgacgaaagagaaatggaccgtgttttagggattgatggtgtacagctcatcggcatcaataaccgtaatctcgagacatttgaagttgatattacaaacacaaaaaagcttctggaaggtgaacgaggacaggttatagctcaaaaggatgtaattgttgtaggagaatctgcgctgttcactcctgatgatatctcgttcgttcaaaacgctggggtcaaagcggttctcgtcggggaatccctcatcaagcaggaggatccagggaaagcaatcgctgggcttttcggcaaagatatctcgcatgctggtgctacctagagacgacgcagaagagcaacagaataccagaaacgctactccgggttgcatcattttgtgtaggggagaaaatcgagcgttgcaatcagaaatccaccctttcgcagagttttgatcggtcgttttgtttacctgacctgccaacttccccatgctgctatttttttgtgaccgagccatctcaataattacagattttagtgcacaagatgtatatgttcaaaaagttggatgtagtttcaagcagcttgatttttgcctatctaggcttcatctgcactattttttctaatataaaactagtaagaaaaaatcgttttatctctttcaactattataaaagtcagattttccaattataaaac

SEQ ID NO: 213350 - DNA, 1169 bp, Zea Mays
cgccgctactgctagcgctagacaggtggttcagagacgccgtctcggtaaagcagcgggaagactcgcacgcgtacaactcccaacggctaacgtccaccccaatccaattagccagcccacctctgctctgcgggcgcttcagatggaagcactagccattggatccgcgcctcgccgtccgggcgcaaggttcagatcgctcaggcatatgagaaaaacggagcagcatgccttagtgttcttacagatgaaaagtactttcagggaagtttttacaacttggaggctatacgcaatgctggagtccagtgccctcttctgtgcaaagagttcattattgatgcttggcaactttactatgcacggtccaagggtgcagatgctgttcttctaatagctgctgtattacctgaccgcgatatcaaatacatgttgaaaatttgcaaaatacttgggatggctgctttagttgaggttcatgacgaaagagaaatggaccgtgttttagggattgatggtgtacagctcatcggcatcaataaccgtaatctcgagacatttgaagttgatattacaaacacaaaaaagcttctggaaggtgaacgaggacaggttatagctcaaaaggatgtaattgttgtaggagaatctgcgctgttcactcctgatgatatctcgttcgttcaaaacgctggggtcaaagcggttctcgtcggggaatccctcatcaagcaggaggatccagggaaagcaatcgctgggcttttcggcaaagatatctcgcatgctggtgctacctagagacgacgcagaagagcaacagaataccagaaacgctactccgggttgcatcattttgtgtaggggagaaaatcgagcgttgcaatcagaaatccaccctttcgcagagttttgatcggtcgttttgtttacctgacctgccaacttccccatgctgctatttttttgtgaccgagccatctcaataattacagattttagtgcacaagatgtatatgttcaaaaagttggatgtagtttcaagcagcttgatttttgcctatctaggcttcatctgcactattttttctaatataaaactagtaagaaaaaatcgttttatctctttcaactattataaaagtcagattttccaattataaaac

SEQ ID NO: 213351 - DNA, 2376 bp, Zea Mays
gctccgggctccgcggcctccgcctcgtttttaccgcataaagattcgaaagccctcctctctcgctttcgtctccacgcctagggtttctctgcctcgccggggaagcgatgcagccgctgcaccaaccgccgatgaacgggcaacacggcccgcctcctccgcagggatccggggttcccacggcttcgcagcagcaggcgccaccgccgtcgtactaccagcagcagcagcagcagcagcaggggccaccgcctcagtactaccagcagggtcccccacagccgtgggcgcagcagcaacagtacgctccaccgccgccgcagtacccgcctcagatgcagcagtacgctccaccaccgcagcagtacgcccctccgccgcagcagcagtacgccgctccgccgcagcagcagtacgccgctccgccgccgcagtacgcgcctccgccgccgcagtacgcgcctccgccgcagcagtacgcgcagccgccgcagtacgcgcagccaccgcagtatgggacaacgccgggaagcggtgaggtcaggaccctgtggattggagatcttcagtactggatggacgagaactatctccactacaacgccttcgcgcctgtggcccagcagattgcctctgtgaaaattatacggaacaagcagactgggcactcagaaggttatggttttattgagttttactctcaagccgctgcagaacatactctgatgaacttcaatgggcagatgatgccgaatattgagatggcttttaagctgaattgggcttctgctagcactggggataagcgtggagataatggttctgaccatgcaatatttgttggtgatttggcccctgatgttacggactccatgttggaagatgtgttcagagctaactatccttcagttagaggagctaaagttgttgttgataggatcactggacggcctaaaggatatgggttcgtgcattttggagatctgaatgagcaggcacgtgctatgaccgagatgaatggaatgatgttatctacaaggaaaatgaggattggggctgcagctagcaagaagaatacagatgctcagcagacatatgcaactaatggatgccatgccatctgcatttagggcctggaaatgtcttcagatgtctcctgtaacctgtgactcggttaggtgcataccagagttctcaaggcaattgttcagagaatgatcccaacaatacaacagtctttgtgggtgggttagattccaatgtagacgaggagtatctaaggcaaatttttactccgtacggagaaatttcctatgtgaagattcctgtaggcaagcattgtggatttgttcaatttaccagcaggtcatgtgctgaggaagccatccaaatgctgaatgggagtcagattggtggacagaaagctcggctttcatggggccgtagtactcaaaacagacaggcttctcagcatgatgccaacagccagtataatgggaacaactattatcgataccaacagccgggtaatgaaggttatagctatggtgcacccaatgcacaagacccaagcattcaaaactactatggataccctggttatggtaactatgagcagcagtcaacacaggaacagcagcagcagcagcctccaccagcacaggagcagcctccaccggcaccacagtaacaatcatcgtggtgacgattgcttgggcacttctggaatgctatcagattagagggactacagtcagagcagtgccgtgccgaatgagacgtcctgaagatatggagggcatatagtcgcatgggtgttcttgggccggtgttaatctacgatgacactcctgatgtctcttttgtttgtcattgagatcttgacggctgaagtatgcaccgttgaaattgatgtattcgtcgtcgtcggattgtttatttgctcggaaccattttttgcactttacatctgggacgccaaccacgactcattccgcacctaccgttggcccaccagcccgtagtagatgtacgtaggggtggtggcaatggatcaagatctaaatggttcttcataaaatggttggactataaataaattttagttaaaaataaatagaaatatagcttgattttaatttgatcgtatccttaaattttatagtgtaaaatttagagcttattgtcagttatagctgtatctggttcggttcctttgaaactgtggcatggaatagtttctagcaagattttttgaaactgtgacatggaatggtttctagccagattgtttgtgtattttttgtaagccttgatcagttagaactattcctgagtggaattcaggacaaacgactgctaaggatgttgaac

SEQ ID NO: 213352 - DNA, 2062 bp, Zea Mays
ccgcctcgtttttaccgcataaagattcgaaagccctcctctctcgctttcgtctccacgcctagggtttctctgcctcgccggggaagcgatgcagccgctgcaccaaccgccgatgaacgggcaacacggcccgcctcctccgcagggatccggggttcccacggcttcgcagcagcaggcgccaccgccgtcgtactaccagcagcagcagcagcagcagcaggggccaccgcctcagtactaccagcagggtcccccacagccgtgggcgcagcagcaacagtacgctccaccgccgccgcagtacccgcctcagatgcagcagtacgctccaccaccgcagtacgcgcctccgccgcagcagtacgcgcagccgccgcagtacgcgcagccaccgcagtatgggacaacgccgggaagcggtgaggtcaggaccctgtggattggagatcttcagtactggatggacgagaactatctccactacaacgccttcgcgcctgtggcccagcagattgcctctgtgaaaattatacggaacaagcagactgggcactcagaaggttatggttttattgagttttactctcaagccgctgcagaacatactctgatgaacttcaatgggcagatgatgccgaatattgagatggcttttaagctgaattgggcttctgctagcactggggataagcgtggagataatggttctgaccatgcaatatttgttggtgatttggcccctgatgttacggactccatgttggaagatgtgttcagagctaactatccttcagttagaggagctaaagttgttgttgataggatcactggacggcctaaaggatatgggttcgtgcattttggagatctgaatgagcaggcacgtgctatgaccgagatgaatggaatgatgttatctacaaggaaaatgaggattggggctgcagctagcaagaagaatacagatgctcagcagacatatgcaactaatggtgcataccagagttctcaaggcaattgttcagagaatgatcccaacaatacaacagtcatgtgctgaggaagccatccaaatgctgaatgggagtcagattggtggacagaaagctcggctttcatggggccgtagtactcaaaacagacaggcttctcagcatgatgccaacagccagtataatgggaacaactattatcgataccaacagccgggtaatgaaggttatagctatggtgcacccaatgcacaagacccaagcattcaaaactactatggataccctggttatggtaactatgagcagcagtcaacacaggaacagcagcagcagcagcctccaccagcacaggagcagcctccaccggcaccacagtaacaatcatcgtggtgacgattgcttgggcacttctggaatgctatcagattagagggactacagtcagagcagtgccgtgccgaatgagacgtcctgaagatatggagggcatatagtcgcatgggtgttcttgggccggtgttaatctacgatgacactcctgatgtctcttttgtttgtcattgagatcttgacggctgaagtatgcaccgttgaaattgatgtattcgtcgtcgtcggattgtttatttgctcggaaccattttttgcactttacatctgggacgccaaccacgactcattccgcacctaccgttggcccaccagcccgtagtagatgtacgtaggggtggtggcaatggatcaagatctaaatggttcttcataaaatggttggactataaataaattttagttaaaaataaatagaaatatagcttgattttaatttgatcgtatccttaaattttatagtgtaaaatttagagcttattgtcagttatagctgtatctggttcggttcctttgaaactgtggcatggaatagtttctagcaagattttttgaaactgtgacatggaatggtttctagccagattgtttgtgtattttttgtaagccttgatcagttagaactattcctgagtggaattcaggacaaacgactgctaaggatgttgaac

SEQ ID NO: 213353 - DNA, 1770 bp, Zea Mays
aacttataccaaggtttcgtaagattgcctctgtgaaaattatacggaacaagcagactgggcactcagaaggttatggttttattgagttttactctcaagccgctgcagaacatactctgatgaacttcaatgggcagatgatgccgaatattgagatggcttttaagctgaattgggcttctgctagcactggggataagcgtggagataatggttctgaccatgcaatatttgttggtgatttggcccctgatgttacggactccatgttggaagatgtgttcagagctaactatccttcagttagaggagctaaagttgttgttgataggatcactggacggcctaaaggatatgggttcgtgcattttggagatctgaatgagcaggcacgtgctatgaccgagatgaatggaatgatgttatctacaaggaaaatgaggattggggctgcagctagcaagaagaatacagatgctcagcagacatatgcaactaatggatgccatgccatctgcatttagggcctggaaatgtcttcagatgtctcctgtaacctgtgactcggttaggtgcataccagagttctcaaggcaattgttcagagaatgatcccaacaatacaacagtctttgtgggtgggttagattccaatgtagacgaggagtatctaaggcaaatttttactccgtacggagaaatttcctatgtgaagattcctgtaggcaagcattgtggatttgttcaatttaccagcaggtcatgtgctgaggaagccatccaaatgctgaatgggagtcagattggtggacagaaagctcggctttcatggggccgtagtactcaaaacagacaggcttctcagcatgatgccaacagccagtataatgggaacaactattatcgataccaacagccgggtaatgaaggttatagctatggtgcacccaatgcacaagacccaagcattcaaaactactatggataccctggttatggtaactatgagcagcagtcaacacaggaacagcagcagcagcagcctccaccagcacaggagcagcctccaccggcaccacagtaacaatcatcgtggtgacgattgcttgggcacttctggaatgctatcagattagagggactacagtcagagcagtgccgtgccgaatgagacgtcctgaagatatggagggcatatagtcgcatgggtgttcttgggccggtgttaatctacgatgacactcctgatgtctcttttgtttgtcattgagatcttgacggctgaagtatgcaccgttgaaattgatgtattcgtcgtcgtcggattgtttatttgctcggaaccattttttgcactttacatctgggacgccaaccacgactcattccgcacctaccgttggcccaccagcccgtagtagatgtacgtaggggtggtggcaatggatcaagatctaaatggttcttcataaaatggttggactataaataaattttagttaaaaataaatagaaatatagcttgattttaatttgatcgtatccttaaattttatagtgtaaaatttagagcttattgtcagttatagctgtatctggttcggttcctttgaaactgtggcatggaatagtttctagcaagattttttgaaactgtgacatggaatggtttctagccagattgtttgtgtattttttgtaagccttgatcagttagaactattcctgagtggaattcaggacaaacgactgctaaggatgttgaac

SEQ ID NO: 213354 - DNA, 1629 bp, Zea Mays
aaggtttcgtaagattgcctctgtgaaaattatacggaacaagcagactgggcactcagaaggttatggttttattgagttttactctcaagccgctgcagaacatactctgatgaacttcaatgggcagatgatgccgaatattgagatggcttttaagctgaattgggcttctgctagcactggggataagcgtggagataatggttctgaccatgcaatatttgttggtgatttggcccctgatgttacggactccatgttggaagatgtgttcagagctaactatccttcagttagaggagctaaagttgttgttgataggatcactggacggcctaaaggatatgggttcgtgcattttggagatctgaatgagcaggcacgtgctatgaccgagatgaatggaatgatgttatctacaaggaaaatgaggattggggctgcagctagcaagaagaatacagatgctcagcagacatatgcaactaatggatgccatgccatctgcatttagggcctggaaatgtcttcagatgtctcctgtaacctgtgactcggttaggtgcataccagagttctcaaggcaattgttcagagaatgatcccaacaatacaacagtcatgtgctgaggaagccatccaaatgctgaatgggagtcagattggtggacagaaagctcggctttcatggggccgtagtactcaaaacagacaggcttctcagcatgatgccaacagccagtataatgggaacaactattatcgataccaacagccgggtaatgaaggttatagctatggtgcacccaatgcacaagacccaagcattcaaaactactatggataccctggttatggtaactatgagcagcagtcaacacaggaacagcagcagcagcagcctccaccagcacaggagcagcctccaccggcaccacagtaacaatcatcgtggtgacgattgcttgggcacttctggaatgctatcagattagagggactacagtcagagcagtgccgtgccgaatgagacgtcctgaagatatggagggcatatagtcgcatgggtgttcttgggccggtgttaatctacgatgacactcctgatgtctcttttgtttgtcattgagatcttgacggctgaagtatgcaccgttgaaattgatgtattcgtcgtcgtcggattgtttatttgctcggaaccattttttgcactttacatctgggacgccaaccacgactcattccgcacctaccgttggcccaccagcccgtagtagatgtacgtaggggtggtggcaatggatcaagatctaaatggttcttcataaaatggttggactataaataaattttagttaaaaataaatagaaatatagcttgattttaatttgatcgtatccttaaattttatagtgtaaaatttagagcttattgtcagttatagctgtatctggttcggttcctttgaaactgtggcatggaatagtttctagcaagattttttgaaactgtgacatggaatggtttctagccagattgtttgtgtattttttgtaagccttgatcagttagaactattcctgagtggaattcaggacaaacgactgctaaggatgttgaac

SEQ ID NO: 213355 - DNA, 2343 bp, Zea Mays
acagtgccgcagtatcccaagtcccaacaaggtcaagtcgcgtggattcgccactagcgggtattgattaccttgccgccccttgaccaaaccaaataacacaagtccccattgcttgcaccctacagctcctcacacccaaggtatggaggaggcaccaacgagggagccgaagaggctgcgccaggacgccgcggttacttccgccgcggcggcggctgaggagcctcagtacgtgtacctgcctatcgccgacgccatgaaggttcccggcgtccgggtttgcctcttcgccgttgtctccgagatcggcatcaccgaccgcagccgtggcacggatttcactcttaggttgaggattgtggatcaatcatgcatggatggaatctctgtaacagtttttgctgacaaaactactctattgccttgtgtcaagtcaagtggagatgtgatcagtctccataacgtcatgataacgatgcatggggagttctttgtttcatttaacaaagaagtttcttcatttgcgctatttgaaagcaaagtagctgagtgcagcccatatcagacttctgtgaaatatcatggcagcaaacatgacaaagaacttttaacccagatgagaacgtggcttgcatataatcctctaggtctgaaagattttgaattgcagttaagaagtttaaaatctgattctacttttgatctagtatgcaaggttgttcatgtccatgaagataacgacaaattgatattttatgtttgggatggaactgatacccctgctgttgagtttcaggcaactttggatccaaaggcagttgaatcaccccctctatttgaagggccacctctacccagggaggttttgtgcacaatgccaattatcggaactgttttgaggattttttcagatatgcctatcaaggaagtatcccacatgcaaaatagggtttattgggccagattctgtaacattacttgcaaggaagagtttggcatttggaaaggcattttgctggcctctagtaaagttcggcttttatctcatgaagatggtagcgttgttgatcgtcgaaagatgtatgccattcgtaaggccaaccaagttctctgccagccgatggcaagctttccctctaatgttactgatgtagaatatgaggaagaatggcactcaacgttaatgcagtctttaactcataaagaggtgacacacaaactcaaaaccttggcccgtgttgtgggagcgtatccatgtcaagctagtggtctccgtttgctgtcaactggtaacattcatctgcggttgactcttgaggatcctacagcgagaattcatgcgtacgtccataagaattatctggttcagatcgctcaggcatatgagaaaaacggagcagcatgccttagtgttcttacagatgaaaagtactttcagggaagtttttacaacttggaggctatacgcaatgctggagtccagtgccctcttctgtgcaaagagttcattattgatgcttggcaactttactatgcacggtccaagggtgcagatgctgttcttctaatagctgctgtattacctgaccgcgatatcaaatacatgttgaaaatttgcaaaatacttgggatggctgctttagttgaggttcatgacgaaagagaaatggaccgtgttttagggattgatggtgtacagctcatcggcatcaataaccgtaatctcgagacatttgaagttgatattacaaacacaaaaaagcttctggaaggtgaacgaggacaggttatagctcaaaaggatgtaattgttgtaggagaatctgcgctgttcactcctgatgatatctcgttcgttcaaaacgctggggtcaaagcggttctcgtcggggaatccctcatcaagcaggaggatccagggaaagcaatcgctgggcttttcggcaaagatatctcgcatgctggtgctacctagagacgacgcagaagagcaacagaataccagaaacgctactccgggttgcatcattttgtgtaggggagaaaatcgagcgttgcaatcagaaatccaccctttcgcagagttttgatcggtcgttttgtttacctgacctgccaacttccccatgctgctatttttttgtgaccgagccatctcaataattacagattttagtgcacaagatgtatatgttcaaaaagttggatgtagtttcaagcagcttgatttttgcctatctaggcttcatctgcactattttttctaatataaaactagtaagaaaaaatcgttttatctctttcaactattataaaagtcagattttccaattataaaac

SEQ ID NO: 213356 - DNA, 1680 bp, Zea Mays
tagagttgacggtttctgtttagctatttcactcttaggttgaggattgtggatcaatcatgcatggatggaatctctgtaacagtttttgctgacaaaactactctattgccttgtgtcaagtcaagtggagatgtgatcagtctccataacgtcatgataacgatgcatggggagttctttgtttcatttaacaaagaagtttcttcatttgcgctatttgaaagcaaagtagctgagtgcagcccatatcagacttctgtgaaatatcatggcagcaaacatgacaaagaacttttaacccagatgagaacgtggcttgcatataatcctctaggtctgaaagattttgaattgcagttaagaagtttaaaatctgattctacttttgatctagtatgcaaggttgttcatgtccatgaagataacgacaaattgatattttatgtttgggatggaactgatacccctgctgttgagtttcaggcaactttggatccaaaggcagttgaatcaccccctctatttgaagggccacctctacccagggaggttttgtgcacaatgccaattatcggaactgttttgaggattttttcagatatgcctatcaaggaagtatcccacatgcaaaatagggtttattgggccagattctgtaacattacttgcaaggaagagtttggcatttggaaaggcattttgctggcctctagtaaagttcggcttttatctcatgaagatggtagcgttgttgatcgtcgaaagatgtatgccattcgtaaggccaaccaagttctctgccagccgatggcaagctttccctctaatgttactgttctatcagatgtagaatatgaggaagaatggcactcaacgttaatgcagtctttaactcataaagaggtgacacacaaactcaaaaccttggcccgtgttgtgggagcgtatccatgtcaagctagtggtctccgtttgctgtcaactggtaacattcatctgcggttgactcttgaggatcctacagcgagaattcatgcgtacgtccataagaattatctggtccaattcttcggtggttttctgacagaagaagcgataacaaagaagatgaacaagctacttggtatcccagaaccagaggacagcgaggaaggtgcccccttgactaggaatccaccttggatatggtgctgcttgacatcattctatatggacaaaaacaatccctgggacagcagaaagtaccgaatctttgccacagagatgagggattgaggagggatgctgctcgaatatgcaggaacggccttgcaaatgaaccgaactgattctatgtagtatttctgtgtgctctcgttggcattttgcttggaggggcatcttgctgggatgcagcgagacacgctttagttgtagcctgcgtactgtcagtattattccctagatgcaatgttgttgcagtgctgctgctgaccttctgctccatccagaacactggtagcagtctgtatgcgcgcccacgctacagaactctagattatcttgtgaaatgttagtgcacacagcaccaacttttggcttggaagttggaacgtggcaagaaccccttttcttgttcggcgccttgcagttctctcggtttccacgaaatgggtatatgttccttgtgaattttcg

SEQ ID NO: 213357 - DNA, 1984 bp, Zea Mays
acagtgccgcagtatcccaagtcccaacaaggtcaagtcgcgtggattcgccactagcgggtattgattaccttgccgccccttgaccaaaccaaataacacaagtccccattgcttgcaccctacagctcctcacacccaaggtatggaggaggcaccaacgagggagccgaagaggctgcgccaggacgccgcggttacttccgccgcggcggcggctgaggagcctcagtacgtgtacctgcctatcgccgacgccatgaaggttcccggcgtccgggtttgcctcttcgccgttgtctccgagatcggcatcaccgaccgcagccgtggcacggatttcactcttaggttgaggattgtggatcaatcatgcatggatggaatctctgtaacagtttttgctgacaaaactactctattgccttgtgtcaagtcaagtggagatgtgatcagtctccataacgtcatgataacgatgcatggggagttctttgtttcatttaacaaagaagtttcttcatttgcgctatttgaaagcaaagtagctgagtgcagcccatatcagacttctgtgaaatatcatggcagcaaacatgacaaagaacttttaacccagatgagaacgtggcttgcatataatcctctaggtctgaaagattttgaattgcagttaagaagtttaaaatctgattctacttttgatctagtatgcaaggttgttcatgtccatgaagataacgacaaattgatattttatgtttgggatggaactgatacccctgctgttgagtttcaggcaactttggatccaaaggcagttgaatcaccccctctatttgaagggccacctctacccagggaggttttgtgcacaatgccaattatcggaactgttttgaggattttttcagatatgcctatcaaggaagtatcccacatgcaaaatagggtttattgggccagattctgtaacattacttgcaaggaagagtttggcatttggaaaggcattttgctggcctctagtaaagttcggcttttatctcatgaagatggtagcgttgttgatcgtcgaaagatgtatgccattcgtaaggccaaccaagttctctgccagccgatggcaagctttccctctaatgttactgatgtagaatatgaggaagaatggcactcaacgttaatgcagtctttaactcataaagaggtgacacacaaactcaaaaccttggcccgtgttgtgggagcgtatccatgtcaagctagtggtctccgtttgctgtcaactggtaacattcatctgcggttgactcttgaggatcctacagcgagaattcatgcgtacgtccataagaattatctggtccaattcttcggtggttttctgacagaagaagcgataacaaagaagatgaacaagctacttggtatcccagaaccagaggacagcgaggaaggtgcccccttgactaggaatccaccttggatatggtgctgcttgacatcattctatatggacaaaaacaatccctgggacagcagaaagtaccgaatctttgccacagagatgagggattgaggagggatgctgctcgaatatgcaggaacggccttgcaaatgaaccgaactgattctatgtagtatttctgtgtgctctcgttggcattttgcttggaggggcatcttgctgggatgcagcgagacacgctttagttgtagcctgcgtactgtcagtattattccctagatgcaatgttgttgcagtgctgctgctgaccttctgctccatccagaacactggtagcagtctgtatgcgcgcccacgctacagaactctagattatcttgtgaaatgttagtgcacacagcaccaacttttggcttggaagttggaacgtggcaagaaccccttttcttgttcggcgccttgcagttctctcggtttccacgaaatgggtatatgttccttgtgaattttcg

SEQ ID NO: 213358 - DNA, 2274 bp, Zea Mays
acagtgccgcagtatcccaagtcccaacaaggtcaagtcgcgtggattcgccactagcgggtattgattaccttgccgccccttgaccaaaccaaataacacaagtccccattgcttgcaccctacagctcctcacacccaaggtatggaggaggcaccaacgagggagccgaagaggctgcgccaggacgccgcggttacttccgccgcggcggcggctgaggagcctcagtacgtgtacctgcctatcgccgacgccatgaaggttcccggcgtccgggtttgcctcttcgccgttgtctccgagatcggcatcaccgaccgcagccgtggcacggatttcactcttaggttgaggattgtggatcaatcatgcatggatggaatctctgtaacagtttttgctgacaaaactactctattgccttgtgtcaagtcaagtggagatgtgatcagtctccataacgtcatgataacgatgcatggggagttctttgtttcatttaacaaagaagtttcttcatttgcgctatttgaaagcaaagtagctgagtgcagcccatatcagacttctgtgaaatatcatggcagcaaacatgacaaagaacttttaacccagatgagaacgtggcttgcatataatcctctaggtctgaaagattttgaattgcagttaagaagtttaaaatctgattctacttttgatctagtatgcaaggttgttcatgtccatgaagataacgacaaattgatattttatgtttgggatggaactgatacccctgctgttgagtttcaggcaacgtaggattttctatgtttatttattgtttattttttcagcaataactaagaaaaccatctatgcaatataggatgatgctctagtgtttttgaaatattgttgcaagttttaactattatttggttgttcttatatggtgcactgaacattggcatgatcagtgaaaagaaaataaattttatcttagaaaaaacatttgttgatgtcagtcacgtcactattttcactttaacttacctgtttttttgtgcctctttgatattgattggtgaacatatagtttggatccaaaggcagttgaatcaccccctctatttgaagggccacctctacccagggaggttttgtgcacaatgccaattatcggaactgttttgaggattttttcagatatgcctatcaaggaagtatcccacatgcaaaatagggtttattgggccagattctgtaacattacttgcaaggaagagtttggcatttggaaaggcattttgctggcctctagtaaagttcggcttttatctcatgaagatggtagcgttgttgatcgtcgaaagatgtatgccattcgtaaggccaaccaagttctctgccagccgatggcaagctttccctctaatgttactgttctatcagatgtagaatatgaggaagaatggcactcaacgttaatgcagtctttaactcataaagaggtgacacacaaactcaaaaccttggcccgtgttgtgggagcgtatccatgtcaagctagtggtctccgtttgctgtcaactggtaacattcatctgcggttgactcttgaggatcctacagcgagaattcatgcgtacgtccataagaattatctggtccaattcttcggtggttttctgacagaagaagcgataacaaagaagatgaacaagctacttggtatcccagaaccagaggacagcgaggaaggtgcccccttgactaggaatccaccttggatatggtgctgcttgacatcattctatatggacaaaaacaatccctgggacagcagaaagtaccgaatctttgccacagagatgagggattgaggagggatgctgctcgaatatgcaggaacggccttgcaaatgaaccgaactgattctatgtagtatttctgtgtgctctcgttggcattttgcttggaggggcatcttgctgggatgcagcgagacacgctttagttgtagcctgcgtactgtcagtattattccctagatgcaatgttgttgcagtgctgctgctgaccttctgctccatccagaacactggtagcagtctgtatgcgcgcccacgctacagaactctagattatcttgtgaaatgttagtgcacacagcaccaacttttggcttggaagttggaacgtggcaagaaccccttttcttgttcggcgccttgcagttctctcggtttccacgaaatgggtatatgttccttgtgaattttcg

SEQ ID NO: 213359 - DNA, 2359 bp, Zea Mays
acagtgccgcagtatcccaagtcccaacaaggtcaagtcgcgtggattcgccactagcgggtattgattaccttgccgccccttgaccaaaccaaataacacaagtccccattgcttgcaccctacagctcctcacacccaaggtatggaggaggcaccaacgagggagccgaagaggctgcgccaggacgccgcggttacttccgccgcggcggcggctgaggagcctcagtacgtgtacctgcctatcgccgacgccatgaaggttcccggcgtccgggtttgcctcttcgccgttgtctccgagatcggcatcaccgaccgcagccgtggcacggatttcactcttaggttgaggattgtggatcaatcatgcatggatggaatctctgtaacagtttttgctgacaaaactactctattgccttgtgtcaagtcaagtggagatgtgatcagtctccataacgtcatgataacgatgcatggggagttctttgtttcatttaacaaagaagtttcttcatttgcgctatttgaaagcaaagtagctgagtgcagcccatatcagacttctgtgaaatatcatggcagcaaacatgacaaagaacttttaacccagatgagaacgtggcttgcatataatcctctaggtctgaaagattttgaattgcagttaagaagtttaaaatctgattctacttttgatctagtatgcaaggttgttcatgtccatgaagataacgacaaattgatattttatgtttgggatggaactgatacccctgctgttgagtttcaggcaactttggatccaaaggcagttgaatcaccccctctatttgaagggccacctctacccagggaggttttgtgcacaatgccaattatcggaactgttttgaggattttttcagatatgcctatcaaggaagtatcccacatgcaaaatagggtttattgggccagattctgtaacattacttgcaaggaagagtttggcatttggaaaggcattttgctggcctctagtaaagttcggcttttatctcatgaagatggtagcgttgttgatcgtcgaaagatgtatgccattcgtaaggccaaccaagttctctgccagccgatggcaagctttccctctaatgttactggtatagagcatagtccgatattttgcattgctcctgatgaaagtattctgttttatcgttcagatcatgaatttagcttctgattcagcatttaattgattaaaatagcaatatataagtttgttcatgtggccttatcttcattgttatctgaataagtgtataatatagcattttccctgttctatttgcatttgaatgttgtgcataaaaacgaacctcaattttttctctcatgtgatatgtatatatggagatctaagtgaagcacatgatggtcttgtcaaagtgcttgtttacatgcattatattgatgatgaagcgccgcataaagctgtaacacattttttgacaatctgttatcagttctatcagatgtagaatatgaggaagaatggcactcaacgttaatgcagtctttaactcataaagaggtgacacacaaactcaaaaccttggcccgtgttgtgggagcgtatccatgtcaagctagtggtctccgtttgctgtcaactggtaacattcatctgcggttgactcttgaggatcctacagcgagaattcatgcgtacgtccataagaattatctggtccaattcttcggtggttttctgacagaagaagcgataacaaagaagatgaacaagctacttggtatcccagaaccagaggacagcgaggaaggtgcccccttgactaggaatccaccttggatatggtgctgcttgacatcattctatatggacaaaaacaatccctgggacagcagaaagtaccgaatctttgccacagagatgagggattgaggagggatgctgctcgaatatgcaggaacggccttgcaaatgaaccgaactgattctatgtagtatttctgtgtgctctcgttggcattttgcttggaggggcatcttgctgggatgcagcgagacacgctttagttgtagcctgcgtactgtcagtattattccctagatgcaatgttgttgcagtgctgctgctgaccttctgctccatccagaacactggtagcagtctgtatgcgcgcccacgctacagaactctagattatcttgtgaaatgttagtgcacacagcaccaacttttggcttggaagttggaacgtggcaagaaccccttttcttgttcggcgccttgcagttctctcggtttccacgaaatgggtatatgttccttgtgaattttcg

SEQ ID NO: 213360 - DNA, 1091 bp, Zea Mays
gtcggaactcggaagtcgactccctttaaaccaaaccgatgttgtttggtgctgtgaatgacatcttctgcttgttccaagggcatattgagaacattgccaacctgaagcagcattatggcctgagcaagactgcaaatgaggtgactatcctcatagaggcctacaggaccctgagggacaggggccctgtcccagccagccaggttgtgagagaccttagtgggaagttcgcgttcatcctgtatgacaccctgtcgaagtctacctttgttgctgctgacgctgatggtagcatccctttcttctggggcgttgactacgaaaaccaccttgtgttctctgacgatgttgggatcctcaagacaggctgcggcaactcgtacgctccatttcctaaaggttgcttctacaccacctccggtgggctgcagagcttcgagcacccgttgcacgaggtcaaggcggtgccacgcgtggacagccaaggccagatgtgcggctccatcttcaaggtcgacagcgagagcaagaagaagcaggacgctagcatcccccgcgtcggcagtgctgccgactggtccaaccagttctgaccatcttcttgccatccattgtcccggctagtacgaggtgcagagctgtgtatctgatgaatccatgagacgatttctgctacgtttcttgcacgcttgtcgaacactgtgagactcacatcgcgctcatctacgctacgtgtaactgatactaatgatacggagtgttccaggtggtggtagatgtactgcagaatctatctcccatgtttcaataaacctgaataaggtgctcggtttggatctatgcatttatgattctagtacttctgaatcgaattttatcgcatcctttcctttttcttcttgttctcctgttctgcatttcagttctgtctggcggacggttacccgttaccgtggtagttgggcaactgggcatacggttgttaggaccagctcggtccgtgacaaccattgaacaatactgcatgggttctacttagctagggtgtattagactcgtcttattaattaaactattgttacggtttc

SEQ ID NO: 213361 - DNA, 1071 bp, Zea Mays
gatgtgatcacttactggaggttgtttggtgctgtgaatgacatcttctgcttgttccaagggcatattgagaacattgccaacctgaagcagcattatggcctgagcaagactgcaaatgaggtgactatcctcatagaggcctacaggaccctgagggacaggggccctgtcccagccagccaggttgtgagagaccttagtgggaagttcgcgttcatcctgtatgacaccctgtcgaagtctacctttgttgctgctgacgctgatggtagcatccctttcttctggggcgttgactacgaaaaccaccttgtgttctctgacgatgttgggatcctcaagacaggctgcggcaactcgtacgctccatttcctaaaggttgcttctacaccacctccggtgggctgcagagcttcgagcacccgttgcacgaggtcaaggcggtgccacgcgtggacagccaaggccagatgtgcggctccatcttcaaggtcgacagcgagagcaagaagaagcaggacgctagcatcccccgcgtcggcagtgctgccgactggtccaaccagttctgaccatcttcttgccatccattgtcccggctagtacgaggtgcagagctgtgtatctgatgaatccatgagacgatttctgctacgtttcttgcacgcttgtcgaacactgtgagactcacatcgcgctcatctacgctacgtgtaactgatactaatgatacggagtgttccaggtggtggtagatgtactgcagaatctatctcccatgtttcaataaacctgaataaggtgctcggtttggatctatgcatttatgattctagtacttctgaatcgaattttatcgcatcctttcctttttcttcttgttctcctgttctgcatttcagttctgtctggcggacggttacccgttaccgtggtagttgggcaactgggcatacggttgttaggaccagctcggtccgtgacaaccattgaacaatactgcatgggttctacttagctagggtgtattagactcgtcttattaattaaactattgttacggtttc

SEQ ID NO: 213362 - DNA, 3841 bp, Zea Mays
caacgaacgaacatattcctcccgtcgatcgctccagacactatcaccttccacctctcagcttcactctcaagcctctactccatcttcttgtgaagcttctcaagattctcgcgatcgcatgcctttacccttcctctctctctttctctctctggtcatcttactaaactacctccaatgccggtgccaatggcggcagctcagttcctctagctagtctcccaccgtaattagcaaacccggagaaaaaaagggaacattcgacgccaccccgtgatgaggccttcgccacctttgctcctgttcgtgctcctgcacttcgcgctcctgtccaccattgccgccgccgatgggaatgggaatgggaatgggaacggcgacctgcgcggcgacgcgatggcgctgctcgccctcaaggccgcgctcggctgccggccgggcgcgctgcggtcgtggtcggagggcaatgccgggtccgtgtgcgcgtggacgggcgtccggtgcgcggccggacgcgttgtcgccgtcgacatcgccaacatgaacgtgtccagcggcgcgcccgtctcggcacgggtgacggggctcagcgcgctcgagaccatctcgctcgccgggaacggcatcgtgggcgccgtcgccgcgtcgtcgctcccggcgctgcgccacgtcaacgtgtcggggaaccagctcggcggcggcctcgacggctgggacttcgcgtcgctgcccggcctcgaggtgctggacgcctacgacaacaacttctcggctccgctcccgctcggcgtcgccgcgctcccgaggctccgctacctggacctcggcggcaactacttcacgggcgagatcccggcggcgtacggcgcgatgcccgcggtggagtacctgtcccttaacggcaacaacctgcaaggccgcatcccaccggagctcggcaacctcaccaccctccgggagctctacctcggttactacaacgtgttcgacggcggcatccccccggcgcttggccggttgcgcagcctcaccgtgctggacgtctccaactgcggcctcacggggcgcgtccccgcggagcttggcgcgctcgcctccatcgagacgctcttcctccacaccaaccaactctccgcgcccatcccgccggagctcggcaacctcacgtcgctcaccgcgctggacctctccaacaatgcgctcaccggcgaggtccctcgctcgctggcgtccctcacctcgctcaagttgctcaacctgttcctgaaccggctccacggaccggtgcccgacttcatcgccgcgctgccgcgtctggagacggtgcagctgttcatgaacaacctcaccggccgcgtccccgcagggctcggcgccaacgccgcgctccggctcgtcgacctgtcctcgaaccgcctcaccggcgtcatcccggaggcgctgtgcgcgtccggcgatctccacacggtcatcctcatgaacaatttcctcttcgggcccatccccggctcgttcggctcgtgcacgagcctcacccgcgtccggctcggccagaactacctcaacggcagcatccccgccggcctgctgtacctgccgcggctgagcctgctggagctccacaacaacctgctctcaggcgccgtgccgtcgaacccgagcccgagcgcgtccagttcgcagctggcgcagctcaacctgtccaacaacctgctggcggggccgctgccgagcacgctggccaacctcaccgcgctgcagacgctgcttgcgagcaacaaccggatcggcggcgccgtgccgccggaggtcggggagctccggcggctcgtgaagctcgacctcagcggcaacgagctgtcggggccgattcccggggcggtcgggcagtgcggcgagctgacgtatctcgatctcagcaggaacaacctgtccggggcgatcccagaggcgatcgcgggcgtccgggtgctgaattacctcaacctgtcgcggaacgcgctggaggacgcgatcccgacggcgatcggggccatgagcagcctgacggcggcggacttctcgtacaacgacctgtcagggcagctcccggacacggggcagctggggtacatgaacgcgacggcgttcgcgggcaacccgaggctgtgcggctctgtggtgagccggccgtgcaactacacgggaggaggcggagtcgcgggcgcggcgacgacgcggctcggcgggctgaagctggtgcttgcgctgggactgctcgcctgctcggttgtgttcgccgtggcggccgtgctccgggcgcggtcgttccgcgtggacgtcggcgcgggcaggtggcggttgacggcgttccacaaggtggactttggcgtggcggaggtgatcgagtgcatgaaggacggcaacgtggtgggccgcggcggcgccggggtggtgtacgcggggcgcacccggtcgggcggcgcgatcgcggtgaagcggctgcaggcccagggcggcgccggcgcgcagcagggcgacgaccgcgggttccgcgcggaggtccggacgctcggcagcatccggcaccggaacatcgtgcgcctgctggccttctgcacgaaccgggaggcgaacgtgctggtgtacgagtacatgggcggcggcagcctcggggtggtgctgcacggcaagggcggcgcgttcctggcgtgggagcggcggtaccggatcgcgctggaggcggcgcgcgggctgtgctacctccaccacgactgcacgcccatgatcgtgcaccgggacgtcaagtccaacaacatcctcctcggcgacaacctggaggcccgcgtcgcggacttcggcctcgccaagttcctccggtgcggcgccacctccgagtccatgtccgccgtcgctggatcctacggctacatcgcccctgagtacgcgtacacgctgcgggtggacgagaagagcgacgtgtacagctacggcgtggtcctgctggagctcatcacgggccgccgccccgtgggggacttcggggaaggtgtggacatcgtgcagtgggcgaagcgggccacggccggccgccgggaggccgtgccggggatcgtggaccgccggctcgtcggcggcgcgccggccgacgaggtggcgcacctattcttcgtctccatgctctgcgtgcaggacaatagcgtggagcgccccaccatgcgcgaggtggtgcagatgctcgccgagctcccgcgccacgagtcgtcgccgtccacctcctcctcctcctcgtcgtcgtcggcggtggaaccgccaccaccgcaggccggcgaggagagcagccccgacgacgggaaggagccgccggccaactgctacaagctgttcccggacctgctggcctgataaactgaagcgcagacgacggaacctattttgctgccattgttacaagacacaaggctactactcaatcgtcgtgcagggctaaagttacagcatgtagtgcagaatggagctagacgttcaacaggttggtcggccgacattggaaatggtgacaagatagagctgggaatcaataacatgtaacttttttttgtctttcttcttcttcttctatctcctctccgaattattttctttttgttcatctatcaattcaaagctgtatagggtctgatcatatgctaccgcctatctaggggattatgctgtccgagatgcagtagcatcccttccatcatcatagctttcgcacttttgtaatctcctgggaaagcatggaagataaatgagaaaaaaaagagagcgcgcgatactggacagtctttgaaaacatctcagttcccaacgctct

SEQ ID NO: 213363 - DNA, 2724 bp, Zea Mays
ccacctttcttctccctcgttcccgagtccgaatctgggtccagcggagacaaagaggagctggccgcgtcgtatcgactcctgccgccgaaaggccgagcccgagcccgtgtcccggtgcccgttcccgcaaccctaatcccctaccaccgtcggctctcgccggcgaagaagagggagccgcgcggcgtcgccagggagcacgcgccccctcccttcccggctccctccgcgccgtggggaggcgcgtccacccggatccgccctcaccgcgaggcagaggggaggagagggagccaggtccggcgcacccgctgtcgtccgcgccgaagagcgttaagagtctccccacaggcttggctgagggaaacttgtgctctgcgcatcttggacactacttcaccatttaccaagtcttgagttattgctccggtgccagacaaaaaaccaaactctctggccgaacacagtgatggcgcaagcctgtaagaagaggagaggagtttatataagcagtgaatcaggagactctgatacagattctgatgttgagggaagcaaacactctcaaaagtctggggtgacatcaatttctacatgcgagcaccagtcatcttataacctcaaggctgcaagtatgaaaagtagcaggatgataaggctgtgtggaaatatcgtaaggaagctcatcgatcacaaatgtggctggcttttcaaagaacctgttgatccagatctatatgggattccagactactttgatgttatccgcagtccaatggatttgggcactattaagaataaactcacaaaaaagaaatatgtaagcattgaggagtttgcagcagatgtgaggctaacattttcaaatgctatgaagtataatcctccaggcaatgatgtgcatatttttgctaaagaattgaatgaaatgtttgattcagaatgggaatcagtagaaaggaaatttagaggccgaaaccttggtcaagaccagcagacaatgaaggccataaaagttcgagctatgatggattcaaagtctacagttgctagagggccggttgcatgctcaaaccctaaaactttggttgctagaggtccagtagcttgctcaaattcgattgcaaagaagacactgacagatgcattatcctccaaagtaaaaatcaaattttccgtgcgcagctctgcgcatacctcttccaaagatatactcgttcaagcagctggtagcaaagaggggtccttaaatcactctgtccctactggcaacaaagaggcatcttcaaattgtactattcctatcgctaaggaggctaaaatatcaagggcacgagaaattgagcgctgctctggttcaattggtgaggaaagttaccttcatgatgaacctttgtcaccaagcagggctcttcgtgcagcaatgctcaggagtcgttttgctgggactatagtgaaggctcaacagaaggcacttctagatcatgggaagaatatagaccctgtgaaattgcaattggaaaaggagaggctggaaaagaggcagcaagaagagaaagcaaggatcgaggcccaggtgaaggctgctgaagcagctgcacaacaaaagtttgaggaagaaatgaggatgaagagaaagcaggaaagggaggcagcacgcctggcactacgcatgtgacttcctaaaggagctggagaacttcagcaaaacatggcaggcaaatccacctggcaaattaatcgtggattttatcagtggggacttgccaccggggttagggagtccgctggagaggctcggcctcttcatgaaggaagatttcgaggatgaggtagaacaggaaatggaggacagagtgtcaccctcaatggatgttgacatcaggaaagatttccaggaagacttaggacatgaaatgcaggacagtgcatcacccgtgactgtcattggcacaaagaatgacgtacagggagtggcaggacatgaaatggaggacagcggatcaccagccacagtcattgacacgaagaaagaagagacagaacatgagatggtggacagcgtatcacctttgatggatgttgacacggaggaaggggagatcagctgctgacggtagctacacctctcttcacccgcataatttattgaggcagacatccttgcttggttgttagattaggcaatttcataagcagagtgatgcagaaacattagttttatctgctttcatcgtagaaccatgtggtgtggagaacatgtctcagacgaaatgacgagtggttttggatttgctgcggattttaattttcgtggtcttgtcagtctggcaagagtatgatgactctgtatgttgaatttgacctcccccgctggatgacatgtataaaaggatgagaaaaaaaggatagtttggagctagtgtatgttgttggagtttatggtggagccagatttggtgagcgtgtcgtggacgtaaatgtaggtatagctatatacttgaaatattgataagagtgtttggttcaaaggatcaattcattccagttaaacatcatgagcttgttaatgggtgtttggttcgagagttcgttaatgggtgtttggtttgaagaataagctagtctactatttttttatttggttgttgaatgtaattttttgacctgtcatctcatttcttacaagtgaatgattatttctaagtctatgagaaataa

SEQ ID NO: 213364 - DNA, 2808 bp, Zea Mays
ctttcttctccctcgttcccgagtccgaatctgggtccagcggagacaaagaggagctggccgcgtcgtatcgactcctgccgccgaaaggccgagcccgagcccgtgtcccggtgcccgttcccgcaaccctaatcccctaccaccgtcggctctcgccggcgaagaagagggagccgcgcggcgtcgccagggagcacgcgccccctcccttcccggctccctccgcgccgtggggaggcgcgtccacccggatccgccctcaccgcgaggcagaggggaggagagggagccaggtccggcgcacccgctgtcgtccgcgccgaagagcgttaagagtctccccacaggcttggctgagggaaacttgtgctctgcgcatcttggacactacttcaccatttaccaagtcttgagttattgctccggtgccagacaaaaaaccaaactctctggccgaacacagtgatggcgcaagcctgtaagaagaggagaggagtttatataagcagtgaatcaggagactctgatacagattctgatgttgagggaagcaaacactctcaaaagtctggggtgacatcaatttctacatgcgagcaccagtcatcttataacctcaaggctgcaagtatgaaaagtagcaggatgataaggctgtgtggaaatatcgtaaggaagctcatcgatcacaaatgtggctggcttttcaaagaacctgttgatccagatctatatgggattccagactactttgatgttatccgcagtccaatggatttgggcactattaagaataaactcacaaaaaagaaatatgtaagcattgaggagtttgcagcagatgtgaggctaacattttcaaatgctatgaagtataatcctccaggcaatgatgtgcatatttttgctaaagaattgaatgaaatgtttgattcagaatgggaatcagtagaaaggaaatttagaggccgaaaccttggtcaagaccagcagacaatgaaggccataaaagttcgagctatgatggattcaaagtctacagttgctagagggccggttgcatgctcaaaccctaaaactttggttgctagaggtccagtagcttgctcaaattcgattgcaaagaagacactgacagatgcattatcctccaaagtaaaaatcaaattttccgtgcgcagctctgcgcatacctcttccaaagatatactcgttcaagcagctggtagcaaagaggggtccttaaatcactctgtccctactggcaacaaagaggcatcttcaaattgtactattcctatcgctaaggaggctaaaatatcaagggcacgagaaattgagcgctgctctggttcaattgaaaacaatcatggtcttgcaatgacacttctacttcacctctcgcttcctctgtgcaaggtgaggaaagttaccttcatgatgaacctttgtcaccaagcagggctcttcgtgcagcaatgctcaggagtcgttttgctgggactatagtgaaggctcaacagaaggcacttctagatcatgggaagaatatagaccctgtgaaattgcaattggaaaaggagaggctggaaaagaggcagcaagaagagaaagcaaggatcgaggcccaggtgaaggctgctgaagcagctgcacaacaaaagtttgaggaagaaatgaggatgaagagaaagcaggaaagggaggcagcacgcctggcactacgcatgatgaagaagactgttgatattgacaacagtgacttcctaaaggagctggagaacttcagcaaaacatggcaggcaaatccacctggcaaattaatcgtggattttatcagtggggacttgccaccggggttagggagtccgctggagaggctcggcctcttcatgaaggaagatttcgaggatgaggtagaacaggaaatggaggacagagtgtcaccctcaatggatgttgacatcaggaaagatttccaggaagacttaggacatgaaatgcaggacagtgcatcacccgtgactgtcattggcacaaagaatgacgtacagggagtggcaggacatgaaatggaggacagcggatcaccagccacagtcattgacacgaagaaagaagagacagaacatgagatggtggacagcgtatcacctttgatggatgttgacacggaggaaggggagatcagctgctgacggtagctacacctctcttcacccgcataatttattgaggcagacatccttgcttggttgttagattaggcaatttcataagcagagtgatgcagaaacattagttttatctgctttcatcgtagaaccatgtggtgtggagaacatgtctcagacgaaatgacgagtggttttggatttgctgcggattttaattttcgtggtcttgtcagtctggcaagagtatgatgactctgtatgttgaatttgacctcccccgctggatgacatgtataaaaggatgagaaaaaaaggatagtttggagctagtgtatgttgttggagtttatggtggagccagatttggtgagcgtgtcgtggacgtaaatgtaggtatagctatatacttgaaatattgataagagtgtttggttcaaaggatcaattcattccagttaaacatcatgagcttgttaatgggtgtttggttcgagagttcgttaatgggtgtttggtttgaagaataagctagtctactatttttttatttggttgttgaatgtaattttttgacctgtcatctcatttcttacaagtgaatgattatttctaagtctatgagaaataa

SEQ ID NO: 213365 - DNA, 2715 bp, Zea Mays
ctttcttctccctcgttcccgagtccgaatctgggtccagcggagacaaagaggagctggccgcgtcgtatcgactcctgccgccgaaaggccgagcccgagcccgtgtcccggtgcccgttcccgcaaccctaatcccctaccaccgtcggctctcgccggcgaagaagagggagccgcgcggcgtcgccagggagcacgcgccccctcccttcccggctccctccgcgccgtggggaggcgcgtccacccggatccgccctcaccgcgaggcagaggggaggagagggagccaggtccggcgcacccgctgtcgtccgcgccgaagagcgttaagagtctccccacaggcttggctgagggaaacttgtgctctgcgcatcttggacactacttcaccatttaccaagtcttgagttattgctccggtgccagacaaaaaaccaaactctctggccgaacacagtgatggcgcaagcctgtaagaagaggagaggagtttatataagcagtgaatcaggagactctgatacagattctgatgttgagggaagcaaacactctcaaaagtctggggtgacatcaatttctacatgcgagcaccagtcatcttataacctcaaggctgcaagtatgaaaagtagcaggatgataaggctgtgtggaaatatcgtaaggaagctcatcgatcacaaatgtggctggcttttcaaagaacctgttgatccagatctatatgggattccagactactttgatgttatccgcagtccaatggatttgggcactattaagaataaactcacaaaaaagaaatatgtaagcattgaggagtttgcagcagataatgggaatcagtagaaaggaaatttagaggccgaaaccttggtcaagaccagcagacaatgaaggccataaaagttcgagctatgatggattcaaagtctacagttgctagagggccggttgcatgctcaaaccctaaaactttggttgctagaggtccagtagcttgctcaaattcgattgcaaagaagacactgacagatgcattatcctccaaagtaaaaatcaaattttccgtgcgcagctctgcgcatacctcttccaaagatatactcgttcaagcagctggtagcaaagaggggtccttaaatcactctgtccctactggcaacaaagaggcatcttcaaattgtactattcctatcgctaaggaggctaaaatatcaagggcacgagaaattgagcgctgctctggttcaattggaaaacaatcatggtcttgcaatgacacttctacttcacctctcgcttcctctgtgcaaggtgaggaaagttaccttcatgatgaacctttgtcaccaagcagggctcttcgtgcagcaatgctcaggagtcgttttgctgggactatagtgaaggctcaacagaaggcacttctagatcatgggaagaatatagaccctgtgaaattgcaattggaaaaggagaggctggaaaagaggcagcaagaagagaaagcaaggatcgaggcccaggtgaaggctgctgaagcagctgcacaacaaaagtttgaggaagaaatgaggatgaagagaaagcaggaaagggaggcagcacgcctggcactacgcatgatgaagaagactgttgatattgacaacagtgacttcctaaaggagctggagaacttcagcaaaacatggcaggcaaatccacctggcaaattaatcgtggattttatcagtggggacttgccaccggggttagggagtccgctggagaggctcggcctcttcatgaaggaagatttcgaggatgaggtagaacaggaaatggaggacagagtgtcaccctcaatggatgttgacatcaggaaagatttccaggaagacttaggacatgaaatgcaggacagtgcatcacccgtgactgtcattggcacaaagaatgacgtacagggagtggcaggacatgaaatggaggacagcggatcaccagccacagtcattgacacgaagaaagaagagacagaacatgagatggtggacagcgtatcacctttgatggatgttgacacggaggaaggggagatcagctgctgacggtagctacacctctcttcacccgcataatttattgaggcagacatccttgcttggttgttagattaggcaatttcataagcagagtgatgcagaaacattagttttatctgctttcatcgtagaaccatgtggtgtggagaacatgtctcagacgaaatgacgagtggttttggatttgctgcggattttaattttcgtggtcttgtcagtctggcaagagtatgatgactctgtatgttgaatttgacctcccccgctggatgacatgtataaaaggatgagaaaaaaaggatagtttggagctagtgtatgttgttggagtttatggtggagccagatttggtgagcgtgtcgtggacgtaaatgtaggtatagctatatacttgaaatattgataagagtgtttggttcaaaggatcaattcattccagttaaacatcatgagcttgttaatgggtgtttggttcgagagttcgttaatgggtgtttggtttgaagaataagctagtctactatttttttatttggttgttgaatgtaattttttgacctgtcatctcatttcttacaagtgaatgattatttctaagtctatgagaaataa

SEQ ID NO: 213366 - DNA, 2749 bp, Zea Mays
ctttcttctccctcgttcccgagtccgaatctgggtccagcggagacaaagaggagctggccgcgtcgtatcgactcctgccgccgaaaggccgagcccgagcccgtgtcccggtgcccgttcccgcaaccctaatcccctaccaccgtcggctctcgccggcgaagaagagggagccgcgcggcgtcgccagggagcacgcgccccctcccttcccggctccctccgcgccgtggggaggcgcgtccacccggatccgccctcaccgcgaggcagaggggaggagagggagccaggtccggcgcacccgctgtcgtccgcgccgaagagcgttaagagtctccccacaggcttggctgagggaaacttgtgctctgcgcatcttggacactacttcaccatttaccaagtcttgagttattgctccggtgccagacaaaaaaccaaactctctggccgaacacagtgatggcgcaagcctgtaagaagaggagaggagtttatataagcagtgaatcaggagactctgatacagattctgatgttgagggaagcaaacactctcaaaagtctggggtgacatcaatttctacatgcgagcaccagtcatcttataacctcaaggctgcaagtatgaaaagtagcaggatgataaggctgtgtggaaatatcgtaaggaagctcatcgatcacaaatgtggctggcttttcaaagaacctgttgatccagatctatatgggattccagactactttgatgttatccgcagtccaatggatttgggcactattaagaataaactcacaaaaaagaaatatgtaagcattgaggagtttgcagcagatgtgaggctaacattttcaaatgctatgaagtataatcctccaggcaatgatgtgcatatttttgctaaagaattgaatgaaatgtttgattcagaatgggaatcagtagaaaggaaatttagaggccgaaaccttggtcaagaccagcagacaatgaaggccataaaagttcgagctatgatggattcaaagtctacagttgctagagggccggttgcatgctcaaaccctaaaactttggttgctagaggtccagtagcttgctcaaattcgattgcaaagaagacactgacagatgcattatcctccaaagtaaaaatcaaattttccgtgcgcagctctgcgcatacctcttccaaagatatactcgttcaagcagctggtagcaaagaggggtccttaaatcactctgtccctactggcaacaaagaggcatcttcaaattgtactattcctatcgctaaggaggctaaaatatcaagggcacgagaaattgagcgctgctctggttcaattggtgaggaaagttaccttcatgatgaacctttgtcaccaagcagggctcttcgtgcagcaatgctcaggagtcgttttgctgggactatagtgaaggctcaacagaaggcacttctagatcatgggaagaatatagaccctgtgaaattgcaattggaaaaggagaggctggaaaagaggcagcaagaagagaaagcaaggatcgaggcccaggtgaaggctgctgaagcagctgcacaacaaaagtttgaggaagaaatgaggatgaagagaaagcaggaaagggaggcagcacgcctggcactacgcatgatgaagaagactgttgatattgacaacagtgacttcctaaaggagctggagaacttcagcaaaacatggcaggcaaatccacctggcaaattaatcgtggattttatcagtggggacttgccaccggggttagggagtccgctggagaggctcggcctcttcatgaaggaagatttcgaggatgaggtagaacaggaaatggaggacagagtgtcaccctcaatggatgttgacatcaggaaagatttccaggaagacttaggacatgaaatgcaggacagtgcatcacccgtgactgtcattggcacaaagaatgacgtacagggagtggcaggacatgaaatggaggacagcggatcaccagccacagtcattgacacgaagaaagaagagacagaacatgagatggtggacagcgtatcacctttgatggatgttgacacggaggaaggggagatcagctgctgacggtagctacacctctcttcacccgcataatttattgaggcagacatccttgcttggttgttagattaggcaatttcataagcagagtgatgcagaaacattagttttatctgctttcatcgtagaaccatgtggtgtggagaacatgtctcagacgaaatgacgagtggttttggatttgctgcggattttaattttcgtggtcttgtcagtctggcaagagtatgatgactctgtatgttgaatttgacctcccccgctggatgacatgtataaaaggatgagaaaaaaaggatagtttggagctagtgtatgttgttggagtttatggtggagccagatttggtgagcgtgtcgtggacgtaaatgtaggtatagctatatacttgaaatattgataagagtgtttggttcaaaggatcaattcattccagttaaacatcatgagcttgttaatgggtgtttggttcgagagttcgttaatgggtgtttggtttgaagaataagctagtctactatttttttatttggttgttgaatgtaattttttgacctgtcatctcatttcttacaagtgaatgattatttctaagtctatgagaaataa

SEQ ID NO: 213367 - DNA, 714 bp, Zea Mays
accacgttttttcatgcaaaacaaaagctttcgtgccatttgccgtccggtccgaccgccttctccgcgagcgctaggagcaataaacggcaggcaccattctcggactcggaggcaacgcccagacgcgcaaacggaaggaagggggagcgcaacacgcgcggtcgccgggagagagagagagaaagggcgagctagcgagcgagatccccctctcccgctgccggatccgatctgacctgacctcgtcgccgcctgccgtgggagggagaagaggaagaggaggcggaggcggcggagatggcaccggtgtcagcgctcgccaagtacaagctcgtcttcctgggggaccagtccgtcggcaagacgagcatcatcacccgcttcatgtacgacaagttcgataacacctaccaggctacgattggtattgatttcctgtcaaagacaatgtaccttgaagatagaactgtgagactccaactctgggatactgctggtcaggaaagattcaggagtttaattccaagctatattagagactcttcagttgctgtcattgtattcgatgttgcaagcaggcagtccttcttaaatacatctaagtggatagaggaagttcgcactgagaggggcagtgatgttatcattgtgcttgttgggaacaaaactgaccttgttgacaagaggtcttctgtctctaagtggttattt

SEQ ID NO: 213368 - DNA, 1258 bp, Zea Mays
accacgttttttcatgcaaaacaaaagctttcgtgccatttgccgtccggtccgaccgccttctccgcgagcgctaggagcaataaacggcaggcaccattctcggactcggaggcaacgcccagacgcgcaaacggaaggaagggggagcgcaacacgcgcggtcgccgggagagagagagagaaagggcgagctagcgagcgagatccccctctcccgctgccggatccgatctgacctgacctcgtcgccgcctgccgtgggagggagaagaggaagaggaggcggaggcggcggagatggcaccggtgtcagcgctcgccaagtacaagctcgtcttcctgggggaccagtccgtcggcaagacgagcatcatcacccgcttcatgtacgacaagttcgataacacctaccaggctacgattggtattgatttcctgtcaaagacaatgtaccttgaagatagaactgtgagactccaactctgggatactgctggtcaggaaagattcaggagtttaattccaagctatattagagactcttcagttgctgtcattgtattcgatgttgcaagcaggcagtccttcttaaatacatctaagtggatagaggaagttcgcactgagaggggcagtgatgttatcattgtgcttgttgggaacaaaactgaccttgttgacaagaggcaagtctcaatagaggaaggggagggcaaggcgaaggaccttggagtcatgtttattgaaaccagtgctaaggctgggtttaacattaaggcgctgttccgtaaaattgctgctgcacttcctggaatggagacgctctcatcagcgaaacaggaagacatggttgatgtgaacttgaggcgttatcactgatgcttctctcgggaagaagagttgattgcctctcgccagtgaacacaccatagtctttacccggtgaatggaccgtttgcattggaacgatacgttttatgagttttctgttatttcctcagtggcctaagctagcaacagtgtatagttgggttgacacttcaaacttctaccattcgagttgggtattagaactagttattattggttcatgttgaacttatatatatttccatccttttgcagttagtttgagtcgtatttgctgtgtaccaaacatgtattgcaaatttggaatttttgtaagctataataaggccagcacggcaatatccccacatgataaccccgaaatttgtatcgttcaaagttcaaa

SEQ ID NO: 213369 - DNA, 584 bp, Zea Mays
ggatgaaaagcttcctggcaggcaagtctcaatagaggaaggggagggcaaggcgaaggaccttggagtcatgtttattgaaaccagtgctaaggctgggtttaacattaaggcgctgttccgtaaaattgctgctgcacttcctggaatggagacgctctcatcagcgaaacaggaagacatggttgatgtgaacttgaggtccggcaatgcaaactcgtcccagtctcaggctcaggctgggggatgcagttgttagttgcagtctctgacacttgcttgctcatgatctttgggactctgagcatcagaaggcgttatcactgatgcttctctcgggaagaagagttgattgcctctcgccagtgaacacaccatagtctttacccggtgaatggaccgtttgcattggaacgatacgttttatgagttttctgttatttcctcagtggcctaagctagcaacagtgtatagttgggttgacacttcaaacttctaccattcgagttgggtattagaactagttattattggttcatgttgaacttatatatatttccatccttttgcagttaaaaaaaga

SEQ ID NO: 213370 - DNA, 1624 bp, Zea Mays
atccattaggcccgtttccagtttccaccgtcaacagaggatggctatcgccgccgttcgccggctcttgtggcgcgaggtggggactgcggccgccgccgcggccttggggacggacgggaatctgttcgctcgcctggtctcggagccggagtgccgtgtcaaggcgaccatggaggaggctgcctcctccgggacccaccgcgacggcgccttctgggagccccccgtcaccgcgctcctccgcgcgtcgtctcctaccaaggcgcacctcatattggaatggaaactagagaagctgctgaaggaagacattcaagattgcgagccctactccaggataattcgtttctgtggtcagacaaggaatgcaacgtttgcaatgagagttttcgaatgcgtggaggcgaagggaatccagctgaacactaacatttgcaatgcccttgtcgatgctttcttgtcagccggagacctcctttctgcaatgaccttatacgagactatggaaagcatggacgcttgcagtcccaattccgctacatatgatgcattcatctgtgcattttcgctgcttggaagtggccatgctatgatgagctggtatgtagctgcaaagaacgccgggtttacgccaagtattcaagcttttgaatctttgatcactgggtttgttcggttgaacatgctagacgatgccaaaacggtgtttgaggaaatgattgccttggagattaagccaaactctactattttggaggccagccttgagattctctctagaaaggaggagaccagcagagtaggagactttttaaaacgtgcaagggatggcaattgggagttgaacaaagccacagttgtgaggttgacaagaatatgcctagatggaggggtaatagatgaaatggagcagctgcttgccctaatacaaaagggaacacacttgaattctgaaacacaactgcaccatggaattatcaggttctatgctaatgcagatcgattagcggatatggaggatgcaatttatcggatgttggacaatggtgtgatgtttacgtgcccggaggatgttgatgtcataatctgttgttattttcgtcacagggaatttgataggttggatctctttttgaatcgcatccgaagtttgttcaagctcaataggtctacatatgacatactggttgctggataccgaaagtttgatttacatgaaagacttgattcaaccatagctgatatgatgagggaagctggatttgcatgagatcacaaagaactatctgtgcaccatgactttccacggtaaggccatctccagcggaacgtggatatgggcgtgcaaaacactgtttgcactgtagagtgcactgtttacagagcgaagtttgaaataggaagtgagataagaagtgttatagagaggctgctggagatagcctaatatttccatagccttaagtgcattgagcctgaaaaatgaaatccaggattaagatacattatcatgtcatggatgcatttgactttgagaagccgtaagcgtgaaattacatggatgctgtgctcaggctgcagaagctggcaactgtattgactgggacatgtagaatatcag

SEQ ID NO: 213371 - DNA, 5915 bp, Zea Mays
ctgcattcgagagaaaacaactttgagcaaacctgaatagaataaccagcagactgtatgataagccaaaaaatacaggtataaaaaaacttgacctacgggggtaagactgccccatggtattataataataataataagatcttctctcacaggtcaagaaaacccccgaacatctgccgcaccaatacatagcggcatcgtagccccgaccgcgatcgggccttaggctatccccagcagatcccttatctcatcccctatttcaaactccactctgcaaacagtgtcaaacagtatcatctacagttccacgtcccctattttaccttatctactggagacagtcttaggctctgtccaaccattccccctcctaaattcctccattcgtactttctatccatatttagatacctccccccctcaactattattccccctattttacctcctctccaatcattccccttatttagctccccctttaccctttaattgagctatttgacttttctatattaatttttggagttttaaaaatgctatcatatttgcagtaccataatacacattgttatcaattaagcaaacttgtaatggattaattttgtagctaaaaacactaattagtgaagaggaggggattccagctcaccccgtttacagggtgttttctttctctcacccccccccccccccccccacgagagggagaaggagagggagccattggagctctctcggtgtacgaactcaccgaatacgccgcgagggggaggggggagggagccgttggagagcgccttagacctgtgctttggcgtgggacagatgagggaatttttttaaccacaacctaaaattcgctcccacatggagtcgaacccaagacttgaggagtgttactcagaccacctaaccaactcagctagaggccctttcgcatagtagtagtaatagtttgctgcatgctcaagacaatcgctccaacaaccaataaagcataccataaaaagacatgcaaagaagcagtcaaatccattatgacttacattccttaatatttccaaatcattaataggaaaaagttatgttgctctgctaatgcttactgtaaagtaccaagcccatggatatggcagaagtcccttgtcaaaatagcgtcctagtaatacagaaaaaaaatactttgtcttccttatccttacattgcaaggacaataattcagtggcaggctattcgcatcatgatctctgatctgatacacaaagatttgggctcaggcatcccaaagaacaatgccaaggacctgtgatccgatcaagcaaccatagcaatataccatcaccactgggtcaggcaagcccatattataacggtaagcgtcacacgtaagtgatccaaacaggcaatcatacaaccatcttttaagaacagtcgaacagtggaaagaaaatcgcctcaccaggggcgaagggcccagtgtggccctgtattgctcgagcaataccttagtatagcccaagaaagtaccagtagtaaaaaaatcctatccctaacgtagtaatgctttcagccttcacaaacaagttcgtctccggccagccttccaggatcgccccctgcttttgcccgcactcccacagcccaccactttgtgaaattgatttcaaatgtaagatattggtggaaatcaaggtagacaactcttttatctaaatatccagtaggctttgtgactttgatttcctcccataaaagatcttcaaatttatttgatgtgagattgtattcctcatttgatgtgtgactgagcagcactagccattgccctcctgccgcttgctgacgttgggcgactgcacatcagtcagacagccacatgtgaaagccatctatggaacgtgaccccctctttccttttccatgtagatggttcatatccctctaatactcttttcaattgccatcttgaagagaagaaacctgttctggtacaactgctcttcatgttcattatagatcatacctcgttgtttttctcaaaaactgaaaataaatacctgccgcgggacgccacgtggagggttttgaaagtcgacgcctacgacacgcctagtcgctaggctatgcccctcctgcctggactagggaggtagtcgggccctaagtcgctctgggcgcctatgtggcgacttgcagcgattcagcggcgcccaggttccctaggcggcgtggaggcgagctaggcgtccttcgagggaaagcacacgcggagctttggcgcgggaataagccgtgcgctggagaggataagggggagagaagtcgtgtgcctggctgcctggttttactgcccccccccccgactgcttgtgctggtcctccatcccgccagcgacgcggctactggtcttccccgccggcgacgcgactgctggtcttcctcaccggtgacgcgactgctggtcttcctcgccggcgacgtggctgctggtcctcctcgccggcgacgtggctgctggtcctcctccccgacactttctcctccctcagcccaagccccaaggtctgtatgtcctcccctgcttctctcctctcctctcctctgtttcctttctgttttgtatatcagtttgtaatttgttgattgatggcttgaactcacatgacagagggtcaatctgaaactgcaagtgcaccagagggagttagtggccttagaaggaattcagatgatgtgggatgggagtatggagttcttgttgatctaaacaacaaggacaagaggctgaataaggaactttggaaagaaagattacatgaggtgcataaatatattgcaagatgggcctttaaccatgcaatatcattcaatgcatgtgacaacgatgagttcaagcaaatgtgtgaagcaattggacaatttgggcctggaattgaacctccaactatgttagacctgcgagggagattgttggaagaagaatatgcaagaaccaagagtttgctgcaagaacgtgaagccgagaagatgaagaatggatgctctagtatgaccgatgcttggtcagataagaagagaagcataatgaattggacaaagcaatcgaagacatgggtccggatgatgtggtgcaagttgactgtcaatgcttctaacaacatgggagcaaagaagctactgcatgtgaagagaccatatatcttttggacatcttgtgcaactcacacaattaacttgatgctccaaggaattggcaacatgcctcagttcaagaaggtgattgaccaagcaaagacattcaccatatttgtctatgggcacacaagaacactagagtgcatgagacacttcactgaggggaaagagatagtaaggccaggagtgactaggtttgcgtcaaactatctaactttggacagcatacaagagaagaaggaccaactaagaaagatggtggttcatagtaggtgggactcactgaaggatgtgaaatcaaagaagggaaaaaatgccatagcaactatattgaatccaagcttttggaaggatgtgaagttgacattggctgtttttgcgccattgttcaaagttctccgtttggttgatggagatgtgaagccattgatgggctttgtatatggaaaactattgaaggcaaagagacaggtcaaagaggcccttggcaatgttgagaaccgtttcaaggatgttgttgctgttattgagaagaagatggctggaagacttgattctccattgcatttgacagcttatttgctgaatccacactacaattatgctgacccatcaatctttgatgctcccaaaataacagaaggttttatcagttgtgtggagactttttattatcatgatgacgaaatgcaagaacaagccgccaacatcaaactccagaagtttcagaatagagaagacccatttagcaagaagcttgcaaggacttttgaaaactttgattgtaatccaggtaacagttgtttgctgatagagaggttttttatttcagcattgtaacaagcaatctgtcgtacctcctaactaatagagaggtttttatttcagcatcatggtggcggctttatggaactaaaacaccagctctacagaagatggctaccaagatcttatctttaacatcaaattcttctggttgtgaaagaaattggagtgggtttgatggggttagtacctatctgttatcaacattacagcagcattacaataaaaatgcagaactaaaagtgctcttatttttaatttataggtgcacactaagaagagaaataggctaggcttactacagaccgcctcaacaagttggtctacattcaattcaacaacatgctgattaataagagaacaaagatcaagtccaagaaaattaccgatgttctattgtctagtgatacaactgaagctcaaggtttcctccaagagaatggagataattgtgcattagtttcctttagagatgaggaagaagtcatggaaggtacaaggataccttggtctgtgcttggagatgcagtgggagcagaagaacaactagagctgcgtagaagtgcaagggcgagagagctcaatgaagaagagtttgagtccgaagaagaagagtttgatgaatatgaggatgtgtatgagatggatgaaccctaagagtgagccagcttcatgtcatgttttagcttttattatgcatccatgtatctttaacttgtgaacttagaactcttgttgtgtgcttgtgttttgtcttgtgacttgtgagaactgaatcatgtgatgtaatgtactgctactgcctactgctagtctgctatgcattttatatgtgttgctgcctgctgtcccttcatgtttgtgattgcaaaaggctatcctacgctgctgatcagtatttaatggatgggagaagggtcagacctcagataagtacctaacttgctatttcctattttttttatcacttgtattgatgcccaattgcatctaaaagtgttgtccacttctattgcagcagtgcttgaggattcagtgatcaacagatcggcaagggcaaaggacgtaaggtatgtctactgctccttccctattttttatctaaattattcgttatttgtgctataaatgtatatattatataaattggcaaaacgcctagaaaaacgcctagcgtcgcctaggctggactagttcctaggctaagggtcatcacctagattccgcctagcgcctagcaaaacttattttcaattgccatcttgaagagaagaaacctgttctggtacaactgctcttcatgttcattatagatcataccttgttgtttttctcaaaaactgaaaataaatacttgtcaacttccatggttcctccattgataaagttgcaataccagtggacttggtggtgaaagttcgaagctagaaatgtcactggttatgaaccattccaggtagcattatcattgatggtttgcaagccaaaagtgatagtcaccatttgcactgaggaacatataagctgtgtccagttcatgtcacaggcagactgttatgcagcttaactgttagtttcaagctgtataggaaacacttattgttttgttagataattaactacagaaattttctcagtggttatgcagacggaaattacttattgctattggataaactgttaaagacagtgcatgcattgcatgcagtgctttatcaaaataatggtagaaggtggtgcatcacttctgatgaaacaatacttgttgtccctgcttttcaggctggtttacttacctcaaatctgcacttcaaatggcacaaatgaatgttggtagcgtacatcttctgtctagtgaaggtgagatattagaggaaaacaaac

SEQ ID NO: 213372 - DNA, 1145 bp, Zea Mays
ttttagctcatttcctggatatctaccagaattctgtaaccaaaattgaagatgttttttttgaagataaggttggttgggaattctccagctatcctcctctttctcgcacacgtccatatctctggaatactctccaccgcctactctttttcttatcccaacagctagaagctaccatattctatttcttttctctcatatgaatagagatagatgttcctggttggagaattcctcacgtcacctgcaactcgaactgctgcacggcttcaccacgtttaactcccccaggaaaacccccagccgtcacctgccccagcgttcgctctccatgtttcttagccccggcatccaccctgtacttgctcgtttccaagctgtgctccagcgagcttctctgtagttcttccccaatcgctcgctctcagcctgtccggtcctgcgtacttcaacacctttctccagccgtccgagctccacctcgtcgtcgtcctactgtttcagcgtcgtatccctctacctcatcacagcagcaccggtgctctcgtcgtcgctgagctcttggcgcgccatgacatcatcgtcgttttctcgccggccgcgcttgacccacagctccttcgcgtcgtcgtcttggacaacccgtagcctctgctccgacctcgtcgcactcgcgctcctcacacccgacaagccgtcgtgctcggcgtgttttctccgtgcggccttacgggttcctctcgcttcatcggcttgtcgcgtgttagagcagaacaccaagaagaattgatctttgtaaaggaggaacctgctccagtgctgttgatccagtgatggactccatctaactgcttatcagagtagaagggttttagatcttctcctgcaataagaatgaggactcgttctggaaaggatcatggtgctggtgcttcccagaggaatatcgatgcccccaatccatctccgacatcagctttggatgatgttgtggctcagcttgtgaatgtgagcactgttcttcagcaaatagcccagcctacaacatcaactcagtatggtcgtcatgattctaatgctgctattctctataaagagtttctcagcacgcaaccaccaatgttcactatagcggaagatcc

SEQ ID NO: 213373 - DNA, 953 bp, Zea Mays
ctggagttgacttgtctaacagaccatatttgaagccagaaatcatatgatgctggtattgtcattgaagataagaattggccaccctttatgcccattattcatcatgacatttcgaacgagataccaattcacctgcaaaggatgcagtacctggcgttttcttcactattgggattgacagcttgcctcttttggaacatcattgcaactacagcagcatggattaaatcagaaggtgtcatgatctggttgctagcaatcatctacttcatctctggtgtccctggggcctatgtgctttggtatcgcccgctttacaatgcgatgaggactgaaagtgctttgaagtttgggtggtttttcttgttttaccttctccatatcttattctgtgtctggtcagctgtggctcctccatttccattcaaaggaaaatccttggcatattttacttcattggatttggaatgttctgccttgaatcactgctcagcatcgttgtcattcagcaagtatacatgtacttccgtggaagtggaaaagctgcagagatgaagcgagaggcggcccgtggtgctatgaggaatgccttttgatagagcgacctaggcgactggaagagacacggtgtgacaatgggtaactacgttatgtacatatgctgttcgtctctgagattacttatactagcttatagccttcttgccttcatgcaatgtataccacctaccaccggagcttgatctcttacctaggttcagatgtgcttataggtaactagttttttttatacatttcctacatgatttgtactcttaactcgcgagacaattgttgttgttctttggatctcgagtgattctttgcacggcctgaaaccacttggtcttgaactttgtcagattcttgctgaagtggatattcaggtcatctttttttttctgtctttg

SEQ ID NO: 213374 - DNA, 1413 bp, Zea Mays
cgcaaatgcaacgcaacaagcacacctgcaccgcatgagcagcacccgaaattccaaacccacttcgtcaagcaacaacaccggctaaaaattaaaggaggcagcgcgtagcagttggtcgccaccgtcacgtacacacgctcacgttggaggctggactccgcccccgtgctgctcttcgccttgcctttctccgccggagaccccgccgcctcagctgccacaggaggaggaggcaaccatggcggggaggtacgaccgcaatccgttcgaggaggatgacgtcaacccctttgcgggaggaagtgtacctcctgcttctaattctcggatgtcagcacttcctcatgaaccagctggcttctacaatgatcgtggtgcaacagtggacatacctcttgattcaacgaaggacctaagtaaaaaggagaaagaactgcaggcaaaggaagctgagctaaacaaacgggaaagggagctgaaaagaaaggaggaagctgcagccagagctggtattgtcattgaagataagaattggccaccctttatgcccattattcatcatgacatttcgaacgagataccaattcacctgcaaaggatgcagtacctggcgttttcttcactattgggattgacagcttgcctcttttggaacatcattgcaactacagcagcatggattaaatcagaaggtgtcatgatctggttgctagcaatcatctacttcatctctggtgtccctggggcctatgtgctttggtatcgcccgctttacaatgcgatgagctccatatcttattctgtgtctggtcagctgtggctcctccatttccattcaaaggaaaatccttggctgggattttgccggctattgatatcataggcaggagtgctattgtggggatattttacttcattggatttggaatgttctgccttgaatcactgctcagcatcgttgtcattcagcaagtatacatgtacttccgtggaagtggaaaagctgcagagatgaagcgagaggcggcccgtggtgctatgaggaatgccttttgatagagcgacctaggcgactggaagagacacggtgtgacaatgggtaactacgttatgtacatatgctgttcgtctctgagattacttatactagcttatagccttcttgccttcatgcaatgtataccacctaccaccggagcttgatctcttacctaggttcagatgtgcttataggtaactagttttttttatacatttcctacatgatttgtactcttaactcgcgagacaattgttgttgttctttggatctcgagtgattctttgcacggcctgaaaccacttggtcttgaactttgtcagattcttgctgaagtggatattcaggtcatctttttttttctgtctttg

SEQ ID NO: 213375 - DNA, 1529 bp, Zea Mays
cgcaaatgcaacgcaacaagcacacctgcaccgcatgagcagcacccgaaattccaaacccacttcgtcaagcaacaacaccggctaaaaattaaaggaggcagcgcgtagcagttggtcgccaccgtcacgtacacacgctcacgttggaggctggactccgcccccgtgctgctcttcgccttgcctttctccgccggagaccccgccgcctcagctgccacaggaggaggaggcaaccatggcggggaggtacgaccgcaatccgttcgaggaggatgacgtcaacccctttgcgggaggaagtgtacctcctgcttctaattctcggatgtcagcacttcctcatgaaccagctggcttctacaatgatcgtggtgcaacagtggacatacctcttgattcaacgaaggacctaagtaaaaaggagaaagaactgcaggcaaaggaagctgagctaaacaaacgggaaagggagctgaaaagaaaggaggaagctgcagccagaggtagattattagttatatctggagttgacttgtctaacagaccatatttgaagccagaaatcatatgatgctggtattgtcattgaagataagaattggccaccctttatgcccattattcatcatgacatttcgaacgagataccaattcacctgcaaaggatgcagtacctggcgttttcttcactattgggattgacagcttgcctcttttggaacatcattgcaactacagcagcatggattaaatcagaaggtgtcatgatctggttgctagcaatcatctacttcatctctggtgtccctggggcctatgtgctttggtatcgcccgctttacaatgcgatgaggactgaaagtgctttgaagtttgggtggtttttcttgttttaccttctccatatcttattctgtgtctggtcagctgtggctcctccatttccattcaaaggaaaatccttggctgggattttgccggctattgatatcataggcaggagtgctattgtggggatattttacttcattggatttggaatgttctgccttgaatcactgctcagcatcgttgtcattcagcaagtatacatgtacttccgtggaagtggaaaagctgcagagatgaagcgagaggcggcccgtggtgctatgaggaatgccttttgatagagcgacctaggcgactggaagagacacggtgtgacaatgggtaactacgttatgtacatatgctgttcgtctctgagattacttatactagcttatagccttcttgccttcatgcaatgtataccacctaccaccggagcttgatctcttacctaggttcagatgtgcttataggtaactagttttttttatacatttcctacatgatttgtactcttaactcgcgagacaattgttgttgttctttggatctcgagtgattctttgcacggcctgaaaccacttggtcttgaactttgtcagattcttgctgaagtggatattcaggtcatctttttttttctgtctttg

SEQ ID NO: 213376 - DNA, 3234 bp, Zea Mays
ttgagatttaaactcactcaatccacatacattgaccaagacaaacaagcccctacatgaattggagagaaaacgaacgtgactgggcttgttctgttctatcccaatccatatggattgagagggattgagggggtttcaatccctagtaaggccttgttcggttaatcccattaacaatggattggacgggattggaaaaacttgtgaagaaatttgacttgcttgggatttaaacccacccaatcccacttaatccacatggattgggagctaaccgaacaagccctaagtaaaaatctcttccaatccgtatcaatcctctccaatccatatggattgaaaataaccgaacaagccctaaactggttatcggtgctgatcggtttttggccgccgtagaaccctgcttcagactcgattacagagtgtatttccgcaggtgcgcgcgtaaacggatagatctactacagtattagtagctgatggtcgaacagacaaccccctgagaagtggatcttgctggccaggtggtgcaagggccgacagcgaccactaaccaggcagtgttcctgcgagatgcatgcatggccatccatcacctctcccggtctccgtcgatcgcctgtcaaaatgaccacggggacgcctgctgctaccgaggaccgatgagcgtctgactagtggggcaggagccgaataaaacacagggtccagcactggcaggccggtccggacgcatcaacaagtgggaggaggccccagctgtcagttagctgctcccatgaataaatatttctggtggcactggatggacacagcctaaaatttcaccgaacgatagcagtgcccgctcccagctcccttggacccgggcctagctttgactggccgcgtgctctctcgccattgtctgcatgagcacatcgaattccttccatctctgatctctcccactcccacgtcccacccataaatacttggccaccatctttcctggccttccatttcccaaaaaaaacgcaagcatagatcagtggataccactccatcatcctgcttggccccggccggctggtagatcgtcgttccggagtcgtcgactggaataacgaactggcgcagcaggaggccaataatggccaccatgaagctgggttccaagccggagattttcgtcctccaagacctcacatggagatgcacgaccgagctcgagagtgatgtagttgtcgaagtcggagagatgtccttttacctccacaagcggatgatcagcgagtaccaggctccggcggatggcggcggcatgtgcacgctgcagctggacgacatccccggaggcgccaaggccttcgagctggcggccaagttctgctacgacgtcaagatcgagctcaacgcgctcaacgtggtgtgcctccgctgcgccgccgagtacctgcgcatgacggacgactacgccgagggcaacctcatcacgcaggccgagtgcttcctcgtcgacgtgctcgccaactggaaggactccatcaaggcgctcgagacctgcgagggcgtgctccccactgccgaggacctgcacctcgtctcgcgctgcatcacggcgctggcctccaaggcctgcggctccgacgctgccgcgccagtggtcaggaacgccagcgtcgacaaggacgcgctctggaacggcatccggtcgggcgacacgacgtcctccgccgccgcggcggcggcggcggccgggatggactggtggtacgaggacgtgtccttcctcagcctgcccatgttcaagcgcctcatccaggcgatggaggccaagggcatgcgcgacgagagcatcgccggcgccatcatgttctacgccgggcggttcctcccggggctgaagcgcaacaccagcttcagcaacgcgctggccagctacggcgccgacggcagcggcggcgccggcggtggcatgagcagccgcaacatcaccccgcgcgccgccagcgtgtccgctccgtcggagggcgaccagaggtacttcctggaggagatcgtggcgctgctgccgaccaagaagggcgtggcctccaccaagttcctgctgggaatgctgcgcacggcgatgctcctccacgccagcccactgtgccgggagaatctggagcggcggatcggcgcgcagctggaggacgcgtcgctggacgacctgctcgtgcccaacctcggctaccacgtcgagacgctctatgacatcgactgcgtgcagcggatcctggactacttcatgtcgtccacggacgggatcgggaccgggtacacgtcgccggcgctggcagaggagggtggcggcagcctcgggataccccaaggcgcgacgccgtcgtcgtcgctgtcgccgatcaccatggtggccaagctcatggacggtttcctcgcggaggtggcgccggacaccaacctgaagctgcccaagttccaggcgctcgcggccgtggtgcccgactacgcgcgccccgtcgacgacggcatctaccgcgccatcgatatatacctcaagtcgcacccgtggctgtcagaatcggagagggagcagctgtgccggctgctgaactgccagaagctgtcgctggaggcgtgcacgcacgcggcgcagaacgagcggctgccgcttcgggtggtggtgcaggtgctcttcttcgagcagctccgcctgcgaacgtccatagccgggtggttcttcgtgtcagacaacgcggcagggggcgacggcgcgcgcccacacgccggcggcgccatcgtccccaagggcaccgcggccatcgcaggctgcccgcaagcagacgccgacagtgacgtagagggcgacgcacccgatgggaaggagaccatcaccgacgtgaaagcgcgggtgtcggacctggagaaggagtgcaagagcatgaagcaggagatccggcggctcgggaagccccggcggtcctggagcctcctcacaaggaagtgcggttttggggccaaggtgcaacaagcgcagactgccatgagcggcaaatagattattttcccacttcatttgtttattaggcaggagcctcgattgcattccctaaggagtcttatcatctatttgctacagtaacagttcctaatctagccctagctcctagtgttatgcaataattacgtgcggatggtttgcacgggatgataataaacgtaacttcagcttcagcacagcca

SEQ ID NO: 213377 - DNA, 1873 bp, Zea Mays
ttgccgtatacgtacagcatacaggttccgtcgtcccgcaccgcacagccgctcaaaaaccctagttctcgccgccacctccgccgctcggcgcccgccgccagtccaccacttgcccacctcgtcgcgacgtcgcgcagatatcttcaccgcccgtcgcagcaggtgagttccctggcccgttgcgtcactgcgtgttgtgacttgtgaggctaatacaccatactgcatacatcctgtgagggcgtgaggccaatacagcattcaatcttgtggatccgtggcccgtagcccgtggcgtcgctgcgtggagatcggagcggtcaagtttagtaaatggcgcgacaggccaactgtcccaacaaatggctcttcctcggacaactcagagcgcatggcacgagagcccgcccgcccttggtcaagtccagtaaatggcgcgacagagtgctgcttcgattcccattaagtgtgtgttgcttcgattttcagttagtcaattctataaaaccgaccctctctttgttaggctgccagagactttgatttggtgatccctgtgagtagatatggtgagaagacgtcctgtcatggcgtcgaagtccagagccagggctagtgaagccaaccgtaatcctagtagtagtagcgttggtgaaccagcacaaactgccgctaatgtgggtgtggctgctggtgaactaggtgtggatgctggtgaactgggtgtgggtgtgggttgtggggctgctggtgaatcagcaacaataccatttgtcgtctatgggggtgaattgggagatgcggttgctgctgaatgtgcaccaccgttggcatcatcaagcagtgcaaagtgtagttcgagggcagactgttggaaacatatggtgaagaaggaagtcattgaggatggtgtagtacatttttttgctgtaaagtttctaaaatactttgaacaaatatcacatgtatactgttttgcaactatttttgatccacgcaagaaactggatggtttgcaaattgcattggagggaataggtgatgcattggacatggatttttcagatgcttttaatcatgcaaaagatgacttgtttcgtgtctttggttactattacaaaaaatatggtgaaagtgagatagactcacctgctgttgagtttggtgcagaaatttcagatacctctcttacagctcacttatggaagagagcgaaggggaaagaaaatgtcgcctcatctcaaaggtggaatcctaatgctgaattaaatcactatctgtccactaactttgtaggtactgatcgcgcactaaggggtgagaaggtaaagttacttgagtggtggagggaccacaagtatagttttcctgtcttgtctcagtttgctagagatatacttgttattcctgtctcaactgtttcctctgaagctacctttagcactgttgggagaataattgaggaacgaaggtcttctctagcacctaagacggtggaggcaatcacttgccttaaagattggaacagagccgaagagcggaagcaacatcaacttgaggatcctgagattgaatttgccgctgcagatttggacattgattagacaataatgtttagttgctgctacagattgaatttgctactatgaactttatgtggttgtaatatttagactttatttggacattgccggtctgtactcttttccttatagaggggccctgtaatggggtataaggtttttaatgagacaggccgaggaatatatttttgtttccctcaaaatgtgtgttgattcattagttcacatgtttgtaacatatagtctggtgctactgttttagtttgtaatgaaatactatcatgtat

SEQ ID NO: 213378 - DNA, 1770 bp, Zea Mays
ccattttgccgtatacgtacagcatacaggttccgtcgtcccgcaccgcacagccgctcaaaaaccctagttctcgccgccacctccgccgctcggcgcccgccgccagtccaccacttgcccacctcgtcgcgacgtcgcgcagatatcttcaccgcccgtcgcagcaggttcagctgctggcacgggacatttgaaccggcactacaaagcttgtttagcaaagctaggaaagactcaaggaggaggtacgcaaacccatcttaactttgctgctgatggtacaataagtacatgggtttacaacccacaggtagcacgtgatgaaatagccaaatttattgtttgtgaagatttaccgattatgttgggcgagagccaaaattttaaaaacttgattcaacgtgctttttgcccacaatatcagcctgtcactagaaaaactacaaaatctgatttgattgcaatatacaaaaataaacttgctgctcttaaagagtcttttaaaaaggttcagttctcatttgctttaacatcagacatttggacatcatcacaccaaaaaacatgttatgtttctgttgttgcccactacttggacgattcttatgctttaaacaagcgagtcatcggttttagaatgatggatgagtcacacactggagatgcaattgccaaccatatacttgaggtagttcgtgattttgagatagatggtaagattctctctataacccttgacaatgcttccgcaaacacaactgctattgatattctcacccctcggttgcagtcatatatacaaggttatattatccaccataggtgtgtgtgccacattataaatttggttgttcaagctggtataacagttgcaaataagtacttgaataatatccgtgctgctattcgtttcataacaagcacacctcaaatgatttctagatttgctgagtattgtaaagctcaggatatgagaccaagaaaatttggtcttgatatgaagatcagatggaattcaacctaccatatgcttaagagtttagaaggttatgaacaattaattactgtctttgtgaatgccaatggaggtaaagtttctaaaatactttgaacaaatatcacatgtatactgttttgcaactatttttgatccacgcaagaaactggatggtttgcaaattgcattggagggaataggtgatgcattggacatggatttttcagatgcttttaatcatgcaaaagatgacttgtttcgtgtctttggttactattacaaaaaatatggtgaaagtgagatagactcacctgctgttgagtttggtgcagaaatttcagatacctctcttacagctcacttatggaagagagcgaaggggaaagaaaatgtcgcctcatctcaaaggtggaatcctaatgctgaattaaatcactatctgtccactaactttgtaggtactgatcgcgcactaaggggtgagaagatttggacattgattagacaataatgtttagttgctgctacagattgaatttgctactatgaactttatgtggttgtaatatttagactttatttggacattgccggtctgtactcttttccttatagaggggccctgtaatggggtataaggtttttaatgagacaggccgaggaatatatttttgtttccctcaaaatgtgtgttgattcattagttcacatgtttgtaacatatagtctggtgctactgttttagtttgtaatgaaatactatcatgtat

SEQ ID NO: 213379 - DNA, 756 bp, Zea Mays
gccgtatacgtacagcatacaggttccgtcgtcccgcaccgcacagccgctcaaaaaccctagttctcgccgccacctccgccgctcggcgcccgccgccagtccaccacttgcccacctcgtcgcgacgtcgcgcagatatcttcaccgcccgtcgcagcaggttcagctgctggcacgggacatttgaaccggcactacaaagcttgtttagcaaagctaggaaagactcaaggaggagaaatttcagatacctctcttacagctcacttatggaagagagcgaaggggaaagaaaatgtcgcctcatctcaaagctacctttagcactgttgggagaataattgaggaacgaaggtcttctctagcacctaagacggtggaggcaatcacttgccttaaagattggaacagagccgaagagcggaagcaacatcaacttgaggatcctgagattgaatttgccgctgcagatttggacattgattagacaataatgtttagttgctgctacagattgaatttgctactatgaactttatgtggttgtaatatttagactttatttggacattgccggtctgtactcttttccttatagaggggccctgtaatggggtataaggtttttaatgagacaggccgaggaatatatttttgtttccctcaaaatgtgtgttgattcattagttcacatgtttgtaacatatagtctggtgctactgttttagtttgtaatgaaatactatcatgtat

SEQ ID NO: 213380 - DNA, 1328 bp, Zea Mays
gccgtatacgtacagcatacaggttccgtcgtcccgcaccgcacagccgctcaaaaaccctagttctcgccgccacctccgccgctcggcgcccgccgccagtccaccacttgcccacctcgtcgcgacgtcgcgcagatatcttcaccgcccgtcgcagcaggttcagctgctggcacgggacatttgaaccggcactacaaagcttgtttagcaaagctaggaaagactcaaggaggagatttgctgagtattgtaaagctcaggatatgagaccaagaaaatttggtcttgatatgaagatcagatggaattcaacctaccatatgcttaagagtttagaaggttatgaacaattaattactgtctttgtgaatgccaatggaggtaaagtttctaaaatactttgaacaaatatcacatgtatactgttttgcaactatttttgatccacgcaagaaactggatggtttgcaaattgcattggagggaataggtgatgcattggacatggatttttcagatgcttttaatcatgcaaaagatgacttgtttcgtgtctttggttactattacaaaaaatatggtgaaagtgagatagactcacctgctgttgagtttggtgcagaaatttcagatacctctcttacagctcacttatggaagagagcgaaggggaaagaaaatgtcgcctcatctcaaaggtggaatcctaatgctgaattaaatcactatctgtccactaactttgtaggtactgatcgcgcactaaggggtgagaaggtaaagttacttgagtggtggagggaccacaagtatagttttcctgtcttgtctcagtttgctagagatatacttgttattcctgtctcaactgtttcctctgaagctacctttagcactgttgggagaataattgaggaacgaaggtcttctctagcacctaagacggtggaggcaatcacttgccttaaagattggaacagagccgaagagcggaagcaacatcaacttgaggatcctgagattgaatttgccgctgcagatttggacattgattagacaataatgtttagttgctgctacagattgaatttgctactatgaactttatgtggttgtaatatttagactttatttggacattgccggtctgtactcttttccttatagaggggccctgtaatggggtataaggtttttaatgagacaggccgaggaatatatttttgtttccctcaaaatgtgtgttgattcattagttcacatgtttgtaacatatagtctggtgctactgttttagtttgtaatgaaatactatcatgtat

SEQ ID NO: 213381 - DNA, 1616 bp, Zea Mays
ccgcaggcccattgaggacaccagagtgtatggatcgctgccgcgtgctcccgtcgcggctcccgcacgcggacgctgtcgaccaactactcgttgtccttttcccgaacgccgagccctagcgtcaacgcggccaggcggcggtcagggccgggcgtcaggcggcagcagtggagcacgcagcccagcagctctaagttctattcagattggtgttttgctggtaccatgtccagtccgtggagccctctgagtattgaggaagacgaagagatacaagagcttggtgccgaggagcagcaggttggtgagcagctgcggcagggtgatgggcagcagcaggagttgacagctgatgcaagagcacaagagaccggaatgaaacgtgcaagatcagtgtccagttcatctactaatccatcaaattctcgtaaatctgagggaaagataaaggttgaggaaaatgcaccaggagctgcaacaggagtgattttgtctcttcgtgaaaggtggaactggaagctgcaaaatcagaaatcgagaagtggcattcagcatttcagagcattccagctgtaccttctggtaccattccagatcctgtttcagtggtgtcttacctcagtaccctgaagtcatcagaggaatcattgaaggagcagctggagaaagcaaagaaaagggaggcagcttttatagtaacatttgcaaaacgagagcaggagattgcagaactgaagtctgcagttagagatttaaaaacacaattaaggccaccatcaatgcagacaaggagattattgcttgatccagcaattcatgaggaatttacacgtttaaagaatcttgtggaggagaaagagaaaaaaataaaggagctacaggacaatgttgctgctgtcaattttactccatccagcaaactggggaaaatgctaatggctaaatgtagaacattgcaagaggaaaatgaagagattgggacgatggcatcagaaggaaaaatccatgagcttggaatgaaaattgcagttctgaagtctcagaacaatgagctcaggaatcaatttgatgttttgtacaaacacatggatggtgtaacaaatgatgtggagagatcaaacgaactggtgtccatcctgcaagaggagttagaagctaaggatctagagctgactagattgaaggaggtgcttgcccagaaaggagctactcaggacgcaccggtggagaccagtgacgacgctggaaacggtcaggaggcagattcagatacactgcaagtgaaggcggaaagctaagggagtttaggctttgaagtgtgtttgttgggacttgtgggaaaagtaatatcatgttatgcggtctcatagcatgtctaggttattatatagtaggggaatcactgcacaaaaacatcggcaaacttttatctatgatcgtacatatggctttacaaaagattattttgcattgtagacaacactattatagtgtggattttgaaattagatatataataataatatagatgagtaagctgtgagtaagaaagcctcaaactgattcgctacagatttgcgctggctgaaccagtaatgatctccaacaattca

SEQ ID NO: 213382 - DNA, 1523 bp, Zea Mays
caatttttgaaatgcttagcttggctttgtccccaaattgcttactatcctgatttaattttatgtatcaagattcagattggtgttttgctggtaccatgtccagtccgtggagccctctgagtattgaggaagacgaagagatacaagagcttggtgccgaggagcagcaggttggtgagcagctgcggcagggtgatgggcagcagcaggagttgacagctgatgcaagagcacaagagaccggaatgaaacgtgcaagatcagtgtccagttcatctactaatccatcaaattctcgtaaatctgagggaaagataaaggttgaggaaaatgcaccaggagctgcaacaggagtgattttgtctcttcgtgaaagtttacaggactgtaaacaaagccttgcatcttgccaggtggaactggaagctgcaaaatcagaaatcgagaagtggcattcagcatttcagagcattccagctgtaccttctggtaccattccagatcctgtttcagtggtgtcttacctcagtaccctgaagtcatcagaggaatcattgaaggagcagctggagaaagcaaagaaaagggaggcagcttttatagtaacatttgcaaaacgagagcaggagattgcagaactgaagtctgcagttagagatttaaaaacacaattaaggccaccatcaatgcagacaaggagattattgcttgatccagcaattcatgaggaatttacacgtttaaagaatcttgtggaggagaaagagaaaaaaataaaggagctacaggacaatgttgctgctgtcaattttactccatccagcaaactggggaaaatgctaatggctaaatgtagaacattgcaagaggaaaatgaagagattgggacgatggcatcagaaggaaaaatccatgagcttggaatgaaaattgcagttctgaagtctcagaacaatgagctcaggaatcaatttgatgttttgtacaaacacatggatggtgtaacaaatgatgtggagagatcaaacgaactggtgtccatcctgcaagaggagttagaagctaaggatctagagctgactagattgaaggaggtgcttgcccagaaaggagctactcaggacgcaccggtggagaccagtgacgacgctggaaacggtcaggaggcagattcagatacactgcaagtgaaggcggaaagctaagggagtttaggctttgaagtgtgtttgttgggacttgtgggaaaagtaatatcatgttatgcggtctcatagcatgtctaggttattatatagtaggggaatcactgcacaaaaacatcggcaaacttttatctatgatcgtacatatggctttacaaaagattattttgcattgtagacaacactattatagtgtggattttgaaattagatatataataataatatagatgagtaagctgtgagtaagaaagcctcaaactgattcgctacagatttgcgctggctgaaccagtaatgatctccaacaattca

SEQ ID NO: 213383 - DNA, 1467 bp, Zea Mays
cttggctttgtccccaaattgcttactatcctgatttaattttatgtatcaagattcagattggtgttttgctggtaccatgtccagtccgtggagccctctgagtattgaggaagacgaagagatacaagagcttggtgccgaggagcagcaggttggtgagcagctgcggcagggtgatgggcagcagcaggagttgacagctgatgcaagagcacaagagaccggaatgaaacgtgcaagatcagtgtccagttcatctactaatccatcaaattctcgtaaatctgagggaaagataaaggttgaggaaaatgcaccaggagctgcaacaggagtgattttgtctcttcgtgaaaggtggaactggaagctgcaaaatcagaaatcgagaagtggcattcagcatttcagagcattccagctgtaccttctggtaccattccagatcctgtttcagtggtgtcttacctcagtaccctgaagtcatcagaggaatcattgaaggagcagctggagaaagcaaagaaaagggaggcagcttttatagtaacatttgcaaaacgagagcaggagattgcagaactgaagtctgcagttagagatttaaaaacacaattaaggccaccatcaatgcagacaaggagattattgcttgatccagcaattcatgaggaatttacacgtttaaagaatcttgtggaggagaaagagaaaaaaataaaggagctacaggacaatgttgctgctgtcaattttactccatccagcaaactggggaaaatgctaatggctaaatgtagaacattgcaagaggaaaatgaagagattgggacgatggcatcagaaggaaaaatccatgagcttggaatgaaaattgcagttctgaagtctcagaacaatgagctcaggaatcaatttgatgttttgtacaaacacatggatggtgtaacaaatgatgtggagagatcaaacgaactggtgtccatcctgcaagaggagttagaagctaaggatctagagctgactagattgaaggaggtgcttgcccagaaaggagctactcaggacgcaccggtggagaccagtgacgacgctggaaacggtcaggaggcagattcagatacactgcaagtgaaggcggaaagctaagggagtttaggctttgaagtgtgtttgttgggacttgtgggaaaagtaatatcatgttatgcggtctcatagcatgtctaggttattatatagtaggggaatcactgcacaaaaacatcggcaaacttttatctatgatcgtacatatggctttacaaaagattattttgcattgtagacaacactattatagtgtggattttgaaattagatatataataataatatagatgagtaagctgtgagtaagaaagcctcaaactgattcgctacagatttgcgctggctgaaccagtaatgatctccaacaattca

SEQ ID NO: 213384 - DNA, 1251 bp, Zea Mays
cattgctccacaatctttcaattcctttccactcgctagggaaagataaaggttgaggaaaatgcaccaggagctgcaacaggagtgattttgtctcttcgtgaaagtttacaggactgtaaacaaagccttgcatcttgccaggtggaactggaagctgcaaaatcagaaatcgagaagtggcattcagcatttcagagcattccagctgtaccttctggtaccattccagatcctgtttcagtggtgtcttacctcagtaccctgaagtcatcagaggaatcattgaaggagcagctggagaaagcaaagaaaagggaggcagcttttatagtaacatttgcaaaacgagagcaggagattgcagaactgaagtctgcagttagagatttaaaaacacaattaaggccaccatcaatgcagacaaggagattattgcttgatccagcaattcatgaggaatttacacgtttaaagaatcttgtggaggagaaagagaaaaaaataaaggagctacaggacaatgttgctgctgtcaattttactccatccagcaaactggggaaaatgctaatggctaaatgtagaacattgcaagaggaaaatgaagagattgggacgatggcatcagaaggaaaaatccatgagcttggaatgaaaattgcagttctgaagtctcagaacaatgagctcaggaatcaatttgatgttttgtacaaacacatggatggtgtaacaaatgatgtggagagatcaaacgaactggtgtccatcctgcaagaggagttagaagctaaggatctagagctgactagattgaaggaggtgcttgcccagaaaggagctactcaggacgcaccggtggagaccagtgacgacgctggaaacggtcaggaggcagattcagatacactgcaagtgaaggcggaaagctaagggagtttaggctttgaagtgtgtttgttgggacttgtgggaaaagtaatatcatgttatgcggtctcatagcatgtctaggttattatatagtaggggaatcactgcacaaaaacatcggcaaacttttatctatgatcgtacatatggctttacaaaagattattttgcattgtagacaacactattatagtgtggattttgaaattagatatataataataatatagatgagtaagctgtgagtaagaaagcctcaaactgattcgctacagatttgcgctggctgaaccagtaatgatctccaacaattca

SEQ ID NO: 213385 - DNA, 1178 bp, Zea Mays
tgcacagtattcatgaactggccatgatcagaccccccctgcatccctggcagcagaaccaagccttattggtggaactggaagctgcaaaatcagaaatcgagaagtggcattcagcatttcagagcattccagctgtaccttctggtaccattccagatcctgtttcagtggtgtcttacctcagtaccctgaagtcatcagaggaatcattgaaggagcagctggagaaagcaaagaaaagggaggcagcttttatagtaacatttgcaaaacgagagcaggagattgcagaactgaagtctgcagttagagatttaaaaacacaattaaggccaccatcaatgcagacaaggagattattgcttgatccagcaattcatgaggaatttacacgtttaaagaatcttgtggaggagaaagagaaaaaaataaaggagctacaggacaatgttgctgctgtcaattttactccatccagcaaactggggaaaatgctaatggctaaatgtagaacattgcaagaggaaaatgaagagattgggacgatggcatcagaaggaaaaatccatgagcttggaatgaaaattgcagttctgaagtctcagaacaatgagctcaggaatcaatttgatgttttgtacaaacacatggatggtgtaacaaatgatgtggagagatcaaacgaactggtgtccatcctgcaagaggagttagaagctaaggatctagagctgactagattgaaggaggtgcttgcccagaaaggagctactcaggacgcaccggtggagaccagtgacgacgctggaaacggtcaggaggcagattcagatacactgcaagtgaaggcggaaagctaagggagtttaggctttgaagtgtgtttgttgggacttgtgggaaaagtaatatcatgttatgcggtctcatagcatgtctaggttattatatagtaggggaatcactgcacaaaaacatcggcaaacttttatctatgatcgtacatatggctttacaaaagattattttgcattgtagacaacactattatagtgtggattttgaaattagatatataataataatatagatgagtaagctgtgagtaagaaagcctcaaactgattcgctacagatttgcgctggctgaaccagtaatgatctccaacaattca

SEQ ID NO: 213386 - DNA, 836 bp, Zea Mays
atttgcttcgttccatcggattaagcactttgagagcgctagatacgtgtcatatcacataaacaatggtgaaggctgttgctgtgcttggtagcagcgatggtgtcaagggcaccatcttcttcacccaagagggagatggccctaccactgtcaccggaagtgtctctggcctcaagcctggcctccatgggttccatgtgcatgcacttggtgacaccaccaatggctgcatgtcaactggaccacactacaatcctgcgagcaaggaacatggagcaccagaagatgagaaccgccatgccggtgatcttggaaatgtgacagctggagcagatggtgttgcaaacattaatgttaccgacagccagatcccactgactgggccaaactcaatcattggcagagctgttgttgttcacgctgatcccgatgatcttggaaagggtggacacgagctcaggaagagcaccggaaacgctggcggccgtgttgcttgtgggatcatcggactccagggctgaactgaaacaaatggtcgttggacttcgggggcgcctgggagtgccgtcaccagcaggctagaataacatcccgaagacatcgtgaaataataataataagagcgcctgatatgtgatcagtggtgtactcgccattaagcacctgtggcaaccgatgagctgaactgtgttggactgttggctaaaatgctggttcgcctgagcatgtgtcacatgtctgtcggttttgatggcattccgaccgtttcgttgtgctttgcgcttacgtgcgtgttgctgcaaccaatggtggtgactcggttttgatacgca

SEQ ID NO: 213387 - DNA, 1458 bp, Zea Mays
agcgcccgccgagtcgctctcgcctgcctccagccccgctctcgcctcctgctgggcgctatcgccctcactatagcctgcattggcacaagcctaacatggactgctaaaaaacctttgacagcctggcggcaaaaccctccccaatacccatttctcgcaaatccccgccacccccatttccaccgccagattcggtgccgtcaggatcgatttcttgtgcatcttggagcatctacaaggggtgggcgactcagcaaaatctgctggcatctcctctcttttcttgcatcgaattttgtaattgccgactgaaccgtgcagagaagtcttgacaagcgcatgggcggaggtggaaatggggaatcgtgcgatctcctccaagtcctttttgagggggccttggctggaggagctgctggtgttgttgttgaaacagctttatatcctattgatacaataaagaccaggcttcaggctgcacaaggcggaagtaaaattcaatggaaaggagcaattggaggggctgcttcttctctcattcgtgttcccacggaggtggttaaacaaagaatgcaaatgagtcagtacaagactgcacctgatgccgttcgccttatccttgctcaagaaggaattaaaggtctttatgctggctatggttcctttctcctgcgagatctgccatttgatgccattcaattttgcatatatgagcaactccgaattggttatcgattaacggctaagagggagttgcacgacacagagactgcaattattggtgcttttgctggtgccattactggcgctttaaccacacccctcgatgtcatgaagacaagattgatgattcagggacaaacaaaccaatatagaggattcattgactgtgctcaaactatcatgcgagaggaaggtgctggcgcattttttaagggtatcgagccaagggtactatggattggcattggcgggtcgatcttctttgctgttctggagaaaacaaaatcggttctagctgagaggaatacccgtaggtgagaggatgaacgaaagctcttggcatcgtgatcatttccctatggcacgaggcggaaatgcgcctggccagattttggagccccagtttcccattctattctgttccgtttgagctacgttgatggagactcatgttgcgtgatattccctctgtttttttattcgtcgctttttagtttaaaaataaactagcagttgacaaatattcgagaacgagataatactagctaagatagttggccttttcaggcattacgatgagcctagagtaaggtaacgtagaaacagcaacaagcaaactagcactacaacgatagtaaggctgtcttctatcttttatttcaaatattacttgtgaactgtataatctataatacaaaataaagttttacgtgactgcgtgatcaaagccag

SEQ ID NO: 213388 - DNA, 1593 bp, Zea Mays
agcgcccgccgagtcgctctcgcctgcctccagccccgctctcgcctcctgctgggcgctatcgccctcactatagcctgcattggcacaagcctaacatggactgctaaaaaacctttgacagcctggcggcaaaaccctccccaatacccatttctcgcaaatccccgccacccccatttccaccgccagattcggtgccgtcaggatcgatttcttgtgcatcttggagcatctacaagggagaagtcttgacaagcgcatgggcggaggtggaaatggggaatcgtgcgatctcctccaagtcctttttgagggggccttggctggaggagctgctggtgttgttgttgaaacagctttatatcctattgatacaataaagaccaggcttcaggctgcacaaggcggaagtaaaattcaatggaaaggcatgtatgatgggttagctggaaatattgtcggtgttcttcccgcttctgcaatttttgttggagtatatgaaccagctaaaagaaaactactggaattgtttcctaaaaatttgagcgctattgctcatttgactgcaggagcaattggaggggctgcttcttctctcattcgtgttcccacggaggtggttaaacaaagaatgcaaatgagtcagtacaagactgcacctgatgccgttcgccttatccttgctcaagaaggaattaaagggctatggttcctttctcctgcgagatctgccatttgatgccattcaattttgcatatatgagcaactccgaattggttatcgattaacggctaagagggagttgcacgacacagagactgcaattattggtgcttttgctggtgccattactggcgctttaaccacacccctcgatgtcatgaagacaagattgatgattcaggtggatcttgagactgcatgaactcttggacctgatggcactttttagggaccactgattatttcgaagtttcttctgattccagggacaaacaaaccaatatagaggattcattgactgtgctcaaactatcatgcgagaggaaggtgctggcgcattttttaagggtatcgagccaagggtactatggattggcattggcgggtcgatcttctttgctgttctggagaaaacaaaatcggttctagctgagaggaatacccgtaggtgagaggatgaacgaaagctcttggcatcgtgatcatttccctatggcacgaggcggaaatgcgcctggccagattttggagccccagtttcccattctattctgttccgtttgagctacgttgatggagactcatgttgcgtgatattccctctgtttttttattcgtcgctttttagtttaaaaataaactagcagttgacaaatattcgagaacgagataatactagctaagatagttggccttttcaggcattacgatgagcctagagtaaggtaacgtagaaacagcaacaagcaaactagcactacaacgatagtaaggctgtcttctatcttttatttcaaatattacttgtgaactgtataatctataatacaaaataaagttttacgtgactgcgtgatcaaagccag

SEQ ID NO: 213389 - DNA, 1605 bp, Zea Mays
agcgcccgccgagtcgctctcgcctgcctccagccccgctctcgcctcctgctgggcgctatcgccctcactatagcctgcattggcacaagcctaacatggactgctaaaaaacctttgacagcctggcggcaaaaccctccccaatacccatttctcgcaaatccccgccacccccatttccaccgccagattcggtgccgtcaggatcgatttcttgtgcatcttggagcatctacaagggagggggccttggctggaggagctgctggtgttgttgttgaaacagctttatatcctattgatacaataaagaccaggcttcaggctgcacaaggcggaagtaaaattcaatggaaaggcatgtatgatgggttagctggaaatattgtcggtgttcttccactgcaggagcaattggaggggctgcttcttctctcattcgtgttcccacggaggtggttaaacaaagaatgcaaatgagtcagtacaagactgcacctgatgccgttcgccttatccttgctcaagaaggaattaaaggtctttatgctggctatggttcctttctcctgcgagatctgccatttgatgccattcaattttgcatatatgagcaactccgaattggttatcgattaacggctaagagggagttgcacgacacagagactgcaattattggtgcttttgctggtgccattactggcgctttaaccacacccctcgatgtcatgaagacaagattgatgattcaggtggatcttgagactgcatgaactcttggacctgatggcactttttagggaccactgattatttcgaagtttcttctgattccagggacaaacaaaccaatatagaggattcattgactgtgctcaaactatcatgcgagaggaaggtgctggcgcattttttaaggtaaaacttttgcattgcaatagacgcagtaacaagaacttgcacattgatgatcagaaacaacagtcatttacatcacgtcacatttcagactccgtgtgataccacattcgaagcatctttgcatgtttatgtcttctgttgctatctttctggttgcagggtatcgagccaagggtactatggattggcattggcgggtcgatcttctttgctgttctggagaaaacaaaatcggttctagctgagaggaatacccgtaggtgagaggatgaacgaaagctcttggcatcgtgatcatttccctatggcacgaggcggaaatgcgcctggccagattttggagccccagtttcccattctattctgttccgtttgagctacgttgatggagactcatgttgcgtgatattccctctgtttttttattcgtcgctttttagtttaaaaataaactagcagttgacaaatattcgagaacgagataatactagctaagatagttggccttttcaggcattacgatgagcctagagtaaggtaacgtagaaacagcaacaagcaaactagcactacaacgatagtaaggctgtcttctatcttttatttcaaatattacttgtgaactgtataatctataatacaaaataaagttttacgtgactgcgtgatcaaagccag

SEQ ID NO: 213390 - DNA, 692 bp, Zea Mays
accaatatgctggtggttttgactttacaggtgccattactggcgctttaaccacacccctcgatgtcatgaagacaagattgatgattcagggacaaacaaaccaatatagaggattcattgactgtgctcaaactatcatgcgagaggaaggtgctggcgcattttttaagggtatcgagccaagggtactatggattggcattggcgggtcgatcttctttgctgttctggagaaaacaaaatcggttctagctgagaggaatacccgtaggtgagaggatgaacgaaagctcttggcatcgtgatcatttccctatggcacgaggcggaaatgcgcctggccagattttggagccccagtttcccattctattctgttccgtttgagctacgttgatggagactcatgttgcgtgatattccctctgtttttttattcgtcgctttttagtttaaaaataaactagcagttgacaaatattcgagaacgagataatactagctaagatagttggccttttcaggcattacgatgagcctagagtaaggtaacgtagaaacagcaacaagcaaactagcactacaacgatagtaaggctgtcttctatcttttatttcaaatattacttgtgaactgtataatctataatacaaaataaagttttacgtgactgcgtgatcaaagccag

SEQ ID NO: 213391 - DNA, 1006 bp, Zea Mays
cagaacgttcgggtgtacttgttgcgacgtgagaaacataacattttgattccttgcggtcgcaaaggcaaatcgacacaagcaaatgataaatgtgtcatctatccatcgaatggtcccattccattccaagcaagcggtccaggtgggagaggaggcgccacacccagacgagaggcttcccgagtccaccgccagcacgagtccaccgccggcactttgactcggagccggagattcttgcgaggaactggcagggatctgctgcccatccgcatatcatgctgcaacagtagttcactcgtcggaggaaggcgcatcacacgaactaggtggaaggaaccggacggagcttggagagggcaagcgggcaaggggagtgagtagtggttctcggtgtcttctttaaccactctgtccgatccgctggtgtgtctgcgcgatcctgttgacgaatcaatcgccgggacggttaattaagcattccaatcctcagccatggccgtggacactactcaaccggagtactggctcaactggaggttcttgctgtgcgcgctctgggtctactcctgcatggccttggcattcttcctgattaagaagtacgagggggccagttcaccggacagcaatggcgatgacggtggagacagagaagaggcgttaccacgtgtcagacctggtgttgtttatcttgaagattgctggaagacatgccttgagggtatccaccctggctggctgctggcatttcgcgttgtggccttcttcgttttggcttcgctgctcgtggtcgacatcattactgatggatggagtatcttcctatactacactcagtggacgttcttgcttgtcaccttgtattttggggtatgtagtttgccaatggaactttggcttgcgttttgttttggttatttgtcacttttgttgttatacttaaccttgagtttcagtaactgacactgacatcacatctcactgcactcctgcaacatgg

SEQ ID NO: 213392 - DNA, 928 bp, Zea Mays
ggcaaatcgacacaagcaaatgataaatgtgtcatctatccatcgaatggtcccattccattccaagcaagcggtccaggtgggagaggaggcgccacacccagacgagaggcttcccgagtccaccgccagcacgagtccaccgccggcactttgactcggagccggagattcttgcgaggaactggcagggatctgctgcccatccgcatatctagttcactcgtcggaggaaggcgcatcacacgaactaggtggaaggaaccggacggagcttggagagggcaagcgggcaaggggagtgagtagtggttctcggtgtcttctttaaccactctgtccgatccgctggtgtgtctgcgcgatcctgttgacgaatcaatcgccgggacggttaattaagcattccaatcctcagccatggccgtggacactactcaaccggagtactggctcaactggaggttcttgctgtgcgcgctctgggtctactcctgcatggccttggcattcttcctgattaagaagtacgagggggccagttcaccggacagcaatggcgatgacggtggagacagagaagaggcgttaccacgtgtcagacctggtgttgtttatcttgaagattgctggaagacatgccttgagggtatccaccctggctggctgctggcatttcgcgttgtggccttcttcgttttggcttcgctgctcgtggtcgacatcattactgatggatggagtatcttcctatactacactcagtggacgttcttgcttgtcaccttgtattttggggtatgtagtttgccaatggaactttggcttgcgttttgttttggttatttgtcacttttgttgttatacttaaccttgagtttcagtaactgacactgacatcacatctcactgcactcctgcaacatgg

SEQ ID NO: 213393 - DNA, 701 bp, Zea Mays
attccattccaagcaagcggtccaggtgggagaggaggcgccacacccagacgagaggcttcccgagtccaccgccagcacgagtccaccgccggcactttgactcggagccggagattcttgcgaggaactggcagggatctgctgcccatccgcatatcggacggttaattaagcattccaatcctcagccatggccgtggacactactcaaccggagtactggctcaactggaggttcttgctgtgcgcgctctgggtctactcctgcatggccttggcattcttcctgattaagaagtacgagggggccagttcaccggacagcaatggcgatgacggtggagacagagaagaggcgttaccacgtgtcagacctggtgttgtttatcttgaagattgctggaagacatgccttgagggtatccaccctggctggctgctggcatttcgcgttgtggccttcttcgttttggcttcgctgctcgtggtcgacatcattactgatggatggagtatcttcctatactacactcagtggacgttcttgcttgtcaccttgtattttggggtatgtagtttgccaatggaactttggcttgcgttttgttttggttatttgtcacttttgttgttatacttaaccttgagtttcagtaactgacactgacatcacatctcactgcactcctgcaacatgg

SEQ ID NO: 213394 - DNA, 760 bp, Zea Mays
attccattccaagcaagcggtccaggtcggaaaaacttgctccatctcatcctcatcgcgtctcccagatcacctgaccccgtggtgggagaggaggcgccacacccagacgagaggcttcccgagtccaccgccagcacgagtccaccgccggcactttgactcggagccggagattcttgcgaggaactggcagggatctgctgcccatccgcatatcggacggttaattaagcattccaatcctcagccatggccgtggacactactcaaccggagtactggctcaactggaggttcttgctgtgcgcgctctgggtctactcctgcatggccttggcattcttcctgattaagaagtacgagggggccagttcaccggacagcaatggcgatgacggtggagacagagaagaggcgttaccacgtgtcagacctggtgttgtttatcttgaagattgctggaagacatgccttgagggtatccaccctggctggctgctggcatttcgcgttgtggccttcttcgttttggcttcgctgctcgtggtcgacatcattactgatggatggagtatcttcctatactacactcagtggacgttcttgcttgtcaccttgtattttggggtatgtagtttgccaatggaactttggcttgcgttttgttttggttatttgtcacttttgttgttatacttaaccttgagtttcagtaactgacactgacatcacatctcactgcactcctgcaacatgg

SEQ ID NO: 213395 - DNA, 2226 bp, Zea Mays
tcaatacagcagttcaaagatcctcacaattctgcagcacacacactgtacaaatacatcaccataagtcactcttattacagcccccacctttctccatcactcaaaaacacacacaagaggccggagatatcttcagcagtcagcaccacagttcagtgattttctggtgggaagctgttgctgattagtgcatatcaggttccacctggattctctctggtctagactttaactgggcagagaggctcccagcttctcagctcgactgatgctttttacatgttaaattccttttgtccctgaaaaaattgcatatatggtctcttttatatttgtctattatattgataactcacaatatgattcttctgttgaaatgcttgtacatggtcccttaagatcattcaatgatagccagaactcagaagggcagagtataattcataattgatgccgtgcatgcagctactggatgctttcttgaagacatgcaagcttgttgcaggtataagaagtagacaaaaagagaacttgcaagatacaacataagttggaatagctagattactgtgagttcgtgacgttagtttctaccacaccgtgactccctaactcttcttagaagacagcaaaagcagttaactataaccacaaatgaaggggcatcgctctctcccgtgggcggctcgggaggcgaaaccctagccgctgccccactctcccccgccctctccgtctcgccgctgccagaggggctggccgggttggccgcgcgggcccccatgacggcggcggcgaggcatcccctgttggcgttgagagctcccagattcgtgcggggaaggagctcgtggccaaggcttgatcttggtggccgtggtggtgctgtgcgacgtcgtgggcacctcatggggagattcgtgctgtgcggcgaggcatcccctgttggcgttccggagttttggcctgacaggttgtgctgggagcttcttggcgaaagcctcgcgacggtgacgccatgggcgcggttttccctcataagggcgtcgcacggtgaaagcccgatccatcttggacatgcgatgatggcgtcctcgatgtcactgcctaggcgccgtttttgaagttcgtctcggccacgttgttctcttttggttgcttttgcttctcggcgtccgatatatgggtggaggtgtggtcctccagcgtgaagtcggagctgctacatcagttaatgtgggtcgacaacgatgacataaggcgtgcccccttcttcgcggaccagtttgcttcggaggctgagcgttttgccgaggcagggcggaggatcaagtttggaagtcctattggtgaagaatcggaactgcctcgctcgggtgtctagaggcttggcaacgacgccgcgccgcggtcttcatccttctgtgccgtttttggctatgtacgcatggcagactgctattactactatgcccatcgcttggttcttttcatgagcaacagatgcctggaactgaggtatggaaacttcgtcatgaactgccatttgcatgggaggagaagggcctcaatgaactatgtggcatgctgaaaatagtagatggtgacataaagaaatgcgctgacaactgtggacatgtgatggcggtccaaaacaaacccaactttaagaaggataaatctcaaaagaagaatgacaaggctaaagatacgatctccaagccaaaccaaaagcccaaggctggaccagttgtagatgctgaatgtttttattgcaaagcagtacttggcctctattaagcatcgcgatggtaagtatacagtcgtagcagatatacttgctattcacattacagaaatttttattgctgattcttatactaattattgggtatttgatagcggatcgtttgcccatatttgcaattcgatgcaaggaattataaaaagtagaagcgtgaaaggataagttgattatcgcgtcgacaataatgcaagagttgttgctttgaccatcaggacgatgcaactccacctcccatcagtatttattttagagttaaataattgtcatctagtttctagtatgagtcgaaacattttatctccttcatgtttaatgaaggatggttattcatttgtgagtgaaaacaatggttgtgtgatctctaagaatgacatgtttgttgcttttgcatccattatgaatgagttatttatttt

SEQ ID NO: 213396 - DNA, 1470 bp, Zea Mays
atcctcacaattctgcagcacacacactgtacaaatacatcaccataagtcactcttattacagcccccacctttctccatcactcaaaaacacacacaagaggccggagatatcttcagcagtcagcaccacagttcagtgattttctggtgggaagctgttgctgattagtgcatatcagctactggatgctttcttgaagacatgcaagcttgttgcaggtataagaagtagacaaaaagagaacttgcaagatacaacataagttggaatagctagattactgtgagttcgtgacgttagtttctaccacaccgtgactccctaactcttcttagaagacagcaaaagcagttaactataaccacaaatgaaggggcatcgctctctcccgtgggcggctcgggaggcgaaaccctagccgctgccccactctcccccgccctctccgtctcgccgctgccagaggggctggccgggttggccgcgcgggcccccatgacggcggcggcgaggcatcccctgttggcgttgagagctcccagattcgtgcggggaaggagctcgtggccaaggcttgatcttggtggccgtggtggtgctgtgcgacgtcgtgggcacctcatggggagattcgtgctgtgcggcgaggcatcccctgttggcgttccggagttttggcctgacaggttgtgctgggagcttcttggcgaaagcctcgcgacggtgacgccatgggcgcggttttccctcataagggcgtcgcacggtgaaagcccgatccatcttggacatgcgatgatggcgtcctcgatgtcactgcctaggcgccgtttttgaagttcgtctcggccacgttgttctcttttggttgcttttgcttctcggcgtccgatatatgggtggaggtgtggtcctccagcgtgaagtcggagctgctacatcagttaatgtgggtcgacaacgatgacataaggcgtgcccccttcttcgcggaccagtttgcttcggaggctgagcgttttgccgaggcagggcggaggatcaagtttggaagtcctattggtgaagaatcggaactgcctcgctcgggtgtctagaggcttggcaacgacgccgcgccgcggtcttcatccttctgtgccgtttttgggtatagacattgttggtttcctcatttggccttgtgttgctcgttttggagagtcggtgttgctcgtcctttgtgttgagctcgaccacaatgatcttgtatgagccttgtgtgttgggctaccattgtctaggttgcttgtgcaccctgtgtaggtaattgactcggttttccttaaaactaggtcaattcctttcttctttttaattgagaagtagagctcctgtcatcacattaaaaaaacatcaacactgatttattaaatggttatgtttcctgcagaatattttttatgaagtgcattgactagttattg

SEQ ID NO: 213397 - DNA, 683 bp, Zea Mays
attattgtccgtcgtatagcagctacaatgtcgcctctccatcgttcactgcatccccttcctcctctcccctcccgttttcgaggccccgttttcttctctctcacactagatggaggggctctatgcgcagacgcctgttgcctggcatcccccgcccccgctccagctgctctccggaagattccaaagtcactgttggcttcctcgctacgctggtcttggcgatgacagaggcagcgtccgcccacttttcccctcgcgcggccacgacggatggtagtcggatccgattgatcgacctggaagaatctccaccgtcctgctttaccgagcgagatgctcggatcctgcagcgaagggagagagtgcatcgccgccgccatccgtgtccgccagtgcttcatctccgaagcgtcgtctgaaggggatacatcgatgatcgatcgacacccagatctctcatacactgtctgcttctttggacctacaagttttgaggtgtttgtattttatggttcacacaacatgcaaagtggattggactaaggttctgaggatgcaactatggttgagcaaaaaactcgtaatccaaactcggaatacccaaatttcgtttggtaatttcgggtagcaacttataaagtacgaacttaatttagatggctcgatggcgactggag

SEQ ID NO: 213398 - DNA, 2602 bp, Zea Mays
cacagatcttgtgaaatagctcagttgcatgctgaagcgctcgttaaagcccaagatggttatagagaaactacaggtcacttgggaatgacattgattaagctggcaaaatttgaaagagagcaggcaacatgtaactccctaagaagacggtctggtgaaatccataactttgcaaattctgttttgaagatgagcaggtcacagataaaattgaactctgaaattgtgaaacacctgggtagtatccatgaatatttggagatgatgatatcagttcatcatgcatttacagatcgctctaatgctttacattacgtgcaaattctgtcagcagatttgttttccttgcatatcagggcaaggagacttgaatcgtcgtcagcaagagatatggggcacgagtggtcaacatatcagaaagtagaggggttgaaagaaacaataagatcagcggaagcagccaaaagtgatgcagttagagaatatgaaagtattaaggaaaacaacaagattgaaataaaaagatttgacaaggaaagacgccacgatttcatcgagatgctgaaaggttttgtgataactcaggtgtcttattcagaccattttgctaacatgtggacaaaggtaacggaggaaacagaagtatatgcaaacaggagcagctgatgtacgtatagggagtgtagaatagttgattttgatctatttaatttgctccaacatccaacgacaacaatcattcttattcttccccagttttgtcaccttgagttggttgtaaacttgtaatgccacatgagtcatgtgcagtcgtgaaattgggtcccggcagatgagcttctgtgctacccgagaactggcatgtgtatgtgagaaccatacgcaaacgtggtttaggttgaaaaataatggcgatactagaaatttgacagcgtagttctgtaaaggaaggctcgcaggtccggctgttgcaaacgccaaaaagttctctctagagccagatgtttctcagagagtgatcaggggcgatatggtaggcaagatagtttgtttctcgaagaacttctttgtttcgtactggccagcagccagcagccagctatgtgctctggtatgttcgtccagtatactcgtgctccgtgcatgagaaagaggtgtcatcacgctgtgatgactagccacgtgtgcatggatactaatgcacgtggcatctattccaggagctgtctgcgcgtatatagggagcgcacttatctccacttctgtctgtgcgacaagcgactttatttcaagaagacagaagaagggagagtcgtactgaggtgtaagaatggcgagtgcacaggcagtggggcaaggagaacgaggccacttcgttctgaagagcggacacaccattccggccgttggtctaggcacttggagggccggctcagataccgctcactctgttcggaccgccatcgccgaggtcggtagaggacttaaagctgcgatggagggcgggatcaacaggaaagatttgtttgtgacgtcgaagctatggtgcaccgagctggctcctgatagggttcggccagcactcgagaaaacactcaaggacttgcagctggattacctggatctctaccttatccactggcccttcaggctgaaagacggggcgcacatgcccccggaagccggggaggtgctggagttcgatatggaaggggtgtggagggagatggaaggcctcgtgaaagacgggctcgtcaaggatataggtgtctgcaattacacggtcgccaagctcaaccgcctgatgcggtcagcgaatgttccaccggcagtgtgccagatggaaatgcaccctgggtggaagaacgacaggatctttgaggcatgcaagaagcatgggatccatgttactgcttactctccgctgggttcgtcagagaagaacctagcgcacgacccgctcgtcgaaaaggtagccaacaaactggacaagaccccggggcaggtgctcctcaggtgggcgctccagagggggacaagcgtcatccctaaatcgaccagggacgaaaggatcaaagagaacatccaggtgttcgggtgggagatccctgaggaggacttcagggccctgtgcggcatcaaagatgagaagcgcgtgctgaccggagaggagctcttcgtcaacaagacccacgggccgtacaagagcgcaaccgaggtgtgggaccacgaggactgagctgagctgccgtgccgccggatgcctcccactcccacctgatgaaccagaataaaggataccgacgcacctgtcagtcacctccttccccgtgccttgtgagagcggcagcctctcgcacagggaagatgctctgtgagagcagcagcctcgcacgagaaagatgtagaagagtgtgtgcgcaacacactcctgtactgtacgatagactgaataataaagaagaaaacgatccacatctcatgcaaactgcaatctgcagagtgcaacgcagcgccggccgaaccaagtttttgtaggatcgaaatgtgctgtctcgcctcgcgcaccaaagcactatgtttggaccactgaaaaaac

SEQ ID NO: 213399 - DNA, 1108 bp, Zea Mays
ctggcttcttatatctagaccagtagccgccacttctgcctctttttataccagtcccggtgctgcggaacacacagagcgaggtatctagagacagagagggctgtgtggagagagagagagagagagatcgatggagatgagagcgaagaagagcagcagaagcagcacgagcaacaccagcggcagcacgacgaccacggcggtggagaggaaggagatcgagaggaggaggaggcagcagatgaagagcctctgcgccaagctcgcctccctcatcccgaaagaacactactcctccaaggatgctatgacccagctgggtagcctagacgaggcagccacgtacataaagagactcaaggagagggtggaggagctgcggcacaagagcgcctctgcacggctcttggccgctggcagtggcacgagacgaggcggaggaggaggaggcgcctccacatcgtcggcagcgacgaccacggcgagcggtggcgcaggatcatctgaagaagccggccggcgggaggacgacatgccgccggcggtggtagaggttcggcagcacaatgacgggtcaagcctggacgtggtgctcatcagcagcgcggcgcgacccttcaagctgcacgaggtggtcaccgtgctggaggaagaaggcgccgagaccgtcaacgccaacctctccgtcgccggcaccaaaatcttctacaccatccactgcaaggccttttgcccaagaatcggtatagatgtttcaagagtttctgaaagattaagagcattgggatgatactagactgatatacatattgctaattatatatgaccaaggcgcatatccttttttatgctgtctcattctttactgtgcgaaaagtctccgaggtccattcgttaccaaaagttataatacatgatagaaatttttttttttgcaaacacaactgtagattgttacgttgtaagcaaggttgctacagtttgtagtatatgaatatttcgatcgataaaataggaataaaacaaaatcaacttaacctttcaaatggaaaggagagcatgcagattgcccccgtgtgatgatcatatgagcgccggaccgccg

SEQ ID NO: 213400 - DNA, 3237 bp, Zea Mays
gcgatccgttgcaatttgcacttcacactctcactggcaactgcagcagtgaagatgcatgcgtctcggcgtgcctggctacctgttcgcttcccctagctagcagctgtagcagaactagaggccacgcacgctctgctcaggttgcctgcatcccaggaaagctccatgccatctgtgccaagcaccgccatgtactctagcggagcgggagctgggagccacaagtctgcagatttgccggccggggagggacctgcagccctgcacggccgcacgcgcgccacacatatggacggttcctgatgcgtcggcattcattctgccgccgccgtgcgtctacctctctgtcgtctcgtctctgcgcgcacccggcctgcttgcctccaacacctatatatacgtgcggcgcgcgcgcttcacaacaccacagcacaggttacaacaagtagcttgcacttgactacgtcgatcgtaggcggcgacgaccacgacgacaatggcgcggtgctctacgtgcgatcgcaatgtgttccgcccgtggtgcttcttctttgaacccccgctgacggtttcaccgtatccggccaggtttctcgaggttcatggagacgacggacgagttcgcggtgccgccacgtcccgcgctcgtgcacccggacgccgacggcgttcgaaccccgtcggccctcggcccgctctcccccgaggacccgccacccgcgttcatggagcgagattggcgacacggcggcgataacacggccgcgtatccagggtgctcgccgttccagccgtccgcggccgggcgcccggtctcgatcagcctgccggcgtcgccgacaggcgggttcgacatctccagcaggacggaggcggagctgcagcgggatgccgccgccgtcacggacgcgccgccgccgaggatgatgatgctgccgccgttcgccccggcgccggccatggctctcgagcagcctggcaaggtggtgttccggtcccagccgatccccgctgcgccgccggtaggtgacgggggccacgacgacgagttcggccgcagcgcgccggcggccatggccctcgagcagcctggcaaggtggtgttccggtcccagccgatcatccccggtgcgcctccggagggcgacggcgccgcccggggccacgacgacttcggccggagcgcgccggcggccaagacgcgcagggacagccgggacaccagctacgactcgttcaagacgtggtcgggcaagctggagaagcagatcgccacgcacctgctcggcagcagcctgcagcagcaaccggagcacggggaggagccggaggaagacgacgcggcgagcgaccgccgcaactcctccatgcccaaagtgcagcgcttcttcgccgcgctggaaggccccgagctcgacaagctgaggtcctcggaggagctgatcctgccgtccgacaagacgtggccgttcctgctccgtttcccggtgtcggcgttcggcatgtgcctgggcatgagcagccaggcgatcctgtggaagcggatcgccatctcggcgtcgacgcggttcctgcacatcacggtgaagatcaacctggtgctgtggtgcgcctcggtggcgctgatggcggccgtgtcggcgctgtacggctgcaagctggtgttgtacttcgaggcggtgcggcgggagtactaccacccgatccgcgtgaacttcttcttcgcgccgtggatcgcgtgcctgttcctggcgatcggcgtgccggacgtggtggcggccacgctcccgcactggctgtggtacgtgctgatggcgccgatcgtgtgcctggagctgaagatctacgggcagtggatctcgggcgggcagcggcggctgtcccgcgtggcgaacccgtcgaaccacctgtccatcgtgggcaacttcgtgggcgcgctgctgggcggcatcatggggctgaaggagggtcccatgttcttcttctccgtggggctggcgcactacatggtgctgttcgtgacgctgtaccagcggctgccgacgagcgagacgctgccccgcgacctgcacccggtgttcttcctgttcgtggcggcgcccagcgtggcgtgcctggcgtgggcgcgcatcaccggcgagttcggctacggctcccgcgtcgcctacttcatcgccatgttcctgtacgcgtcgctggccgtgcgcatcaacctgttcagagggttcagcttctcgctggcgtggtgggcctacacgttccccatgaccagcgcggcgatcgcctccatccgctactcgtccgaggtgaagaacgccttcacgcagtgcatgtgcatcgggctggccgcggcggccacgctggccgtggcggcgctcttcctcgccacgctgctgcacgcggtggtgtaccgggacctcttccccaacgacatctccatcgccatcacggagcgccggcgcagcaagcccctcgtcggggaaaagatgctgctccgcctgcgcagcggcaagaaggtgcagcaggcgctctccaccgcccccgccgacgccgccgcggacctggaggccgcgcgcgccgccacgacgacgtcgtacacgtagacggggggtgacggatgaaccgggcgggggattgatagctccagcgtttgcttggtgcagttattgttcgtattatattggctgggctgccgtatggggcaggcagctcgtgcgctctcggcagccggcactcaaatcggcaggaggcaaaacaagatacgtggctggattctggatgatacgaatacgattgcaaggtccatctacggggtgaccatatacgtacgtacgtacagatacatatgcgagagttgtttatactgcagggttccttttctcatgaaaagaaaaaaaacatcagacgtgaactacagtgagaatgtatgcatattacgtagagaaatgacatctacaaagataaatgctctggctcttgttatcccgttgtttggcaacgcgtggaactggaacgcaatttgtgctcaatttggcccattacctcttctaagtaatccattgcaggtttctcggctgctgggccgacagtgttttttttttctgttagtcaaaccactgcgctgtggtgggcttggtggtcttggccccatacctatttcgttctctttttgttaaacatagatgacaccacagacagatgagaaacgaaacagtaataaacagactttttttt

SEQ ID NO: 213401 - DNA, 3192 bp, Zea Mays
agacaagacgagcaataagtgtgcgatccgttgcaatttgcacttcacactctcactggcaactgcagcagtgaagatgcatgcgtctcggcgtgcctggctacctgttcgcttcccctagctagcagctgtagcagaactagaggccacgcacgctctgctcaggttgcctgcatcccaggaaagctccatgccatctgtgccaagcaccgccatgtactctagcggagcgggagctgggagccacaagtctgcagatttgccggccggggagggacctgcagccctgcacggccgcacgcgcgccacacatatggacggttcctgatgcgtcggcattcattctgccgccgccgtgcgtctacctctctgtcgtctcgtctctgcgcgcacccggcctgcttgcctccaacacctatatatacgtgcggcgcgcgcgcttcacaacaccacagcacaggttacaacaagtagcttgcacttgactacgtcgatcgtaggcggcgacgaccacgacgacaatggcgcggtgctctacgtgcgatcgtttctcgaggttcatggagacgacggacgagttcgcggtgccgccacgtcccgcgctcgtgcacccggacgccgacggcgttcgaaccccgtcggccctcggcccgctctcccccgaggacccgccacccgcgttcatggagcgagattggcgacacggcggcgataacacggccgcgtatccagggtgctcgccgttccagccgtccgcggccgggcgcccggtctcgatcagcctgccggcgtcgccgacaggcgggttcgacatctccagcaggacggaggcggagctgcagcgggatgccgccgccgtcacggacgcgccgccgccgaggatgatgatgctgccgccgttcgccccggcgccggccatggctctcgagcagcctggcaaggtggtgttccggtcccagccgatccccgctgcgccgccggtaggtgacgggggccacgacgacgagttcggccgcagcgcgccggcggccatggccctcgagcagcctggcaaggtggtgttccggtcccagccgatcatccccggtgcgcctccggagggcgacggcgccgcccggggccacgacgacttcggccggagcgcgccggcggccaagacgcgcagggacagccgggacaccagctacgactcgttcaagacgtggtcgggcaagctggagaagcagatcgccacgcacctgctcggcagcagcctgcagcagcaaccggagcacggggaggagccggaggaagacgacgcggcgagcgaccgccgcaactcctccatgcccaaagtgcagcgcttcttcgccgcgctggaaggccccgagctcgacaagctgaggtcctcggaggagctgatcctgccgtccgacaagacgtggccgttcctgctccgtttcccggtgtcggcgttcggcatgtgcctgggcatgagcagccaggcgatcctgtggaagcggatcgccatctcggcgtcgacgcggttcctgcacatcacggtgaagatcaacctggtgctgtggtgcgcctcggtggcgctgatggcggccgtgtcggcgctgtacggctgcaagctggtgttgtacttcgaggcggtgcggcgggagtactaccacccgatccgcgtgaacttcttcttcgcgccgtggatcgcgtgcctgttcctggcgatcggcgtgccggacgtggtggcggccacgctcccgcactggctgtggtacgtgctgatggcgccgatcgtgtgcctggagctgaagatctacgggcagtggatctcgggcgggcagcggcggctgtcccgcgtggcgaacccgtcgaaccacctgtccatcgtgggcaacttcgtgggcgcgctgctgggcggcatcatggggctgaaggagggtcccatgttcttcttctccgtggggctggcgcactacatggtgctgttcgtgacgctgtaccagcggctgccgacgagcgagacgctgccccgcgacctgcacccggtgttcttcctgttcgtggcggcgcccagcgtggcgtgcctggcgtgggcgcgcatcaccggcgagttcggctacggctcccgcgtcgcctacttcatcgccatgttcctgtacgcgtcgctggccgtgcgcatcaacctgttcagagggttcagcttctcgctggcgtggtgggcctacacgttccccatgaccagcgcggcgatcgcctccatccgctactcgtccgaggtgaagaacgccttcacgcagtgcatgtgcatcgggctggccgcggcggccacgctggccgtggcggcgctcttcctcgccacgctgctgcacgcggtggtgtaccgggacctcttccccaacgacatctccatcgccatcacggagcgccggcgcagcaagcccctcgtcggggaaaagatgctgctccgcctgcgcagcggcaagaaggtgcagcaggcgctctccaccgcccccgccgacgccgccgcggacctggaggccgcgcgcgccgccacgacgacgtcgtacacgtagacggggggtgacggatgaaccgggcgggggattgatagctccagcgtttgcttggtgcagttattgttcgtattatattggctgggctgccgtatggggcaggcagctcgtgcgctctcggcagccggcactcaaatcggcaggaggcaaaacaagatacgtggctggattctggatgatacgaatacgattgcaaggtccatctacggggtgaccatatacgtacgtacgtacagatacatatgcgagagttgtttatactgcagggttccttttctcatgaaaagaaaaaaaacatcagacgtgaactacagtgagaatgtatgcatattacgtagagaaatgacatctacaaagataaatgctctggctcttgttatcccgttgtttggcaacgcgtggaactggaacgcaatttgtgctcaatttggcccattacctcttctaagtaatccattgcaggtttctcggctgctgggccgacagtgttttttttttctgttagtcaaaccactgcgctgtggtgggcttggtggtcttggccccatacctatttcgttctctttttgttaaacatagatgacaccacagacagatgagaaacgaaacagtaataaacagactttttttt

SEQ ID NO: 213402 - DNA, 1190 bp, Zea Mays
gggtgtacgcatagtatgcctttctggctgcagcagcagttggatcttgggaacgtgccatgcattgcatcgttttccctctctcttcactggattcagcgaacacagcggacggcgacggcgacatcggatccatgcagctcaaacaggccaactcggcgcagtggcgagacatgcagcacgtctggggggccacgtggagcctcaccccgggcccgctcgtcgggcccttctccgtgcggctgacgaccctgtcgggcaagcagacgctcacggcccaggacgtcatccccaagaactgggcccccaaggccacctacacctcccgcctcaacttcgcgtagaggccttctgccttggcccgccgcgtatctatcgttctgtgcagtttgatgtcgcgtgaaggggataagctggtatagtagtggataaacctggtgtttagggcccaggtagccctctccgaactggagagagagcgtctgattggtcggcgtgggccgcatgcttcctggaggctggaaatgggagctcgatccggtgaagagcggctggggaaccaaaggcgtgagcgtgacgtgactcctcttcgttttcgatggactcatgcagtgcttatttctgtgttcttctctcttaacttatctattgttgttgttatattttcgtgcccttggtacatgggctgtaacttgctgtcacctatgcgcaccgtaaactataataatcatgtattgttcgttatgttagtcatcaacgactgttgccgttacaaaaaaaaaaagaagcaaagctcgaatgatcagttgcagtggagtgtaacttgtgacttatgcgctacttcagctgctgttgtagccggccgtgctccctttcacagacgctctgttactcgtcatcatagtactaagtggagttgcaactgatcaggctgtatatcaatggcaaatcacactcacgtcggtggtagcaggtcctgtcgtgaagtgctctcatccagattcgtgattttgagacgcgctccggcaacatcctcattcctcagccggattaatcagctgcaaaatcagcggagttgacagaagatgatcatagatcttaacacaatcttaagtgacgttttgaatcaaggtgctgttgttcttttggcaaagggagctatgtaagctgccacgagtggcattcctttt

SEQ ID NO: 213403 - DNA, 350 bp, Zea Mays
tcatgatgttcaatctattttccctgcatgtgactaaccgtctagtggaggatgtgctgaacaatgaaagcttctgtcttgaaacaataggatataagaagcttgcaagtggttttgtgaaggcttttgtgaatcacttgaatcattagttcttttaagaatggttttgtaaagcgttagcaaatatgtgtaaaacacaataagatgtgtggcaaagtcagtgatctagttgtacaattttttgtgtttatgtgatatgtggatatttcattgtggaatgttaatgaactgtgtatgtctatgtgattatgtgtataaaatatatgttttgtggtgcttttgtgataata

SEQ ID NO: 213404 - DNA, 2963 bp, Zea Mays
cgcgtttcaggagcatatacacgctacgtggtgtgacgcttaacagcacggtatacgtggaggaaacggttactatatggccgggaaaaagttttatctttctttaacgcaagaaagaaggcagcaaagtcacacaattattcccccacgggtgaaaaatagaaaaatcaggagccggagaccacccgcgtgctctgctcacacatccttcagcagtcgtcgtcctcgttgataagcaggggaggtggatcactcgaacgaacctaataataagtgagcttccaggtcggggagagggaccgccggtggaaaaactttggaggcgcccaacttccaagatacccactagctccctcccagcctcccaccttgccctttccacccttcgctgatgctagaatgatgggatttttggagctctaagacaagtactactgatccttgcgcttcactcgccctcttgctccctgcgtgttcttgatttggcctcaaaatttgttgcttgttttctcgtgtttgaggtgacatctcggttctaaaaatctgccagatttcttctccctgtttgtatggacaaatttgggaacgaaccctagtctgtgtgtgaagcagccaaagtagtgttcttgcggagcaaagcaaagctaaagcggcagcagttggattcggcacaagcacaataccatcaggtgaacaagagccatttggtcttgggcatggagaagcaatccagcacccggcatggtgccctagagaaattgaagagcttccgggggatagagaagcagagaagcttcaagttcttgtccatggagaagcagcagagcttcaaaaggaacaaggacagcccggggaagcggggtgacaccgcactccaccttgcggcgagggctggcagtgttgcacatgtccagaggatccttgcggagtgtgatccagagctgctggtggagttagctgcccgccagaatcaggacggtgagactgctttgtatgtgtctgctgagaagggccatgtcgaagttgtgtgtgagattttgaaggcttctgatgtgcagtcagctggactcaaggccagtaacagcttcgacgcattccatattgcggcaaagcagggccatttggatgtcttgaaggagctgttacatgccttcccctcactagcaatgacaacaaattctgtaaatgccacagctttggacactgctgcaactcagggccacattgacattgttaatcttctgctagaaacagatgcaagccttgctaggattgcaaaaaataatggaaagacagttttgcattcagcagcaagaatgggtcatgtggaggtggtaactgctctattaaataaggatccagggcttggtttcagaacagataagaagggacaaacagctctacacatggcttcaaaaggcctggcttcaaaaggccagaatgcagaaattctgctcgagttgttgaagcctgatgtctcagttatccatgtagaagacggcaaggggaatagaccattgcatgttgcaactcggaagggaaacaccattatggttcagaccctaatatcagttgaggggattgaaatcaacgcggttaatagagctggagagactgcttttgctattgcagagaaacaaggtaatgaagagctcgttaacatcctgagagaggctggtggagtaactgcaaaagagcaagtaaatcctcctaatccagcaaagcagcttaagcagacagtcagcgatatcaggcacgatgttcaatcacagatcaagcaaacacggcagaccaagatgcaattccagaaaatcaagaagagaatcgaaaagctccacatcggtgggctaaacaacgccatcaactccaacaccgttgtcgcggtgcttatcgccaccgttgcctttgccgccatattccagctccctggtaattttctggaggatatgagtcaggcacatggcccagacatgaccttggggcaagcatggatagccagtgagccagccttcataatcttcttggttttcgacgctctggctctcttcatctcgctcgcggtcgtcgtggtccagacgtctctgatcgtcgtcgaacagaaggccaagaagaagatggtcttcgtgataaacaagctgatgtggctcgcgtgcctctgcatctcggcggccttcatagcgctgacctacgtcgtcgtgggccgagacgacgagtggctggcctggtgtacgatggcgatcggcaccgtcatcatggtggccactctgggttcaatgtgctactgcattgtcgctcacaggatggaggagaagagcatgaggaggatcaggaggacctccacgagccagtcgtggtccatatcgatcgactccgaaacggagctgatgaacagcgagtacaagaagatgtacgccatttaggataggcaacggccatgcttgccatctgagtcctgtatatactggtacccaaagtccatggcattggattgactgagctatattttagtccgtagacatggcacctgtatgtaactgcagacagtctgcagcctccgcccacgaacgtagatagggtgtagccacctttttgttggcaaaatatgaacatttgccaagcacgatgcccctatcttatgctgtatttttgtgggtgcggcaatgaaaaccatgggattgtatctgtatagtagaatagtatggaataagttgaccttgtgtcaaaggttatgtggtcgtgcgtggatgctcttttgatgcgacattaggctggatggagtaggctgagggaaaagaaaagaaaaataacaatggtcacagatgacattttggacttggactggagcagactttgttgaccgttgtggttatgcggcatttgcagccgttctgtaaaaatgaaaatgcggagatgcctatgggctgaccgaaaatttgacaaaatttccgctctttccctggagg

SEQ ID NO: 213405 - DNA, 3002 bp, Zea Mays
cgcgtttcaggagcatatacacgctacgtggtgtgacgcttaacagcacggtatacgtggaggaaacggttactatatggccgggaaaaagttttatctttctttaacgcaagaaagaaggcagcaaagtcacacaattattcccccacgggtgaaaaatagaaaaatcaggagccggagaccacccgcgtgctctgctcacacatccttcagcagtcgtcgtcctcgttgataagcaggggaggtggatcactcgaacgaacctaataataagtgagcttccaggtcggggagagggaccgccggtggaaaaactttggaggcgcccaacttccaagatacccactagctccctcccagcctcccaccttgccctttccacccttcgctgatgctagaatgatgggatttttggagctctaagacaagtactactgatccttgcgcttcactcgccctcttgctccctgcgtgttcttgatttggcctcaaaatttgttgcttgttttctcgtgtttgaggtgacatctcggttctaaaaatctgccagatttcttctccctgtttgtatggacaaatttgggaacgaaccctagtctgtgtgtgaagcagccaaagtagtgttcttgcggagcaaagcaaagctaaagcggcagcagttggtgaggatacaagagatacagaagggcttgttagattctgattcggcacaagcacaataccatcaggtgaacaagagccatttggtcttgggcatggagaagcaatccagcacccggcatggtgccctagagaaattgaagagcttccgggggatagagaagcagagaagcttcaagttcttgtccatggagaagcagcagagcttcaaaaggaacaaggacagcccggggaagcggggtgacaccgcactccaccttgcggcgagggctggcagtgttgcacatgtccagaggatccttgcggagtgtgatccagagctgctggtggagttagctgcccgccagaatcaggacggtgagactgctttgtatgtgtctgctgagaagggccatgtcgaagttgtgtgtgagattttgaaggcttctgatgtgcagtcagctggactcaaggccagtaacagcttcgacgcattccatattgcggcaaagcagggccatttggatgtcttgaaggagctgttacatgccttcccctcactagcaatgacaacaaattctgtaaatgccacagctttggacactgctgcaactcagggccacattgacattgttaatcttctgctagaaacagatgcaagccttgctaggattgcaaaaaataatggaaagacagttttgcattcagcagcaagaatgggtcatgtggaggtggtaactgctctattaaataaggatccagggcttggtttcagaacagataagaagggacaaacagctctacacatggcttcaaaaggcctggcttcaaaaggccagaatgcagaaattctgctcgagttgttgaagcctgatgtctcagttatccatgtagaagacggcaaggggaatagaccattgcatgttgcaactcggaagggaaacaccattatggttcagaccctaatatcagttgaggggattgaaatcaacgcggttaatagagctggagagactgcttttgctattgcagagaaacaaggtaatgaagagctcgttaacatcctgagagaggctggtggagtaactgcaaaagagcaagtaaatcctcctaatccagcaaagcagcttaagcagacagtcagcgatatcaggcacgatgttcaatcacagatcaagcaaacacggcagaccaagatgcaattccagaaaatcaagaagagaatcgaaaagctccacatcggtgggctaaacaacgccatcaactccaacaccgttgtcgcggtgcttatcgccaccgttgcctttgccgccatattccagctccctggtaattttctggaggatatgagtcaggcacatggcccagacatgaccttggggcaagcatggatagccagtgagccagccttcataatcttcttggttttcgacgctctggctctcttcatctcgctcgcggtcgtcgtggtccagacgtctctgatcgtcgtcgaacagaaggccaagaagaagatggtcttcgtgataaacaagctgatgtggctcgcgtgcctctgcatctcggcggccttcatagcgctgacctacgtcgtcgtgggccgagacgacgagtggctggcctggtgtacgatggcgatcggcaccgtcatcatggtggccactctgggttcaatgtgctactgcattgtcgctcacaggatggaggagaagagcatgaggaggatcaggaggacctccacgagccagtcgtggtccatatcgatcgactccgaaacggagctgatgaacagcgagtacaagaagatgtacgccatttaggataggcaacggccatgcttgccatctgagtcctgtatatactggtacccaaagtccatggcattggattgactgagctatattttagtccgtagacatggcacctgtatgtaactgcagacagtctgcagcctccgcccacgaacgtagatagggtgtagccacctttttgttggcaaaatatgaacatttgccaagcacgatgcccctatcttatgctgtatttttgtgggtgcggcaatgaaaaccatgggattgtatctgtatagtagaatagtatggaataagttgaccttgtgtcaaaggttatgtggtcgtgcgtggatgctcttttgatgcgacattaggctggatggagtaggctgagggaaaagaaaagaaaaataacaatggtcacagatgacattttggacttggactggagcagactttgttgaccgttgtggttatgcggcatttgcagccgttctgtaaaaatgaaaatgcggagatgcctatgggctgaccgaaaatttgacaaaatttccgctctttccctggagg

SEQ ID NO: 213406 - DNA, 1041 bp, Zea Mays
gaacccgcgcgcctcctatctttgctcccgagctcacgccctgtcctttaaggagcatccgtctcgctcacgagccgtcaacctttgcttcttcctccccctaatcgcgaacgagcgtctttctcctccgtccgcgcccgtttgctcatcggttttgcctgccggtgggggaccgcctgcacgagcagcggctagccagacgtacgggcttcgtttgaggctggagtcctgattggcaggtgcaagcacagagctcgatcgccatgtctttcaccggcacgcaggacaagtgcaaagcctgcgacaagacggtccacatcatcgacctcctcaccgccgacggcgtctcgtaccacaagacatgcttcaagtgcagccactgcaagggcgtcctctcgattagcagctactcttccatggacggcgtcctgtactgcaagacgcactttgaacagctcttcaaggagacagggaccttctcaaagaactttcaaggtggagcatcttcaaacaagaacgaccaggcaaaggctccaagcaagctatcatctgcattctctggaactcaagataaatgcgcggcctgccagaaaacagtgtatccattggagaagatgactctggaaggcgaatcctaccacaagagctgcttcaaatgctcgcacgggggctgcatcctcaccacgtcctcctacgccgcgctcaacggggtcctctactgcaagatccatttctcgcagctgttcaaggagaagggcagctacaaccacctcatcgagacggcgcagaccaagaagaacgaggccgcggaggccggaccggagccaccggcggacgcaggcgcggctgagccggaagcacccgcgcaatcggcgtagaacgtacaaagattagcagcaacgcaaagagaaatagagcctctgggattgtaacaagtgcatgttgaattgcttgttatgtattatgaggctttggattcatgacgatgaaatgagtatatgggtgtaaacatttggcttcagttgcattgcttttccacta

SEQ ID NO: 213407 - DNA, 1358 bp, Zea Mays
cggccaaccagggaggcgacgctgccgccgatagcagcagcgacgttgcagcttcgccctccacatcctctcgcgaccgccgacgacaacgacgccgcagcttcctccgcatcctctcgcgaccgccacttttccagttaggattcaaggcgtacatttgctggaattggatctttgagtgaccagaatcatataggatggtagttaaaacacttactgaattgtctcttcaagacaaagatgtaaccgttcaggttgaagtcaacaggagatgggaatttagaggaattggcgatgatggtcctgttttacatgttgacatgattctaacagatgcaacaggaaatgcaatctatgctgaagtacctgccaaattattggaacaaaaaggttcattgttacagttgaacaaagtgtactacatccgacgctttcgagttgcaaatgcaaagtcacaatacaaagttatcgatgcccctctcatgatctacttcactgtttattcgataattgaagtttgtcgtgatcccccatctacatttccactgtacgtgtataatcttattccatatgaggctattgatgcaaatggaccaaagagtaaagacttccatgacatacttggaatgatcaatgaagtttctgagataaatccaatacaactaagcggaaagtcatctatctaccggaatgtgttcatcaagaacctcaggatctgtatatctaagtggtggtgcagcttgccactggtatttcaatccatccattaacggagctcaaccatactatcaaaggattcataatgaaaatgtaacaatcaagctccctccactaacgaacgaacaagcggcgtttgttaaccctcctgaaacacaacacaaagatttgaaagagctattagagtctgaaccattgacactaccagaggaaggttttaaatgcactgtaaccattacaagagtgcttgatgatcagccatggtggtacaaagcatgtaatacatgtccaaacaaaccatccatgcggtcatcagtgtcatcatgtcctacatgtggctcgacagatgctattctaagcttcacatggaagagacctatctttgccatcaaccaaattgagcattccaatgcatccgtcaactccaacaaaacttccatcgagaacaagacaggcaatttcaccctctacgacattgtccaacctatctacatccatttctctagagcaacatagcagttttgaagctggagacagtcttgaagaccaaaatccacaatcttttgaatcgccaccgaaaaggactaagcacaaatctttaagattcgattgcggtgaggatgcgactaacaaggataaat

SEQ ID NO: 213408 - DNA, 2690 bp, Zea Mays
ctagaggtctgtaaaactgagttgattttcgtgacgaagccttcctcttcgacgctccactgcgtctgcgccactgcggattgaagtaatttgccagggccattagcgtaattgctcctccgttaatacaaacccacagttgccctaataaggtttcgagtcttacgacgatccggcgacgctacctttccgtcgctcctcccccacccacgaaccctgccggaagggcaaaaaggggttcgaaattggtcctgatccaggagccaatcctacagacttcacctcccaaattcttttcccgatccgatctgcaagttctccttggatcctgcatcctccagccgattcctgggaagatctgaatcctcctctcgaccatggatccacgcgccaggtatccttcgggcatgggcaacggccgcggtgggaacctcaactactacggccgcggcccaccgccgcaacagccgcatcagcaccacaaccaccagcagacgtcgggggcgcaccaccaccagcagacgtcgggggcgcaccaccaccagcagtacgcgcagaggcagcaccagcaccagcaccacggccacaatcgccatcagcaacagcagcagcaccacatttaccagcagcaacagcagcagtggctgcggcggagccagattgcccgcgagacctcgggcgcagccgtgaccagcgagccgaagtccctggcgccatccacggccgccgatggcgtcgattcgagttcacaagattggaaggcccaattgaagctgccgcctccagatacacgctacaggacagaggatgttacagctaccaagggaaatgagtttgaagactattttctcaagcgtgaactcctaatgggtatatacgagaagggatttgaaagaccgtctcctatccaagaggaaagcattcctattgctttaactggtagtgacattcttgcaagagcgaagaacggaactggcaagactgctgcattttgtattcctgcactggaaaagattgatcaagaaaaaaatgctattcaagttgttatattggttcccacaagggaattggctctgcaaacatcacaagtttgcaaggagcttggtaagcatttgaagatccaggttatggtcaccactggtggaaccagtttgaaggatgatattgttcgtctgtaccaacctgtgcacttactcgttggaacacctgggcgtattttggatcttacaaagaaaggtgtttgcattttgaacgactgttcaatgcttattatggatgagacaagcttctctctcctgagtttcaaccttccatagaacagttgattcgctacctccctgctagtcgacagattttgatgttttcagcgacattccctgtgactgttaaggagtttaaggacaaatatctgcctaaaccttatgtgattaaccttatggacgaacttacactgaagggaattacacagttctatgcttttgtggaagaaagacagaaagttcactgtctcaacactctcttttccaagcttcaaatcaaccagtcaataatattttgtaactctgtaaatcgtgttgaactattggcgaaaaagatcacagagcttggctattcttgcttctatattcatgcaaagatgctacaggaccaccgtaatagagttttccatgatttccgtaatggagcatgcaggaaccttgtttgcactgatctttttacaaggggaatagatattcaagctgtgaatgttgttatcaattttgatttccccaagaactctgaaacatatctccacagggttggtagatctgggagatttggccaccttggtctggccgttaatttgatcacctatgaggaccggtttaacttgtataggattgaacaagagcttgggactgaaataaaatcaattcctcctcagatagaccaggctatatactgccaataatctgaccgttttcatatgctttcatttctccgcgaataatgagaacttttgtaaataccagctcatcaggttttatggtgttgatctcgtttgttgcatcagagacaattctatgttggtggataacattagatgaggcacccaactttttttattacaccttgtcatgctgacactgttatggctatatgagggcaaatgtcctgccacattaggcacaaagtagtgtatattctaggtgcctattcctaggccctgtcctgcttttagtttctttttctcttattttcatcctattgtgtcattagctgtttcacacaggacattttaaccctgttgctggttctgggcgtgtgatctgtcggtgctcacacaagcttgttgcccgagtcgaacttggggatgtgggcctcagatgggttattgggtgacaggtcggccattgaacttgaagtctggagtctgaacggtagtgaactggttaagtttgcaaataatcggtggtgagctgcatcatgttgtgctgtcttacccttgcagtcatgtcacttttgcttggtgccgtggtcaccatttagatttgcttggataaaacgctcgtcacgtttgtgctgactttgtgttcggcacaagcaacctgtccaggttatgtgtaaagaactgtttacttgtttttttcataataacaaacgttgcagctgtttttgcactctgtttctttccttttcgtgatataatt

SEQ ID NO: 213409 - DNA, 2442 bp, Zea Mays
ctagaggtctgtaaaactgagttgattttcgtgacgaagccttcctcttcgacgctccactgcgtctgcgccactgcggattgaagtaatttgccagggccattagcgtaattgctcctccgttaatacaaacccacagttgccctaataaggtttcgagtcttacgacgatccggcgacgctacctttccgtcgctcctcccccacccacgaaccctgccggaagggcaaaaaggggttcgaaattggtcctgatccaggagccaatcctacagacttcacctcccaaattcttttcccgatccgatctgcaagttctccttggatcctgcatcctccagccgattcctgggaagatctgaatcctcctctcgaccatggatccacgcgccaggtatccttcgggcatgggcaacggccgcggtgggaacctcaactactacggccgcggcccaccgccgcaacagccgcatcagcaccacaaccaccagcagacgtcgggggcgcaccaccaccagcagacgtcgggggcgcaccaccaccagcagtacgcgcagaggcagcaccagcaccagcaccacggccacaatcgccatcagcaacagcagcagcaccacatttaccagcagcaacagcagcagtggctgcggcggagccagattgcccgcgagacctcgggcgcagccgtgaccagcgagccgaagtccctggcgccatccacggccgccgatggcgtcgattcgagttcacaagattggaaggcccaattgaagctgccgcctccagatacacgctacaggacagaggatgttacagctaccaagggaaatgagtttgaagactattttctcaagcgtgaactcctaatgggtatatacgagaagggatttgaaagaccgtctcctatccaagaggaaagcattcctattgctttaactggtagtgacattcttgcaagagcgaagaacggaactggcaagactgctgcattttgtattcctgcactggaaaagattgatcaagaaaaaaatgctattcaagttgttatattggttcccacaagggaattggctctgcaaacatcacaagtttgcaaggagcttggtaagcatttgaagatccaggttatggtcaccactggtggaaccagtttgaaggatgatattgttcgtctgtaccaacctgtgcacttactcgttggaacacctgggcgtattttggatcttacaaagaaaggtgtttgcattttgaacgactgttcaatgcttattatggatgaggcagacaagcttctctctcctgagtttcaaccttccatagaacagttgattcgctacctccctgctagtcgacagattttgatgttttcagcgacattccctgtgactgttaaggagtttaaggacaaatatctgcctaaaccttatgtgattaaccttatggacgaacttacactgaagggaattacacagttctatgcttttgtggaagaaagacagaaagttcactgtctcaacactctcttttccaagcttcaaatcaaccagtcaataatattttgtaactctgtaaatcgtgttgaactattggcgaaaaagatcacagagcttggctattcttgcttctatattcatgcaaagatgctacaggaccaccgtaatagagttttccatgatttccgtaatggagcatgcaggaaccttgtttgcactgatctttttacaaggggaatagatattcaagctgtgaatgttgttatcaattttgatttccccaagaactctgaaacatatctccacagggttggtagatctgggagatttggccaccttggtctggccgttaatttgatcacctatgaggaccggtttaacttgtataggattgaacaagagcttgggactgaaataaaatcaattcctcctcagatagaccaggctatatactgccaataatctgaccgttttcatatgctttcatttctccgcgaataatgagaacttttgtaaataccagctcatcaggacattttaaccctgttgctggttctgggcgtgtgatctgtcggtgctcacacaagcttgttgcccgagtcgaacttggggatgtgggcctcagatgggttattgggtgacaggtcggccattgaacttgaagtctggagtctgaacggtagtgaactggttaagtttgcaaataatcggtggtgagctgcatcatgttgtgctgtcttacccttgcagtcatgtcacttttgcttggtgccgtggtcaccatttagatttgcttggataaaacgctcgtcacgtttgtgctgactttgtgttcggcacaagcaacctgtccaggttatgtgtaaagaactgtttacttgtttttttcataataacaaacgttgcagctgtttttgcactctgtttctttccttttcgtgatataatt

SEQ ID NO: 213410 - DNA, 2423 bp, Zea Mays
ctagaggtctgtaaaactgagttgattttcgtgacgaagccttcctcttcgacgctccactgcgtctgcgccactgcggattgaagtaatttgccagggccattagcgtaattgctcctccgttaatacaaacccacagttgccctaataaggtttcgagtcttacgacgatccggcgacgctacctttccgtcgctcctcccccacccacgaaccctgccggaagggcaaaaaggggttcgaaattggtcctgatccaggagccaatcctacagacttcacctcccaaattcttttcccgatccgatctgcaagttctccttggatcctgcatcctccagccgattcctgggaagatctgaatcctcctctcgaccatggatccacgcgccaggtatccttcgggcatgggcaacggccgcggtgggaacctcaactactacggccgcggcccaccgccgcaacagccgcatcagcaccacaaccaccagcagacgtcgggggcgcaccaccaccagcagacgtcgggggcgcaccaccaccagcagtacgcgcagaggcagcaccagcaccagcaccacggccacaatcgccatcagcaacagcagcagcaccacatttaccagcagcaacagcagcagtggctgcggcggagccagattgcccgcgagacctcgggcgcagccgtgaccagcgagccgaagtccctggcgccatccacggccgccgatggcgtcgattcgagttcacaagattggaaggcccaattgaagctgccgcctccagatacacgctacaggacagaggatgttacagctaccaagggaaatgagtttgaagactattttctcaagcgtgaactcctaatgggtatatacgagaagggatttgaaagaccgtctcctatccaagaggaaagcattcctattgctttaactggtagtgacattcttgcaagagcgaagaacggaactggcaagactgctgcattttgtattcctgcactggaaaagattgatcaagaaaaaaatgctattcaagttgttatattggttcccacaagggaattggctctgcaaacatcacaagtttgcaaggagcttggtaagcatttgaagatccaggttatggtcaccactggtggaaccagtttgaaggatgatattgttcgtctgtaccaacctgtgcacttactcgttggaacacctgggcgtattttggatcttacaaagaaaggtgtttgcattttgaacgactgttcaatgcttattatggatgaggcagacaagcttctctctcctgagtttcaaccttccatagaacagttgattcgctacctccctgctagtcgacagattttgatgttttcagcgacattccctgtgactgttaaggagtttaaggacaaatatctgcctaaaccttatgtgattaaccttatggacgaacttacactgaagggaattacacagttctatgcttttgtggaagaaagacagaaagttcactgtctcaacactctcttttccaagcttcaaatcaaccagtcaataatattttgtaactctgtaaatcgtgttgaactattggcgaaaaagatcacagagcttggctattcttgcttctatattcatgcaaagatgctacaggaccaccgtaatagagttttccatgatttccgtaatggagcatgcaggaaccttgtttgcactgatctttttacaaggggaatagatattcaagctgtgaatgttgttatcaattttgatttccccaagaactctgaaacatatctccacagggttggtagatctgggagatttggccaccttggtctggccgttaatttgatcacctatgaggaccggtttaacttgtataggattgaacaagagcttgggactgaaataaaatcaattcctcctcagatagaccaggctatatactgccaataatctgaccgttttcatatgctttcatttctccgcgaataatgagaacttttgtaaataccagctcatcaggttttatggtgttgatctcgtttgttgcatcagagacaattctatgttggtggataacattagatgaggtttatgctggccagaaatctcaacatgttactggcttgcccccgaaaaggttgtatgtgtatatatacactaattaattcaccttccctgcctgggcgagccttctctcgccatggctttggccaggtgaactaaaagtggcaactggcaagtgcaaacgacctctcgctccctcgtgacacgccttcgtgccagcatgggaggaatgttttctgccttccaccatatatggggacagccagaggtgaaatccagatgaacccaaaattatgctttgccaattgcccataggggacaactgagctacagtatagttctcgagttcctttc

SEQ ID NO: 213411 - DNA, 3231 bp, Zea Mays
ctagaggtctgtaaaactgagttgattttcgtgacgaagccttcctcttcgacgctccactgcgtctgcgccactgcggattgaagtaatttgccagggccattagcgtaattgctcctccgttaatacaaacccacagttgccctaataaggtttcgagtcttacgacgatccggcgacgctacctttccgtcgctcctcccccacccacgaaccctgccggaagggcaaaaaggggttcgaaattggtcctgatccaggagccaatcctacagacttcacctcccaaattcttttcccgatccgatctgcaagttctccttggatcctgcatcctccagccgattcctgggaagatctgaatcctcctctcgaccatggatccacgcgccaggtatccttcgggcatgggcaacggccgcggtgggaacctcaactactacggccgcggcccaccgccgcaacagccgcatcagcaccacaaccaccagcagacgtcgggggcgcaccaccaccagcagacgtcgggggcgcaccaccaccagcagtacgcgcagaggcagcaccagcaccagcaccacggccacaatcgccatcagcaacagcagcagcaccacatttaccagcagcaacagcagcagtggctgcggcggagccagattgcccgcgagacctcgggcgcagccgtgaccagcgagccgaagtccctggcgccatccacggccgccgatggcgtcgattcgagttcacaagattggaaggcccaattgaagctgccgcctccagatacacgctacaggacagaggatgttacagctaccaagggaaatgagtttgaagactattttctcaagcgtgaactcctaatgggtatatacgagaagggatttgaaagaccgtctcctatccaagaggaaagcattcctattgctttaactggtagtgacattcttgcaagagcgaagaacggaactggcaagactgctgcattttgtattcctgcactggaaaagattgatcaagaaaaaaatgctattcaagttgttatattggttcccacaagggaattggctctgcaaacatcacaagtttgcaaggagcttggtaagcatttgaagatccaggttatggtcaccactggtggaaccagtttgaaggatgatattgttcgtctgtaccaacctgtgcacttactcgttggaacacctgggcgtattttggatcttacaaagaaaggtgtttgcattttgaacgactgttcaatgcttattatggatgaggcagacaagcttctctctcctgagtttcaaccttccatagaacagttgattcgctacctccctgctagtcgacagattttgatgttttcagcgacattccctgtgactgttaaggagtttaaggacaaatatctgcctaaaccttatgtgattaaccttatggacgaacttacactgaagggaattacacagttctatgcttttgtggaagaaagacagaaagttcactgtctcaacactctcttttccaagcttcaaatcaaccagtcaataatattttgtaactctgtaaatcgtgttgaactattggcgaaaaagatcacagagcttggctattcttgcttctatattcatgcaaagatgctacaggaccaccgtaatagagttttccatgatttccgtaatggagcatgcaggaaccttgtttgcactgatctttttacaaggggaatagatattcaagctgtgaatgttgttatcaattttgatttccccaagaactctgaaacatatctccacagggttggtagatctgggagatttggccaccttggtctggccgttaatttgatcacctatgaggaccggtttaacttgtataggattgaacaagagcttgggactgaaataaaatcaattcctcctcagatagaccaggctatatactgccaataatctgaccgttttcatatgctttcatttctccgcgaataatgagaacttttgtaaataccagctcatcaggttttatggtgttgatctcgtttgttgcatcagagacaattctatgttggtggataacattagatgaggcacccaactttttttattacaccttgtcatgctgacactgttatggctatatgagggcaaatgtcctgccacattaggcacaaagtagtgtatattctaggacattttaaccctgttgctggttctgggcgtgtgatctgtcggtgctcacacaagcttgttgcccgagtcgaacttggggatgtgggcctcagatgggttattgggtgacaggtcggccattgaacttgaagtctggagtctgaacggtagtgaactggttaagtttgcaaataatcggtggtgagctgcatcatgttgtgctgtcttacccttgcagtcatgtcacttttgcttggtgccgtggtcaccatttagatttgcttggataaaacgctcgtcacgtttgtgctgactttgtgttcggcacaagcaacctgtccaggttatgtgtaaagaactgtttacttgtttttttcataataacaaacgttgcagctgtttttgcactctgtttctttccttttcgtgatataattacctgagctgctcaggttagagaaatcttggaaacaaacatctagtactcctatagcccacacggttcatcttaaccccttgggtgctgttcttttgggtgtggcgtgagttcgtgtgtggtgtctctgtaaccctttcttttaatgaaatgataagcaagatcgagaaaaaaagattgcttgacttgagtcacgtacatcatttcgtcaaatgcgttgctcttaaatttgactttggttcgccatggtgctgacattgtttctagttgggtttatcttatctttgcaggtttatgctggccagaaatctcaacatgttactggcttgcccccgaaaaggttgtatgtgtatatatacactaattaattcaccttccctgcctgggcgagccttctctcgccatggctttggccaggtgaactaaaagtggcaactggcaagtgcaaacgacctctcgctccctcgtgacacgccttcgtgccagcatgggaggaatgttttctgccttccaccatatatggggacagccagaggtgaaatccagatgaacccaaaattatgctttgccaattgcccataggggacaactgagctacagtatagttctcgagttcctttc

SEQ ID NO: 213412 - DNA, 2448 bp, Zea Mays
ctagaggtctgtaaaactgagttgattttcgtgacgaagccttcctcttcgacgctccactgcgtctgcgccactgcggattgaagtaatttgccagggccattagcgtaattgctcctccgttaatacaaacccacagttgccctaataaggtttcgagtcttacgacgatccggcgacgctacctttccgtcgctcctcccccacccacgaaccctgccggaagggcaaaaaggggttcgaaattggtcctgatccaggagccaatcctacagacttcacctcccaaattcttttcccgatccgatctgcaagttctccttggatcctgcatcctccagccgattcctgggaagatctgaatcctcctctcgaccatggatccacgcgccaggtatccttcgggcatgggcaacggccgcggtgggaacctcaactactacggccgcggcccaccgccgcaacagccgcatcagcaccacaaccaccagcagacgtcgggggcgcaccaccaccagcagacgtcgggggcgcaccaccaccagcagtacgcgcagaggcagcaccagcaccagcaccacggccacaatcgccatcagcaacagcagcagcaccacatttaccagcagcaacagcagcagtggctgcggcggagccagattgcccgcgagacctcgggcgcagccgtgaccagcgagccgaagtccctggcgccatccacggccgccgatggcgtcgattcgagttcacaagattggaaggcccaattgaagctgccgcctccagatacacgctacaggacagaggatgttacagctaccaagggaaatgagtttgaagactattttctcaagcgtgaactcctaatgggtatatacgagaagggatttgaaagaccgtctcctatccaagaggaaagcattcctattgctttaactggtagtgacattcttgcaagagcgaagaacggaactggcaagactgctgcattttgtattcctgcactggaaaagattgatcaagaaaaaaatgctattcaagttgttatattggttcccacaagggaattggctctgcaaacatcacaagtttgcaaggagcttggtaagcatttgaagatccaggttatggtcaccactggtggaaccagtttgaaggatgatattgttcgtctgtaccaacctgtgcacttactcgttggaacacctgggcgtattttggatcttacaaagaaaggtgtttgcattttgaacgactgttcaatgcttattatggatgaggcagacaagcttctctctcctgagtttcaaccttccatagaacagttgattcgctacctccctgctagtcgacagattttgatgttttcagcgacattccctgtgactgttaaggagtttaaggacaaatatctgcctaaaccttatgtgattaaccttatggacgaacttacactgaagggaattacacagttctatgcttttgtggaagaaagacagaaagttcactgtctcaacactctcttttccaagcttcaaatcaaccagtcaataatattttgtaactctgtaaatcgtgttgaactattggcgaaaaagatcacagagcttggctattcttgcttctatattcatgcaaagatgctacaggaccaccgtaatagagttttccatgatttccgtaatggagcatgcaggaaccttgtttgcactgatctttttacaaggggaatagatattcaagctgtgaatgttgttatcaattttgatttccccaagaactctgaaacatatctccacagggttggtagatctgggagatttggccaccttggtctggccgttaatttgatcacctatgaggaccggtttaacttgtataggattgaacaagagcttgggactgaaataaaatcaattcctcctcagatagaccaggctatatactgccaataatctgaccgttttcatatgctttcatttctccgcgaataatgagaacttttgtaaataccagctcatcaggtttatgctggccagaaatctcaacatgttactggcttgcccccgaaaaggttgtatgtgtatatatacactaattaattcaccttccctgcctgggcgagccttctctcgccatggctttggccaggtgaactaaaagtggcaactggcaagtgcaaacgacctctcgctccctcgtgacacgccttcgtgccagcatgggagggtaggttttcctcatttctccatgttgattttgcagcgccatatttgtctcgaggcgtgaagctttcccatgttctctgtatttcttttttagaatgttttctgccttccaccatatatggggacagccagaggtgaaatccagatgaacccaaaattatgctttgccaattgcccataggggacaactgagctacagtatagttctcgagttcctttc

SEQ ID NO: 213413 - DNA, 1448 bp, Zea Mays
aattggctctgcaaacatcacaagtttgcaaggagcttggtaagcatttgaagatccaggttatggtcaccactggtggaaccagtttgaaggatgatattgttcgtctgtaccaacctgtgcacttactcgttggaacacctgggcgtattttggatcttacaaagaaaggtgtttgcattttgaacgactgttcaatgcttattatggatgaggcagacaagcttctctctcctgagtttcaaccttccatagaacagttgattcgctacctccctgctagtcgacagattttgatgttttcagcgacattccctgtgactgttaaggagtttaaggacaaatatctgcctaaaccttatgtgattaaccttatggacgaacttacactgaagggaattacacagttctatgcttttgtggaagaaagacagaaagttcactgtctcaacactctcttttccaagatctttttacaaggggaatagatattcaagctgtgaatgttgttatcaattttgatttccccaagaactctgaaacatatctccacagggttggtagatctgggagatttggccaccttggtctggccgttaatttgatcacctatgaggaccggtttaacttgtataggattgaacaagagcttgggactgaaataaaatcaattcctcctcagatagaccaggctatatactgccaataatctgaccgttttcatatgctttcatttctccgcgaataatgagaacttttgtaaataccagctcatcaggttttatggtgttgatctcgtttgttgcatcagagacaattctatgttggtggataacattagatgaggcacccaactttttttattacaccttgtcatgctgacactgttatggctatatgagggcaaatgtcctgccacattaggcacaaagtagtgtatattctaggtgcctattcctaggccctgtcctgcttttagtttctttttctcttattttcatcctattgtgtcattagctgtttcacacaggacattttaaccctgttgctggttctgggcgtgtgatctgtcggtgctcacacaagcttgttgcccgagtcgaacttggggatgtgggcctcagatgggttattgggtgacaggtcggccattgaacttgaagtctggagtctgaacggtagtgaactggttaagtttgcaaataatcggtggtgagctgcatcatgttgtgctgtcttacccttgcagtcatgtcacttttgcttggtgccgtggtcaccatttagatttgcttggataaaacgctcgtcacgtttgtgctgactttgtgttcggcacaagcaacctgtccaggttatgtgtaaagaactgtttacttgtttttttcataataacaaacgttgcagctgtttttgcactctgtttctttccttttcgtgatataatt

SEQ ID NO: 213414 - DNA, 1559 bp, Zea Mays
agatggcgagatgctggcgatcgagcgaataataacatgctgggcatggggagcgcggtggagacgctgtgcgggcaggcgtacggggcgcacaagtacgacatgctgggcatctacctgcagcgctccaccgtcctgctgatggccacgggggtgccgctggcggcgctgtacgccttctcccgccccgtcctggtcctgctgggggagtcccccgagatcgcgtcggccgccgccgtcttcgtgtacggcctggtcccgcagatcttcgcgtacgccgccaacttccccatccagaagttcatgcaggcgcagagcatcatggggcccagcgcctacatctccgccgccgcgctcgccgcccacctcgccctcagctacctcgtcgtctaccgcctcggcctcggcctcctcggcgcctcgctcacgctcagcgccagctggtgggccatcgtcgccgcccagttcgcatacatcgtcaccagcagccgctgccgcctcacctggaggggcttctcgtggcaggccttctccggcctgcccagcttcttcaggctctccctcgcatccgccgtcatgctctgcctcgagacctggtacttccagattctcgtgctcatcgcaggcctcctcaaggaccccgagcttgccttggcctcactctctgtctgcatgacaatttcagggtgggtgttcatgatctccgttgggttcaatgcagcagccagcgtaagagtgagcaacgagctcggcgccggcaacccaagggcggcggcgttctccgtggtggtagtgacgctgctctccttcgtcctgtcggtcctcgtctccgccgtcatcctgctgtgccgggactacatcagctacatcttcaccgagggtgaggacgtgtcgcaggcggtctcccggctcaccccgctgctggcgttcacgctcatcctcaacggcatccagctccagcccgtcctctctggggtcgctgtggggtgtggatggcaggcgttcgtcgcgtacgtcaacgtcggctgctactacatcgtcggcatcccgctcgggtgcctcctaggcttctactttgacctaggagcagcgggtatttggagcggtatgatcggcggcaccttgatgcagaccttgatcttgatatgggttacattcaggaccaactggaacaaagaggttgaagaagcacagaagaggttaaacaaatgggacgacggcaaggctcctctgctgtcagcgcaagaatgaaacaactcgtctctctggtgcccaaccaaagaacaacgagacgtggatatgacctgtacggaactagggacgcccctcggcaggctcagcggagacgtcgacgtagtttgatatcaagtagcaattccaccatgtcctgaaatggacagaaccaggccaaatgcctggaatggacagaaccagatggctgatgaaattctacgtacattccatccggtccaatatataattcgtttcacttttttatattaagtttgaccgactcatctcattaaaaaatataattgttattaacttttactagaata

SEQ ID NO: 213415 - DNA, 1747 bp, Zea Mays
gctcgatgtacctctacgggacctttttcagccttttttctttattttattattattattttcctactacacaagggaccttttgagctgagatgatgcccaaaaacaaaaggacgctcatcatcagtgacgcccagtcgtcgccaagcagctagctagcatgccaataatttttttcttgttaatgttgtcgcagctggtactatactactactactacgccgtatatgaatgcgcttttgtctgcatgctcaggctgattccatccaacttgtctttcttctctcctctccacccatgccccgtccgtcgcagcaggggttatatagtgcccgcgaacggacgcgcaggcgccacgaagccgagatcgagcagctacctctccgatccgaggcctgagcgagcgagctgaggactgcagcctatataatatctagactagagtacaccacaacgacgaggcacatatatatacacgcggcggcggccagatccatcttggtatacacgtaatatatatacacgcacgatgggcagcgccggcggcggtggcgagagcaagctggagagcccgctgctgggcgcgtcgtcgacgggccacggcgaggcggtggtgagcgggcagctggagagcatcctgggcgacgcgtccgtgccgtgggggacgcggatggcgtcggcgtccgcggtggagatgcggctgctggtgcgcctggccgcgcccgccgtgctcgtgtacatgatcaactacctcatgtccatgtccacgcagatcttctcgggccacctcggcacgctcgagctcgccgccgcctcgctcggcaacaccggcatccaggtcttcgcctacggcctcatgcatgacaatttcagggtgggtgttcatgatctccgttgggttcaatgcagcagccagcgtaagagtgagcaacgagctcggcgccggcaacccaagggcggcggcgttctccgtggtggtagtgacgctgctctccttcgtcctgtcggtcctcgtctccgccgtcatcctgctgtgccgggactacatcagctacatcttcaccgagggtgaggacgtgtcgcaggcggtctcccggctcaccccgctgctggcgttcacgctcatcctcaacggcatccagctccagcccgtcctctctggggtcgctgtggggtgtggatggcaggcgttcgtcgcgtacgtcaacgtcggctgctactacatcgtcggcatcccgctcgggtgcctcctaggcttctactttgacctaggagcagcgggtatttggagcggtatgatcggcggcaccttgatgcagaccttgatcttgatatgggttacattcaggaccaactggaacaaagaggttgaagaagcacagaagaggttaaacaaatgggacgacggcaaggctcctctgctgtcagcgcaagaatgaaacaactcgtctctctggtgcccaaccaaagaacaacgagacgtggatatgacctgtacggaactagggacgcccctcggcaggctcagcggagacgtcgacgtagtttgatatcaagtagcaattccaccatgtcctgaaatggacagaaccaggccaaatgcctggaatggacagaaccagatggctgatgaaattctacgtacattccatccggtccaatatataattcgtttcacttttttatattaagtttgaccgactcatctcattaaaaaatataattgttattaacttttactagaata

SEQ ID NO: 213416 - DNA, 3530 bp, Zea Mays
ccgctgggcagatgaatgctatacagagagaggctgcgttgcctcgtatccaatctaacggcggataacaccgagtggcgaccgcctgacgcgcccgtgtcggcaagccgccgacgacttgacgtggggcgggggaaacaaaacaacgcgggcagcgctacggcaagcgcgtccctgccacggcgcggacacagagagtggaaaccggaaggggggaagagagatggattcctccacctcggcggcggcggcaggggaggcggccgtgccgccggaggacgacgtctgctccgtctgccacgaccgcttccggatcccgtgtcaggcgaactgctcccattggttctgtggagagtgcatcatccgcgtttggaattatggacctcctgtacaggcttgcaagtgtcccatttgtcgccgccttataaatctactggtgcctgctgcattatcagggcaggaggatggtccacaagctcaacgtattctaggagagattcagcactataactgtatatttggtggagcaccacgcagcctaactcagaggttgcaagacctacccttcttcatccgaagactgttcagagaactaatggacccccagcggaccctcccactcgtgttcagggcgcggatgctgatgatggtcgcactgagtgcaatttatgtgctgagccctgtcgacattcttcccgaaagcatgctgggcctctttggattcgtcgatgacctgctcatcctgctgatcgtgttcctccacctcgccgcggtgtaccggtcgttgctcctgtaccgccacgggggccagtagaagtcgctgtgcataaaccgtttgtttagctggtttccatgtggagttctctgagatcgcagcagcggatttggaagatcgccgactcgccgagtagatggcaacgtcacggacggcttagcctgtccctgctctgtaccattctactacgcctgtttttctgagactctgacacggtgaactgaactttggttggttgatgcaagtgaatttcccttcgttttactcgtcaggaaaagaaagggaaagagtttgcgttcgtttgtctttgtttctgctctttggaagttggaattgaaactgcactgatgtttgcgtttcaggaactgcattgacgtggatcctgctcagttctcttagcatttacttatgggccaagtttgtagaagtttagtgggctgtagacccattggtgtcatgttgggccaccgcgacgagtaaagaagaggtaggggatcgccctggccgggtagttggctcttgcgggagggatgagatgggaatgggatggcgacgggcgggcgtgtgcggctgcaagcggctcggaaggggcacggtggagacgcagcggaccctcgcctcttctcctgctcctgctgctgacctgacgagctgagcccacggacgagaggggagacgaggaggggcacaccacgcaggagaccggaggagagcgcgcgcgcggatccacctcgatgttggcaagaccatcagcaccgcctttggtgactgctcaaactcctgaagtcggcatcttcattacagctcgcaacgtctcgggtgcactggtcgccaagcttcctggtaacaaaaacaagtgtggaggaagatcgaatgtccggcagcggaacatccaacctgggaaaaggggctgtcgtcgggagtggcgggcgctctcagcagctgaccaagcgcaggcttctaccttggacgtagatgaggagtgcaaacgggtgctcactccattgggtttctccagcgaagacgccgagaagatgctgaagaaagcgtttggctggacccactcgccgtactggagcgaggagagggagaaggaggttccgaccgccgaggcggtagctggagtgctggactacatcaggagcctggggctgtcggacgaagaccttggcaggctgctgaagaagttccccgaggttcttgggtgcgacctcgacggcgaggtgaggccgaatgtgggcaagctggacagtgactggggaataaacgggaagaccctgcggagccttctgctgaggaaccccaaggttctgggctacaatgttgactgcagaggggattgcatggcccagtgcacccgctgttgggttaggttctgatgatgattggttttgttcttcgtcgccacatcgttggtcaggaacttgggacttggttttgcttgctggccatttttctgtaagctagcacctgtcgaatgtagcacaatcgctagctgctggatattgggttggccactgttagttcttatgtacgtacaacagattcaagagctaaaccatgctgctgttgtctgtaaaagagttgcaataaatatggccagaattcctgaatggcctgtggtaccgcagtgacttgctattgttcttctgctctggatttccacattgtcttgttgtgatgtgaggtcctgtccttgtgctttgatgcatctcccactgtgctgtcatgtttttgtttgcatgaattacagctgaagtagttcaaagcgatcaaatccatcaaagtacatgtgagcatgtgatccggatcttatctacttgttctacatgctaatgccaattgagtgaggacaaatcattctttgtgtttttttttgggttcttattctgagttcagaaatcgattggtggtgccccgaagagatcaaatccatcaaagtcacaggaatcgagccccactggccagggtgagagcgaccctcgtccgtcgtcgtccagacactgtccttgtccatccatgagcgcgaagccctcgatgtcagaacagctgagagcatcgagcatggtgtccgagaagaactccaagctcgctgcctcggtgtccatcgtcgtcaggcggcgataagagtcggtgccgagtccgccattggcaacattgtgggcagccgcgtcgtcctcgggcggcagcgcgggcgcgtggccgtcgaaggcggcgacgtgggcgaagagcttgtccttccgcgagaaggaggtgccgcaggagcagacccagcggtcgcgtccgcagtgcttctcgtgcgtgcgcaggtcggcgagcacggagaagcgcttgacgttgcagcggcggcaggtgtagctcttgtcgcagtggctgcgccggtagtggttcttgacgcacacggccgtcttgagcggctggaagctgcggtgctcccgcctcccggttgcgcttgcaccccacgaaggggcaggagtagaagcaccgggcggaggaggaggaggacgactgcgccgtggccgcggccgtgggcgatcttctgctccaggaaggtgaggcacgtcagcaccgccctggggtcgtcggagcagcccccggcttgggtcggctcgcgctgccgccgctgagcctccatgacgtcatcgctagggctgcaaacctccatggcgtacggtctgaaccgatcaatgcctgatctcgctggtcgggtgggggtttggctgggccgtgtccgatctctgttcttgcttatgct

SEQ ID NO: 213417 - DNA, 1304 bp, Zea Mays
agatttgccatccctagcgccgtcaaggcctccggaaccggtcgcaagcggcgtaggacccccgccgctacagagccctcgtccgtcgcacttcgccgccgcgccggagtcatccagctcgtcgacgcctggcggagagatccccagtgcgaggggaacctccacgacgggagatcagcggtcaccacccatgaaagagtgatggaagcccaaagtagtacttgcttttcaaaagtcgtgggacctaacttatggtatggcgatcgcacaagacttacacccaagcaagaagaagctgcgcttggtttggcactagaccatgcacatgcagaactgatctcaccttccactttgcagttgtgggacctaacctatggtatggcgatcgcacaagacttacacccaagcaagaagaagctgcgcttggtttgtcacgtgcctgtggctctggcattccagcatacatttgcaccatgaagaagtctaatgttgtcaagagacagatggtattttcaagacagttcagtaagcgacacatattcggtcgtctgggcacttatgggtgtgaaaccagagtttttgcaggcagggacctgttcggcagtaagctcaacttctcaatgatccatggaggactaaggcttcttggtggatggcccctctttgtgaagagccaccgtatcgaagcagaacacgtctgtgctttcatgttccaggaagaggaagagggcgaactgtcacttagggctgatttggtgatttggtgattagggatccctaggggatccatggggaggaatcatcttgcaattcaattttgaatagcaagaggatttcttcccctcgggatccccggtcaccaaatcagtccttagggtgcacgttctgggtactatgccagtgccaacaatctagcctttgcttgtttcgttgatgaggcacgggatgaacgtcgctaacgaattatgcatcagacattagtattggaaacaacaacatgtagctatctagattacagccttataggttgttttgttgttctatctagataactatgtatggacatattgttcttttgtgttggagggagtaagcgttagtgttttgagacacgaagattgttatttttagactgaccgctcgagttgtgcaaataggaactgaattagtggcattgttagcatgtacatgaaaacgtgatttgtgcagtgcagggattagcttgggaatgtcgtcctaaggatggccttatattgggcctgtttggttcaacttttttcttaccagcttttctgaaaatctgg

SEQ ID NO: 213418 - DNA, 754 bp, Zea Mays
tcgctttccctgctctccttcttaagatctagtatccagcggcgttgcaggcggctaaacaaccgaaccgaggaatgggtttcacaagcaagctaaagcgctcgaggcatggtgtgtccatgaagctccgagtccgtgatccgaggccaacgcagacagtccaagatggactcagtttcgtggcgagcttgaagcgcgtgttcgcctgcgagcctgacaagtacgacgagatcatcgccaccatgcgccagttcaagtccgggaggtcgatcgattctttattcgtcttgtctgtgaattgcagcattcgtagtgcggttgtggttgagcgtgtgaaggtgcttctggaaggtcaccctggtctcctccgccacttcaaccagttcctgccatggggttacataagggctcatggaccagtcgggaggatcagcgtctgatgcagccagggcagggaagcgcgtgtggctacctaaacaagcctaaacctactagctggtgctttccatcgcatgaatggcagaatgggacaagagtatctggttggcccgtcatgactgctattctgcattggcagtaccattaagaacatgtaatgctaaacatcagaccggccgtatctttcttgcattatgtcatgtctgttccataatggtgaagccacctgactggcatcttctatatatcatgtatatatgcatgttcttgtctgcataggcgttatgggactcgcaggaaacagatcaattttttt

SEQ ID NO: 213419 - DNA, 1326 bp, Zea Mays
cgtaaggcagcggatctggttccgtctggctcggcccgtcaagccggctgccggtaggagcggaggagacggcgtctcgccgctcgcttcgtttccgccttccccctcccgcaagtcgccgccggctcgcattcgtggttccgcgtggggggtccgtggaaacgcgacaagagaggcggaagcgatggcgaagtcgtgcaaggggttggccatggagctcgtcaagtgtctcagcgagaccgactgcgtcaagaaaaggccgtacaaggagtgcgctggggagaaggtgccaaacattaccagcgagtgcgttggcctgcgggagacctacttcaactgcaagaggggccaggttgacatgcgggcccgaatacgcgggaacaagggatactagtgatgtgcctgcaatatccacaatcagttttggtttctagccatgcttctgtgacattgaggtgtaatgataacatggtttagtttgcccgtgttctgtttttgatagtacaaaacagtactttgcacgacctgctggagatgaccttagtgataacatatgctacctattataccacgatagcgcctctttggtatcgctgcaaacaatgcaagggcaactaaggtagtgtttagttttgtagtatggttttggagtggcttcgcttttaatttattgttgttattattgtttggattgattctatatagcatggagtggttctaaaaatgaaaaattatgctcaaatgttgaaccattttagcttctcaaaatcttttggatggagccgctagcgggaacgaagccattctatcccaagtggcttcgaaaccaaacgctacgtaagttaacacattggccaatattgattcaccggctgaacaagaagagggtggatttctcgtcaccaatggaagacccaggccgtggagcgaggaaggcagaaagcaatctggacagccttgtcctctgaaggctaggctgggcacgcctcaacccagccctgtggatccactcccacctgagcggctgagcctgagggtccagactccagatcaccgagctcacgtgggcgacgcaccgtccacaatgcaaccccacatttccggccaggtatctcgtcgcctcccgtccatagaaaagcacgacgtcgcttgtcgatggcccatgggcgagagagaagcgtgatggagacgtgtgctggaattgaactgcggagagggtcgccgcaggcaacgtatagctcggccggccaccattttctccttccagcaggatatgtacagcatttttattgttgttgttctaagagcaactccaataaactccct

SEQ ID NO: 213420 - DNA, 647 bp, Zea Mays
ctcaggattgtgttcaacacactgtttggacttagcacaacttactggatggcaattgtgactaggggattacttgggttgctatgtggtatacttggacccatcaaggcttatgcttcagaagtctgcaggaaagagcaccaagctctgggaatctctcttgttacatcttcacgagccatagctcttgttattgggcctgctattggaggcttccttgcacagggatagtggtcgacaaaaatatttctagcatcaggaaggtttccatacttccttccttgctttgtaatatcgttgctagcagcaggatcatgtattgcatgcatttggcttccggtatgccatatcatcttccctattattttctatcttgaatccaaatagttagatcctcttaagaaaataaaagaaaactctgacaacctatggaggtatgacatctcctgacatagcatgatagagaagaccttctcacctatacggctataccaagaaaagaaccgtgctccatccatacaaacaagatttgttaacccaacataaaattcactcctataaaaatttgaactagaaaggctactaaagggcctaaaacgaaatatgtttggacttatgtttctccactcaatatacctattttctag

SEQ ID NO: 213421 - DNA, 1512 bp, Zea Mays
attgcttttgggatgacgatgctactagcgtaccaacccagcagctcaggggatcagatcacgcccaagggcgtgcgggtagcgcccaagcccaagcgcacgcaatcgcccgcgcgaaccacgcttttgtcagagacgtgcctcgacgcgtgaggacgtactgacctcttctcctaattattacttggttctatgttaataacactcgcaacttcaaagagctcttacactgtcgctgtccctgtggtccgagagccagagccttggatttggattgctcttgtggccgcgaagtcttccgtcgtcgtactcgtacgcaggaacaggagacaccaattgtttagcagtggaatcctaggaggttcccaatatcgtactacaaacagaagggggacagtctgtgtgcacatgaatcaattacttggcgtgttcccgaagaaaacgttttagttgcgtccatcggccctgtcggtggtggggcgccgatgccaggcagacttgcacgcgtccacgttacgcacacgtacctctaaactcctgtggctactacacttccgtcttaactcctgaagctgtttgattgcggcacgcagatcctgtgccgggcgctgggcgggcgcacggggcggtcggccaagggctgggacatcggggtgagctgcatccacccgacggcggcggcggcgcggctgttcgcgccgctgaagctgcccgtgcacatgccggtgatcgagttccaccaggacgaggtgtgggagctgccccccggcgccgaggcgctggcgcggtccgacaagacccgcgtcgagatgttccgcctcggcggccgcgccatgggcgtccagggccacccggagtacagcaaggacgtcctcatgagcatcgccgaccgcctcctccgccacaaccacatactggactgccaggtggaagtggccaagacgagcttcgacgtgcggcagccggacaaggagctgtggagcaaggtgtgcaggggcttcctcaagggaaggctccagtcgtcgcagcagcaaggactgccaggtggaagtggccaagacgagcttcgacgtgcggcagccggacaaggagctgtggagcaaggtgtgcaggggcttcctcaagggaaggctccagtcgtcgcagcagcaaggtgtggcgctatagcaggaggaaattgggggggcattggatgcctaggttaatccgtcatattgtttgttttttatatatcaagagttgtacagaaactgctatcgtcgtccgaagcattaataaaaaaaaggagggaaaaaatagttcgttggtttggttccatctttccgtggcaccagttcattctcgtagtgcctttgcatccacttcttttctttgtaacacacgttgcatatgctgcttgcatcttcggctcatttgtggactcaaacaaaacgactacgacagcgctgtccgcttaccgtcggggtatctgtcgttggaactgatttttacggaggacaaaaaaaaatacaa

SEQ ID NO: 213422 - DNA, 1476 bp, Zea Mays
tgcaattctgttcctgtagaaggaacgatgacccggcggaacggctgtacgatctacgtgggcaacctccccggcgacatccgcgagagggaagtggatgatctcttctacaagtatggacgtatagtggaaattgacttgaaaattccaccaaggcctcctggttttgcttttgttgagtttgaggacgcacgtgatgctgaagatgcaatatatggccgtgatggatacaactttgatggccataggttgcgggtggaattagcccatggtggacgaggcacatcttcttttgatcgatctagcagctatagcagtgctggacaacgcggtgcctcaaaacgttctgattaccgtgttatggttactggattaccttcttcagcatcatggcaagatctcaaggaccatatgcggcgagctggtgatgtctgtttcactgatgtgtatcgtgaggctggagcaactattggaatagctgattatactaactatgaagatatgaaacacgcgataaggaagctagatgattctgagttccgtaatgctttttcaaggacatatgtccgggtgagggagtatgatgctaggcgcagccgttctcgctccagaggcagaaaccgctctaagtcaagaagcagaagccacagccactcgtactcaagaagcagaagctgcagttatagcaagagtaggagcccaagatctagatctgcttcagagtcaaaatcacctgttaaggcaagattggggcaatgtgaggatctgggaattgcattggtaggataatggaatattgagaacgtgatgatggtttggaacgttggatagtcacagctggattgtgatgcattgtatgacaagtggactgccaccagcaataggagcaagatagggctggcaccacacatacggacaggattttttgatcaccatccagatcccctcctgtttctccccggcgtgacaagtctgcaagcaggagtcctgccaggagcaagagtctgccccgatcttgttctccggcaaaatcagagtgaatcggattctgcacttgaaacgttcagaaaggcagagctcgagctaaaagattgctgtacggattatgagcactgtgctagtagcattgctgtcccttccatatttttacaaatactctgttctttgaggagatcactgtatgctactactctgtacctgacatgatgcaaacgttgttggtttttgaacttagcagaacgatgactttgatcagctccatccattccttccattttttttttctgaatatttcaaaagattgtagtatgcagctattgttattctctgatgcactcctgtgtcctgtcattgtggaaaaaaaatggaattctaccattcatgtgatgtgtctaaaaaatgcaactctagcttgcgattagatgcagttgtttgcttttgttcaatcaacagatatgaagaataaaaagagtaggg

SEQ ID NO: 213423 - DNA, 1337 bp, Zea Mays
ctccggtcgaaatatagtgtgcaattctgttcctgtagaaggaacgatgacccggcggaacggctgtacgatctacgtgggcaacctccccggcgacatccgcgagagggaagtggatgatctcttctacaagggaaggcaatgtggattgcgaatgtatggacgtatagtggaaattgacttgaaaattccaccaaggcctcctggttttgcttttgttgagtttgaggacgcacgtgatgctgaagatgcaatatatggccgtgatggatacaactttgatggccataggttgcgggtggaattagcccatggtggacgaggcacatcttcttttgatcgatctagcagctatagcagtgctggacaacgcggtgcctcaaaacgttctgattaccgtgttatggttactggattaccttcttcagcatcatggcaagatctcaaggaccatatgcggcgagctggtgatgtctgtttcactgatgtgtatcgtgaggctggagcaactattggaatagctgattatactaactatgaagatatgaaacacgcgataaggaagctagatgattctgagttccgtaatgctttttcaaggacatatgtccgggtgagggagtatgatgctaggcgcagccgttctcgctccagaggcagaaaccgctctaagtcaagaagcagaagccacagccactcgtactcaagaagcagaagctgcagttatagcaagagtaggagcccaagatctagatctgcttcagagtcaaaatcacctgttaaggcaagatcaccatccagatcccctcctgtttctccccggcgtgacaagtctgcaagcaggagtcctgccaggagcaagagtctgccccgatcttgttctccggcaaaatcagagtgaatcggattctgcacttgaaacgttcagaaaggcagagctcgagctaaaagattgctgtacggattatgagcactgtgctagtagcattgctgtcccttccatatttttacaaatactctgttctttgaggagatcactgtatgctactactctgtacctgacatgatgcaaacgttgttggtttttgaacttagcagaacgatgactttgatcagctccatccattccttccattttttttttctgaatatttcaaaagattgtagtatgcagctattgttattctctgatgcactcctgtgtcctgtcattgtggaaaaaaaatggaattctaccattcatgtgatgtgtctaaaaaatgcaactctagcttgcgattagatgcagttgtttgcttttgttcaatcaacagatatgaagaataaaaagagtaggg

SEQ ID NO: 213424 - DNA, 1539 bp, Zea Mays
cccctctccgccccggaagccgtagtcctccggtcgaaatatagtgtgcaattctgttcctgtagaaggaacgatgacccggcggaacggctgtacgatctacgtgggcaacctccccggcgacatccgcgagagggaagtggatgatctcttctacaagggaaggcaatgtggattgcgaatgtatggacgtatagtggaaattgacttgaaaattccaccaaggcctcctggttttgcttttgttgagtttgaggacgcacgtgatgctgaagatgcaatatatggccgtgatggatacaactttgatggccataggtggaattagcccatggtggacgaggcacatcttcttttgatcgatctagcagctatagcagtgctggacaacgcggtgcctcaaaacgttctgattaccgtgttatggttactggattaccttcttcagcatcatggcaagatctcaaggaccatatgcggcgagctggtgatgtctgtttcactgatgtgtatcgtgaggctggagcaactattggaatagctgattatactaactatgaagatatgaaacacgcgataaggaagctagatgattctgagttccgtaatgctttttcaaggacatatgtccgggtgagggagtatgatgctaggcgcagccgttctcgctccagaggcagaaaccgctctaagtcaagaagcagaagccacagccactcgtactcaagaagcagaagctgcagttatagcaagagtaggagcccaagatctagatctgcttcagagtcaaaatcacctgttaaggcaagattggggcaatgtgaggatctgggaattgcattggtaggataatggaatattgagaacgtgatgatggtttggaacgttggatagtcacagctggattgtgatgcattgtatgacaagtggactgccaccagcaataggagcaagatagggctggcaccacacatacggacaggattttttgatcaccatccagatcccctcctgtttctccccggcgtgacaagtctgcaagcaggagtcctgccaggagcaagagtctgccccgatcttgttctccggcaaaatcagagtgaatcggattctgcacttgaaacgttcagaaaggcagagctcgagctaaaagattgctgtacggattatgagcactgtgctagtagcattgctgtcccttccatatttttacaaatactctgttctttgaggagatcactgtatgctactactctgtacctgacatgatgcaaacgttgttggtttttgaacttagcagaacgatgactttgatcagctccatccattccttccattttttttttctgaatatttcaaaagattgtagtatgcagctattgttattctctgatgcactcctgtgtcctgtcattgtggaaaaaaaatggaattctaccattcatgtgatgtgtctaaaaaatgcaactctagcttgcgattagatgcagttgtttgcttttgttcaatcaacagatatgaagaataaaaagagtaggg

SEQ ID NO: 213425 - DNA, 1349 bp, Zea Mays
ctccgcgaacccctctccgccccggaagccgtagtcctccggtcgaaatatagtgtgcaattctgttcctgtagaaggaacgatgacccggcggaacggctgtacgatctacgtgggcaacctccccggcgacatccgcgagagggaagtggatgatctcttctacaagtatggacgtatagtggaaattgacttgaaaattccaccaaggcctcctggttttgcttttgttgagtttgaggacgcacgtgatgctgaagatgcaatatatggccgtgatggatacaactttgatggccataggttgcgggtggaattagcccatggtggacgaggcacatcttcttttgatcgatctagcagctatagcagtgctggacaacgcggtgcctcaaaacgttctgattaccgtgttatggttactggattaccttcttcagcatcatggcaagatctcaaggaccatatgcggcgagctggtgatgtctgtttcactgatgtgtatcgtgaggctggagcaactattggaatagctgattatactaactatgaagatatgaaacacgcgataaggaagctagatgattctgagttccgtaatgctttttcaaggacatatgtccgggtgagggagtatgatgctaggcgcagccgttctcgctccagaggcagaaaccgctctaagtcaagaagcagaagccacagccactcgtactcaagaagcagaagctgcagttatagcaagagtaggagcccaagatctagatctgcttcagagtcaaaatcacctgttaaggcaagatcaccatccagatcccctcctgtttctccccggcgtgacaagtctgcaagcaggagtcctgccaggagcaagagtctgccccgatcttgttctccggcaaaatcagagtgaatcggattctgcacttgaaacgttcagaaaggcagagctcgagctaaaagattgctgtacggattatgagcactgtgctagtagcattgctgtcccttccatatttttacaaatactctgttctttgaggagatcactgtatgctactactctgtacctgacatgatgcaaacgttgttggtttttgaacttagcagaacgatgactttgatcagctccatccattccttccattttttttttctgaatatttcaaaagattgtagtatgcagctattgttattctctgatgcactcctgtgtcctgtcattgtggaaaaaaaatggaattctaccattcatgtgatgtgtctaaaaaatgcaactctagcttgcgattagatgcagttgtttgcttttgttcaatcaacagatatgaagaataaaaagagtaggg

SEQ ID NO: 213426 - DNA, 1554 bp, Zea Mays
aaagcgaacaatccacaattcccagtaccctcacgccggcatccgtcgaagctgctcgacctcgactcaagccttccttgctccttgccgccgtcgagtcgtcgcaggaacgatgacccggcggaacggctgtacgatctacgtgggcaacctccccggcgacatccgcgagagggaagtggatgatctcttctacaagtatggacgtatagtggaaattgacttgaaaattccaccaaggcctcctggttttgcttttgttgagtttgaggacgcacgtgatgctgaagatgcaatatatggccgtgatggatacaactttgatggccataggtggaattagcccatggtggacgaggcacatcttcttttgatcgatctagcagctatagcagtgctggacaacgcggtgcctcaaaacgttctgattaccgtgttatggttactggattaccttcttcagcatcatggcaagatctcaaggaccatatgcggcgagctggtgatgtctgtttcactgatgtgtatcgtgaggctggagcaactattggaatagctgattatactaactatgaagatatgaaacacgcgataaggaagctagatgattctgagttccgtaatgctttttcaaggacatatgtccgggtgagggagtatgatgctaggcgcagccgttctcgctccagaggcagaaaccgctctaagtcaagaagcagaagccacagccactcgtactcaagaagcagaagctgcagttatagcaagagtaggagcccaagatctagatctgcttcagagtcaaaatcacctgttaaggcaagattggggcaatgtgaggatctgggaattgcattggtaggataatggaatattgagaacgtgatgatggtttggaacgttggatagtcacagctggattgtgatgcattgtatgacaagtggactgccaccagcaataggagcaagatagggctggcaccacacatacggacaggattttttgatcaccatccagatcccctcctgtttctccccggcgtgacaagtctgcaagcaggagtcctgccaggagcaagagtctgccccgatcttgttctccggcaaaatcagagtgaatcggattctgcacttgaaacgttcagaaaggcagagctcgagctaaaagattgctgtacggattatgagcactgtgctagtagcattgctgtcccttccatatttttacaaatactctgttctttgaggagatcactgtatgctactactctgtacctgacatgatgcaaacgttgttggtttttgaacttagcagaacgatgactttgatcagctccatccattccttccattttttttttctgaatatttcaaaagattgtagtatgcagctattgttattctctgatgcactcctgtgtcctgtcattgtggaaaaaaaatggaattctaccattcatgtgatgtgtctaaaaaatgcaactctagcttgcgattagatgcagttgtttgcttttgttcaatcaacagatatgaagaataaaaagagtaggg

SEQ ID NO: 213427 - DNA, 1452 bp, Zea Mays
aaagcgaacaatccacaattcccagtaccctcacgccggcatccgtcgaagctgctcgacctcgactcaagccttccttgctccttgccgccgtcgagtcgtcgcaggaacgatgacccggcggaacggctgtacgatctacgtgggcaacctccccggcgacatccgcgagagggaagtggatgatctcttctacaaggtgagtggttggttgggttgtgtaccgagcttcccaccctatttttagggcttctcgtcgaatgctagatccgtggggaggttgttgtggtgtcagtcaagcctgcgagtatgatatggggagattagaggagtgttggggatgttagaggagtgttggggatgttttctttatggctatggctcaatattgctgaagtcgaagagatgcctatgatgtaatgtagcgtttgctcatattgatatttgcagtttaataaactcttactgtgagttttataatcgtcgtgtgtgttagacaatgcacttgtttttttcactgtattgtcacaatctattttggtgatgattgaaagttctgttcgttgtgaacttcaccactgctaattgtgttttgccttctaacaccatctaatctaatatggatggagctctggaagggaaggcaatgtggattgcgaatggtcaatttttgtttgtatctctatgactctactttggttgattaactttcctggatgttaaatttatgttttaccttctgcttctgcagtatggacgtatagtggaaattgacttgaaaattccaccaaggcctcctggttttgcttttgttgagtttgaggacgcacgtgatgctgaagatgcaatatatggccgtgatggatacaactttgatggccataggtggaattagcccatggtggacgaggcacatcttcttttgatcgatctagcagctatagcagtgctggacaacgcggtgcctcaaaacgttctgattaccgtgttatggttactggattaccttcttcagcatcatggcaagatctcaaggaccatatgcggcgagctggtgatgtctgtttcactgatgtgtatcgtgaggctggagcaactattggaatagctgattatactaactatgaagatatgaaacacgcgataaggaagctagatgattctgagttccgtaatgctttttcaaggacatatgtccgggtgagggagtatgatgctaggcgcagccgttctcgctccagaggcagaaaccgctctaagtcaagaagcagaagccacagccactcgtactcaagaagcagaagctgcagttatagcaagagtaggagcccaagatctagatctgcttcagagtcaaaatcacctgttaaggcaagttgcacaactgaaacaagaaagctgtggccctgttggaccatttcaatccatgttggctatatctttgtttgctga

SEQ ID NO: 213428 - DNA, 949 bp, Zea Mays
ccaggctgcacgaatcgcaaagcgaacaatccacaattcccagtaccctcacgccggcatccgtcgaagctgctcgacctcgactcaagccttccttgctccttgccgccgtcgagtcgtcgcaggaacgatgacccggcggaacggctgtacgatctacgtgggcaacctccccggcgacatccgcgagagggaagtggatgatctcttctacaagggaaggcaatgtggattgcgaatgtatggacgtatagtggaaattgacttgaaaattccaccaaggcctcctggttttgcttttgttgagtttgaggacgcacgtgatgctgaagatgcaatatatggccgtgatggatacaactttgatggccataggttgcgggtggaattagcccatggtggacgaggcacatcttcttttgatcgatctagcagctatagcagtgctggacaacgcggtgcctcaaaacgttctgattaccgtgttatggttactggattaccttcttcagcatcatggcaagatctcaaggaccatatgcggcgagctggtgatgtctgtttcactgatgtgtatcgtgaggctggagcaactattggaatagctgattatactaactatgaagatatgaaacacgcgataaggaagctagatgattctgagttccgtaatgctttttcaaggacatatgtccgggtgagggagtatgatgctaggcgcagccgttctcgctccagaggcagaaaccgctctaagtcaagaagcagaagccacagccactcgtactcaagaagcagaagctgcagttatagcaagagtaggagcccaagatctagatctgcttcagagtcaaaatcacctgttaaggcaagttgcacaactgaaacaagaaagctgtggccctgttggaccatttcaatccatgttggctatatctttgtttgctga

SEQ ID NO: 213429 - DNA, 1351 bp, Zea Mays
ttcgtctatttgcggttctcggcgcaatacatttcccaacacagcgccgtacgcacagcacagtcacggtactccaccgctaaaaccttcggaaagaatccccaaatctcgcacacctcgaagccttcgaggcccgaaaccctagctcctcggcctccccgccgcttccacccatggctccaggactgcagcgcttcactgacattgcggacgacggcacgccccagctcgacgccgcgtccggcgaggagctggtccgtgtggaccgcaccgtggctgtcgcccttggcccccgctcgccggagtccccggggactctgttcgtcaccaccaggagggtgatttggctcagcgaagcggagaagggcaagggctacgcggtggacttcctcgccatctcgcttcacgctgtgtcgcgcgacctcgaggcgtacccctcgccctgtatctacactcagattgaggcagcagttggtacagaagaggaggctggggaatcaaatcctgaagcaaatgaactagagctatctagagtatctgaaatgaggctcatactagcggaccccggtcaactggatgcactttttgatgtcttctgtcattgtgctgaactgaatcctgaccctaatgctgagtgcaatggggagaatggctggatccgtggtgaagatatgtctaatggtgactggattcgtgatgatgtggacatggttgatgcttcaaatcaacgaccaacgttttgaggatgcagaggaggaacaggagagccatgaaaataatggacattagaaacagagacatgttcctcgagagcatcatgtgatttattttgttgtaaatcactaccgatgcagctcggtttgcctactgtttcatctacactttctcttcctttttccttgatgttataggattaacatcactgggtgactttctggaattgcatcgatggttccttttgggacccgtctctctttcgtatatcagggatagtagcaattgaagtacagcggcttcaggattggccatatggacaatggacacgagacgagtgtagagcgcgtggtgtccatcccgacggtgcaacagagaacgcaaagcaagtgttgctgtgtactttacaattgctgtgtattcgtataatatgtttgttaaggatgtctttaccagccattctatgattctatcctatcctctatcttatcccatattttaaacttaggccttatttgttttctaatactaaattttagtccttgtcatatcaaatatatgacaaatgttttggaagctagttagaatattaaatataatttaattacaaaattaattaaactgataagaactaaac

SEQ ID NO: 213430 - DNA, 730 bp, Zea Mays
gcggttccttttcttgtatattataatgctagctgaagttcttgaatgttctacagagggagataggtgaagttgaaaagaacaaagacgctttcctggcagacttcacccaggaggactatgacgacattgtgaatggctggaacgcgaagctgaaacggagctctgccggcgagcagaggtgggggttgttcattgccaccaagtgatttggcctggcagcaggagggctcttcggaataagaatggatgtggctctaactctgcttctagaccggtgatggttcagcttagaagcaggggatcttcatcatcagaataaaaacgtgtgttgttgtgttgctgtgtctacgccactagtatttctgttgttacttatgttctaggtaaactgcgcagccagagcagagctgaagaatatgtactgcttgctcgctcttgtgtggttgtgtctacccctactagcatttcagctttgttgtaggtaaactgcgaacccagagttgcagaacccgtactgctcgtttaagttcatggtgaactacgagctaaaaggctgttgccagagtcgatgtcacttgtcactggaggtccccggttcaattcagatgttgctttggcacgtgctattcttttggacggaggcagctagtgtcaagtacttcgttcgggaaaagagacaacggaatcctgccggtgtcggcaatgggctaggcagcttctggggcag

SEQ ID NO: 213431 - DNA, 1860 bp, Zea Mays
tggacattgacatttggcacgccatcagcatgagccctcctcctcctcctcctcccacctcctcctctagataggacgaagctagctgccgccgccgctcccccgtccgaaacgggccgggacgatacatggcgctgatgactggtcgtcgtcgggggagctcgagacggctgtgttcttcaccttcttcctgttcccgacgaaagaggccttccacgtacaccaattatcgcttgtactagctaccacagcagagaggggaggggcccgggcgcccggccaaccgagttgcgcacgcaggctgtacgcaaccgcagcagccaggctaaggtgctaggtagctagtttgtagagtgcgcgcgcgcggggcaggtggcgtgttggcgccgtcatcgtactcgtacgtacgtctgttctctctctgcggatggtcatcatggccgggatgctccccggcgtggagttcgcgcggcgccggcggcgggcgtcgtccttgtgcctgtacgcaccttcttccaaggagtggagcagcgcgtgcatggagacgacggcgacggcgactgcgcgcgcgtggacgacgctggggctgggcagcggcgcccgggaggcgaaggagaggctggatcagaagctccgtgcccagagacaacctgtggtgctcaagaggcatgagatgagcacgagccccacgatcaccaaagcgcacgacgacgcaacgtgcaggtgcagcggtggcctccaccgccaccactcgtcagcgtgcagcagcgacacgggcgtgctgctgcggcgggaagtggtgtcgtcgccgaaaccgaacaagaagggaggaggaggaggagggggccggttcggctggtgccggctactggcaggcgggcggcgcgggccgccggcggcagcggaggcggggtgcgcggtgtgcctggaggagctccgcgcgggggacgtggtggcgcgcctgccctgcgcgcaccgcttccactggtcctgcgccgtgccctgggtccaggccgcgtcgcggtgccccgtctgccgcgcccacgcccgcgtctagctgcctcatcggctgctgctggcctgcacccgcggcgcgccgcatgggatgcgtcgtgcctcgtgtcaaagagaaggccgcgccatgcacggacggggagaagagaaccacgagctaaagcaaccaggacaaatagggaggggagccgagggtactgcgtgtctaaacatttttttttacccgcctacagaagtaatgcgcccccactgtgtcatgatgtcaaataacaaacatcaggcagtatacctgaaatagaaataagatatgtaatggtgtaaatatagggggtgtttggtttctagggactaatgtttagtcccatcattttattccattttagtctataaattatcaaatatagaaactaaaatagagttttagtttctatatttggcaattttggaactaaaatggaataaaatgtagggactaaaaattagtccctagaaaccaaacacccccatatacacgcagttaatccgaacgttgtaaatacagcagaaggtaccgtggtacggcatgacgtattggtattgactcgcggagaattgcacaggtagccacatactgcattctctttccaggatatattatccaagaagctatcccgtctgtcctcttgttgtacgactaaaggtactctagctaccagactaggctgtctccaacaaggacctgtataaggtccggtacgctatatttacaggtttgtgagctcctgcatccatccagcaatagactctaaatgctcctctaaaatatagagggtgagcttcgtccgccatttgtagagactgtacgag

SEQ ID NO: 213432 - DNA, 1863 bp, Zea Mays
tgccggagagcgccggtagctccggcaccgctgggggtcctggactcggccgtggattagtctctgacgaggtacaatcacgacagtcagggcgacaagtgagtgccctgaattttcaggcttctctagctgctaaggatctccaggtttccagtgagtcaaatccaaggctgcattcgtcttcaagtaccataagccatcatctcagattcaatcacctcaattaccatgaaaacaaggaagatggcctggggtctgaaaacgctgaaacaagtggtcttcaaagctcatctaggaaacctgtcatggtaaggggaagtctcattaatgaagctgttaatggtgacatatcaggagaaggaataagttctataggatcagagctggaaaatgttcctagcacagtctccactaatgaaattggtggctcaacttctgaatctggtttgggcccctcatcgatgacatctgaaaggatcatgtctgactcagaagtagagatatctccgcaagggacctcatccacaactgtcatgacaagtgaaagatcagatgcatctcaatctagcttaacatctgtgttttctaactcttcaactgcatcatctgtgatcgtggaaccaatgccagatccaatccctacaacggcagatgtccccatattcagtgggccacatggtgaagctggagggagtatattacatgacgacatgatgagcattttctcaaatgacggtgtaggacgctctatagattcaagcagcagtgaaacaaggaggagtcacagaaggatcctgtgggatgcattttccaggcgtggctcaagaggttatccagaatctgatgctgatgaaatgggattttttagtacatggctagaccttggtgatgatatttttgaagagttgggggaatcaagatattttcatcgcaggcgacatggttcaatcagagtaagccagtattcaagatcccggattagggagcatcgccgtgctgtttttgatagtggtaatgaacaaaacactgctgcatgtcctttggggattcatcaaattggccgatgcacctgtaattctttctttattgctgaagaatctagcgcccgagcaagtatatcaagaattgtcatgttaactgaggcgctatttgaggtgttggatgaaattcaccgtcaacctgcatcactttcactttccatggtctctgttcaggctcctgaatctgtagttgattcgttgccatgtgccatatctgcctaaccgaatatgaggacggagaccagataagaacccttccgtgcaagcacgagttccacctgcaatgcgttgacaagtggctgaaagaaatacacagggtgtgccctctgtgccgtggagacgtctgcgaagtcgcctcgtgaagaccttggcgctgccatccttccgatgtggcgccggtggatagggcaccaccgccaggcgccagctgttccgtggttgaagctggttcggtcaggcaatggtgatccaacttggacagttgacaccgcaagagcacgtcaactttgactgtctccctgccgaagagaatggccaaaccaaccctgcgaccgatgagtcgctgttcctgtcatcaacttttaagataccgagactttgtatacagtagcttttgtagcctcccgcctcgtgtatgacagcctgtacatatttgtaaattctggaatcaaatgtcacaatcccctgttctcgtgacctgatgttgtagggaacatattcggtgctgatggagccgggaacagagatgtgctgatggagatggaacttattcggtgctgagccttcgtggcttgagcagcggaactgctggtgaaggtctatt

SEQ ID NO: 213433 - DNA, 2076 bp, Zea Mays
gcacttccgagcgatttcctcgtcatttctctcatccgctgcgcaccctctcccactcggcgaagaagtggggggaaaagctcgaaagcgggagccggcgagcgagatgggcgcagggagcagccgcgcggacgcgccgtcgcggcgccgggcgcgcctcagcctcggcgggtgcttcggggccggatcctcctcgtccgcgcacgacggcgggagcttcgccgccgccgggccctcctcctcgcgcgccatcgaggtacaatcacgacagtcagggcgacaagtgagtgccctgaattttcaggcttctctagctgctaaggatctccaggtttccagtgagtcaaatccaaggctgcattcgtcttcaagtaccataagccatcatctcagattcaatcacctcaattaccatgaaaacaaggaagatggcctggggtctgaaaacgctgaaacaagtggtcttcaaagctcatctaggaaacctgtcatggtaaggggaagtctcattaatgaagctgttaatggtgacatatcaggagaaggaataagttctataggatcagagctggaaaatgttcctagcacagtctccactaatgaaattggtggctcaacttctgaatctggtttgggcccctcatcgatgacatctgaaaggatcatgtctgactcagaagtagagatatctccgcaagggacctcatccacaactgtcatgacaagtgaaagatcagatgcatctcaatctagcttaacatctgtgttttctaactcttcaactgcatcatctgtgatcgtggaaccaatgccagatccaatccctacaacggcagatgtccccatattcagtgggccacatggtgaagctggagggagtatattacatgacgacatgatgagcattttctcaaatgacggtgtaggacgctctatagattcaagcagcagtgaaacaaggaggagtcacagaaggatcctgtgggatgcattttccaggcgtggctcaagaggttatccagaatctgatgctgatgaaatgggattttttagtacatggctagaccttggtgatgatatttttgaagagttgggggaatcaagatattttcatcgcaggcgacatggttcaatcagaattagggagcatcgccgtgctgtttttgatagtggtaatgaacaaaacactgctgcatgtcctttggggattcatcaaattggccgatgcacctgtaattctttctttattgctgaagaatctagcgcccgagcaagtatatcaagaattgtcatgttaactgaggcgctatttgaggtgttggatgaaattcaccgtcaacctgcatcactttcactttccatggtctctgttcaggctcctgaatctgtagttgattcgttgccatgtaagagctacaaaaagcttgagacaccccaatgcagtgatgatatggaacagtgccatatctgcctaaccgaatatgaggacggagaccagataagaacccttccgtgcaagcacgagttccacctgcaatgcgttgacaagtggctgaaagaaatacacagggtgtgccctctgtgccgtggagacgtctgcgaagtcgcctcgtgaagaccttggcgctgccatccttccgatgtggcgccggtggatagggcaccaccgccaggcgccagctgttccgtggttgaagctggttcggtcaggcaatggtgatccaacttggacagttgacaccgcaagagcacgtcaactttgactgtctccctgccgaagagaatggccaaaccaaccctgcgaccgatgagtcgctgttcctgtcatcaacttttaagataccgagactttgtatacagtagcttttgtagcctcccgcctcgtgtatgacagcctgtacatatttgtaaattctggaatcaaatgtcacaatcccctgttctcgtgacctgatgttgtagggaacatattcggtgctgatggagccgggaacagagatgtgctgatggagatggaacttattcggtgctgagccttcgtggcttgagcagcggaactgctggtgaaggtctatt

SEQ ID NO: 213434 - DNA, 493 bp, Zea Mays
ttgtaccagctgctgcaagccaatatacaaatacaagagctgcaactcagcaagattggagtgggacagccaaaatacaatgaagctgtcacttcacatctaacacactatgttcgtcttcgctgatgcatgcactacaagttgtaagtcaagaacttagtatcttccatgcatatgggttatcgttacttttgtcagtatctcagaccgtgtccagcagctttttcatatgattatccaaaacactgttttacattgttttgcactgtagactgcactattcgctgagtagagtttgaatatgaagatgaggatggataagctgttggagatagtctcagcaaattctaacagatcgcagtgtactgcatgtcggcttgtgtaactcgtaggaccactaccatatcaagaaataaatatttaatactggtaaggtaacggcaagacaaatttgccaagcttattaagggggaaattgacaaacacttttagc

SEQ ID NO: 213435 - DNA, 502 bp, Zea Mays
gtttgttcaagacaaccaaacatgccgtaactctcatagatacaagagctgcaactcagcaagattggagtgggacagccaaaatacaatgaagctgtcacttcacatctaacacactatgttcgtcttcgctgatgcatgcactacaagttgtaagtcaagaacttagtatcttccatgcatatgggttatcgttacttttgtcagtatctcagaccgtgtccagcagctttttcatatgattatccaaaacactgttttacattgttttgcactgtagactgcactattcgctgagtagagtttgaatatgaagatgaggatggataagctgttggagatagtctcagcaaattctaacagatcgcagtgtactgcatgtcggcttgtgtaactcgtaggaccactaccatatcaagaaataaatatttaatactggtaaggtaacggcaagacaaatttgccaagcttattaagggggaaattgacaaacacttttagc

SEQ ID NO: 213436 - DNA, 1181 bp, Zea Mays
tccgtgtttgttatgtatgcgcaaacagttcgaaacgagcgagcgtatggctgtctccgtccggttgtagcgaagtccgacggcgggatccgattgtggcgaagtcacgcccgtgcagtgcgcccacagcaaaaagctccgcggcggtcgcgtgacgtcgcggcaaacggcaaacagcgaattcacagcagcaaacagtgtgaatcctgcaatctccaaacccaagcccggcggcgagatccgcgcggcaggcggacggggccgctcgaccgccttcgtgccttccaattcatgacggtgcggccggggtgggtggtgagggtggcgcatggctcggcggcggcgtggcagcgcgtggcgtgcaacccggagacgctcccgcctgaccgcgtcctcgcgctcatctgctgcgcgccactccacctcctcgcgcgcctcgccgccttcctctgcgtccccttcctccccgggcccgcacacaccccgctccgcctccaccgccgccgcttcctcgtcctccgccccccggagtttgcgccgcaccctttcgcttactccccctcgtcttcctcttcttcgtcggatgaggaagaggacgacgacgatggggacggcatccacgaacacgtcgattgaggtttgtaggccaaaaaggaaaaatggagataactttctcagaacatatctattcatgtgtttttgctacaaggttttgggtcatacctttgtgggagcacaatgtgatcctgatatcctctgcgtctctaattggtcatagcatgctaacttatgggaggttgcttgaggttaaggctcagaaaaggagaatttggggttgaggagggaagaatgaacattggcatgttgtgctggatgctgaactgctcgcccttctatgattctatctcgtagttctcaggatatggcattatgacgacgctcattataaaaagccaggtcagaagctctgcaaaaaggataccaacggatgaaactggtttgagttgtcattattgttgctgttgtttaaacgaactactgatttttttttttatattgaaaagaagaaagtggatgaggttaaaccttggtaaagaggatggttgtgttagacttggcgagtcaacgttaaacttagtcattttaatagtaatggaatctgaaagaaattcattgtggcg

SEQ ID NO: 213437 - DNA, 1315 bp, Zea Mays
gttatgtatgcgcaaacagttcgaaacgagcgagcgtatggctgtctccgtccggttgtagcgaagtccgacggcgggatccgattgtggcgaagtcacgcccgtgcagtgcgcccacagcaaaaagctccgcggcggtcgcgtgacgtcgcggcaaacggcaaacagcgaattcacagcagcaaacagtgtgaatcctgcaatctccaaacccaagcccggcggcgagatccgcgcggcaggcggacggggccgctcgaccgccttcgtgccgtgcgcgcctccccacctcttccgttctccgctccccgcgcccgcgaaggcgaattgctgaattgagggtggtggctcgtgcttgattttgattttgggggtcggtttcagttccaattcatgacggtgcggccggggtgggtggtgagggtggcgcatggctcggcggcggcgtggcagcgcgtggcgtgcaacccggagacgctcccgcctgaccgcgtcctcgcgctcatctgctgcgcgccactccacctcctcgcgcgcctcgccgccttcctctgcgtccccttcctccccgggcccgcacacaccccgctccgcctccaccgccgccgcttcctcgtcctccgccccccggagtttgcgccgcaccctttcgcttactccccctcgtcttcctcttcttcgtcggatgaggaagaggacgacgacgatggggacggcatccacgaacacgtcgattgaggtttgtaggccaaaaaggaaaaatggagataactttctcagaacatatctattcatgtgtttttgctacaaggttttgggtcatacctttgtgggagcacaatgtgatcctgatatcctctgcgtctctaattggtcatagcatgctaacttatgggaggtataagaattaaggccatggaattgtgtgtcttgtgcaaactcatgcatatgagtgcattatatgtttttcgttatgattctctttgctgcagtgtcttgcttctctgaatttctagcttggttaaaagaatcacctcgttgtgtccatttctggcttggttaaaaaaatcttctcgttgtgttccgtcctctcacgagttatgtcctgcgcaccactctctggctgggccattgcagagtggatggtgacggcccgcaagtgatgggggaccagggttcggagattttttagctgggaccatgttttggtctcttcttagccattagtgggttgtgtgcgtcttgagtgccgacccaagcattatatcgggagggtggtctttctctccccgaccgagttttttttagtatggac

SEQ ID NO: 213438 - DNA, 1013 bp, Zea Mays
gttatgtatgcgcaaacagttcgaaacgagcgagcgtatggctgtctccgtccggttgtagcgaagtccgacggcgggatccgattgtggcgaagtcacgcccgtgcagtgcgcccacagcaaaaagctccgcggcggtcgcgtgacgtcgcggcaaacggcaaacagcgaattcacagcagcaaacagtgtgaatcctgcaatctccaaacccaagcccggcggcgagatccgcgcggcaggcggacggggccgctcgaccgccttcgtgccttccaattcatgacggtgcggccggggtgggtggtgagggtggcgcatggctcggcggcggcgtggcagcgcgtggcgtgcaacccggagacgctcccgcctgaccgcgtcctcgcgctcatctgctgcgcgccactccacctcctcgcgcgcctcgccgccttcctctgcgtccccttcctccccgggcccgcacacaccccgctccgcctccaccgccgccgcttcctcgtcctccgccccccggagtttgcgccgcaccctttcgcttactccccctcgtcttcctcttcttcgtcggatgaggaagaggacgacgacgatggggacggcatccacgaacacgtcgattgaggttgcttgaggttaaggctcagaaaaggagaatttggggttgaggagggaagaatgaacattggcatgttgtgctggatgctgaactgctcgcccttctatgattctatctcgtagttctcaggatatggcattatgacgacgctcattataaaaagccaggtcagaagctctgcaaaaaggataccaacggatgaaactggtttgagttgtcattattgttgctgttgtttaaacgaactactgatttttttttttatattgaaaagaagaaagtggatgaggttaaaccttggtaaagaggatggttgtgttagacttggcgagtcaacgttaaacttagtcattttaatagtaatggaatctgaaagaaattcattgtggcg

SEQ ID NO: 213439 - DNA, 1867 bp, Zea Mays
ctctctcgctacgcccctgaccattataagaaatgacacatgccatcccaatttgaaacatataagagtcgtggcttctcacagttatattttttattttcaaattattagtgtacatatatatttacaatctctctcctttatataacataaaagacatgagttgtagtggtagacgtcaagtgctttatacgaagcaaatagggtttgaatcttccacaacttattttttttggatattctgtgcgggggaggaagcaaatcgaatcagtcttttacctcaacaccagctgacatcgccagccatgaaactgttggtctgacgagcgcgcctttgcttggaaccgtagtattatctcttagtcaccgtcaagccatgtcgctcacattagcatctggtgcttataatttgttgtttgttttctccaagttttgaagttagagtagcaaacaattaaggacttgggatgcagaacattaaggatttgtaccatttactataggggcaaggaggtttctagtgagtcatcgatctaaaatcttttatgctctctttgtgtttactgtttagagttgtttagttctgatatgaactaagggcatgtttgcttcgcaccttcctgcgccaggcaagaattttggccaggtgtctagaactcaacgtcggagaattcaagatgcttaatgccccctcagaattcaagatgcataatatttcttatgtgatgcttacacttgtcctagcactactacttgtcaaaacagtggaaaagttactagattgttcaatcatcactactatgtagttgtgttgcacctgcacttccaatcatcacttactaagttactaattagtagaaaaggctacattattgtggatactttttcataatttacatcattatttgcacctccatgttatgtttgtattcatgggaatattcaaagattcatatcacgagttcacgaccgcatggtgctaagggattatgccatgcaacaaacctgtgtttgaacaaaaactatttagagccagcatctgattaacaaaaactatatattttgaacaaaaactatattgataggaatgcttagcccatatatggtcatcatttggagctgtacatcttagtctctgattatgctaattgatttttgctggtgtgctagggtagtctcagatggaattttcactgaaggcagggttttgatccttgaatagtaagttttcagttaatgggccatgttgatttgattatagcagacttttttctgtatgcggggatagtagccttgacagcattaagtggcattagtgctacattcctcagcttgcctgcagggatcaggcagggaaaaattattggtactaagtatttatttagaattacaattcaccttggttttgttatagatcaatatgaaaggatgttcgatttgggcataagctaaaaagaacttgtgagagtatttgattctgcaaagcactttcgaacactaaaatgagcttaattcgaatatcccaattaataatgatttatctgtatatccttttcatctaataatagcattacttgcatatagataacatcaggtgttgttttttgtcacgtgatgcttccccttttccttccaagaagatttatgcattgttcgatgggctcctgatactgccaggagtgacccttccactgctgctaacttcgagcttgatcaaaaggtctttctactcatatgcaaggtgtaagactatcgagttatgtggtatattggtgttgatcattcatgtaatcactttgaggctatgggtgtttgccttgctcatacttatttaatttgcttccatctatgagattagaaaaaaaaa

SEQ ID NO: 213440 - DNA, 1448 bp, Zea Mays
ctctctcgctacgcccctgaccattataagaaatgacacatgccatcccaatttgaaacatataagagtcgtggcttctcacagttatattttttattttcaaattattagtgtacatatatatttacaatctctctcctttatataacataaaagacatgagttgtagtggtagacgtcaagtgctttatacgaagcaaatagggtttgaatcttccacaacttattttttttggatattctgtgcgggggaggaagcaaatcgaatcagtcttttacctcaacaccagctgacatcgccagccatgaaactgttggtctgacgagcgcgcctttgcttggaaccgtagtattatctcttagtcaccgtcaagccatgtcgctcacattagcatctggtgcttataatttgttgtttgttttctccaagttttgaagttagagtagcaaacaattaaggacttgggatgcagaacattaaggatttgtaccatttactataggggcaaggaggtttctagtgagtcatcgatctaaaatcttttatgctctctttgtgtttactgtttagagttgtttagttctgatatgaactaagggcatgtttgcttcgcaccttcctgcgccaggcaagaattttggccaggtgtctagaactcaacgtcggagaattcaagatgcttaatgccccctcagaattcaagatgcataatatttcttatgtgatgcttacacttgtcctagcactactacttgtcaaaacagtggaaaagttactagattgttcaatcatcactactatgtagttgtgttgcacctgcacttccaatcatcacttactaagttactaattagtagaaaaggctacattattgtggatactttttcataatttacatcattatttgcacctccatgttatgtttgtattcatgggaatattcaaagattcatatcacgagttcacgaccgcatggtgctaagggattatgccatgcaacaaacctgtgtttgaacaaaaactatttagagccagcatctgattaacaaaaactatatattttgaacaaaaactatattgataggaatgcttagcccatatatggtcatcatttggagctgtacatcttagtctctgattatgctaattgatttttgctggtgtgctagggtagtctcagatggaattttcactgaaggcagggttttgatccttgaataatttatgcattgttcgatgggctcctgatactgccaggagtgacccttccactgctgctaacttcgagcttgatcaaaaggtctttctactcatatgcaaggtgtaagactatcgagttatgtggtatattggtgttgatcattcatgtaatcactttgaggctatgggtgtttgccttgctcatacttatttaatttgcttccatctatgagattagaaaaaaaaa

SEQ ID NO: 213441 - DNA, 644 bp, Zea Mays
ggtacattcagattccgacttcctggttcctgcagcaggatgcgttcgtgactccctacaccccagcgccgcttccgcgtgggatgatcgagctctcagcgccgccacacgcttcgcggtccccagcgccacgtgggatgaccagacgctcagcgccgccacacggtcgggctccccagcgccgcgtgggagtgggacgaccgtacgctcggcctgacgctcgacgctccctgccagatccgacttggcgctcctcgtctcgggtgactcgggtccggtgccgctcctccctctccgcctgtctcaacactccgcccgctcggctcctactatccttcactgtcgtggcaccgccgtgactagtcaggtagtctcagatggaattttcactgaaggcagggttttgatccttgaataatttatgcattgttcgatgggctcctgatactgccaggagtgacccttccactgctgctaacttcgagcttgatcaaaaggtctttctactcatatgcaaggtgtaagactatcgagttatgtggtatattggtgttgatcattcatgtaatcactttgaggctatgggtgtttgccttgctcatacttatttaatttgcttccatctatgagattagaaaaaaaaa

SEQ ID NO: 213442 - DNA, 876 bp, Zea Mays
tgaggggatggaggattggtgatgttacgaattctcgaccatatttctgccttggagatctctgggaggctttcaatgagtggagcttttacggggctggtgttccccttgttataagtggaagtgaatctgtgattcagtattatgtgccatacctttctgctatacagctgtatgcagaccctttgaagcttccatcgaggatcaggagatgatgcttcttgtattgggcagttccttggattaatttagttatggttgattgatctattgctcatatagtcatatttcttggcacttgattgatcttgtcatgtttaacttggtcatccaacatgattctgggacaaaaataatttaaagaacaatgcaatgggagcaaggaacctcctcttttacccaaatcacgtaggcattttgttgttgtttttattgggtaacccttagattgctcatgaataaatgtgttattcgggatatcatcttattacttcagtggggatgaaattggacttattgaaactaccatcagggtagatgactcttttttaaagaggtcaatcgtcattggatttgacatagtcacttatccattgtacatgagttgattgaataatcacaccattggagcctagagcagaaagaggggatgtaagtcactaagttagtacttttgctgagtcttgatatttcctaataatgcaaagaacaccttcactagaaatttgagaaatctagtttattttacctgtatgatttgtagctgtgtaaatctacaagttactaggatttgcaaatctttttagctgtgtattgttcattgcatggaacctagtttcacacaaggacatcaaaataagcaccaaaactcaaaag

SEQ ID NO: 213443 - DNA, 4356 bp, Zea Mays
gacgattctcgcacggctctaacaaacaggcccggtagtacaccggctccgaaggtccgcaagaccgcaatcatccggatgagcaaccggatgtgcaggggttagctgtgctcctgtctagtgaaagatatgcgactaacagtcctattgagtacagcgatgttgctgcttatcgtctatcactaggagaagatacaaaagcaatcaaccagctgaatacactgatcaaagaaggaaaagaaatgacatctttgctgtacacataccgtagctgtgtaaaagctctacctcagctgcctgattcaatgaagcataatcaagcagacttgtatcttgaaacctatcaagttcttgacatggaaatgagccatttacgtgaaattcagagatggcaagcttctgctgcttctaagttagcggctgacatgcagagattctctaggccagagagactggttaatggacccacaatcactcatttttggtctatgcttaagttgcttgacgtcctactgcagcttgatcatctcaagaatgcaaaagcaagcataccaaatgatttttcatggtacaagagaacgttcactcaagtaagcacccagtggcaggatactgacaccatgagagaagagctggatgatcttcagatttttctgagcaccagatgggccatcttgttaaatttgcatgctgagatgtttcggacaaataccgttgaggatattctacaggttcttatagtattttgtgtggagtcattggaattggactttgctcttctttttcctgagcgccataccctacttcgtgtcctcccagttttggttgtcctagcaacctcatcagagaaggagagtgagtcactttataaaagggtgaagataaatcgtcttctcaatgtttttaagaatgatccagtgatcccggcatttccagatctgcatctttctcctgctgcaattttgaaggaattgtcatcatattttcaaaatttttccagtcaaactcgtctccttgctcttcaagcgcctcatgaaattcagggtcgtgagctacaagattatcagaggcattacttgattttgaatcacatgggaactatcagagctgatcatgacgacttctctatacgttttgcctctgctatggatcagatgataaggttgaagtcatcagatggtgtgtataatgactggtcccgcgatatcaaagggaacatgtatgatattgttgttgaaggcttccagcttcttagtcgttggactggcaggatttgggaacaatgtgcatggaaattctctcgccctatttcagattctcaacaaaactccatgacatgttttgactatgaaaaggtagtacgctataactatactgctgaagaacgaagggctctgcttgaattaattggttacataaagagtattggattgatgatgcagcattgtgatactttagtgtctgaagctttgtgggaaacgatacacatggaggtccaagattttgtacaggataaacttgatactatgcttcgtacaacatttagaaagaagaaggacctttcccggattctctctgatatgcggaccctctcagcagattggatggccagcactagtaaagcagacccagagcagcactcgctacaccaagaaactgaggaaatgagacaaaacacattttacccaagaccagttgcaccaacagctgcacagattcattgtttgcaatttcttatatgtgaacttgtatctggtggtaatctgagaaaagttggaggactatttgggaatagtggctctggcatacctgtggaagatcttaaacaactagagacatttttctacaagcttagttttttcttgcatattttggattatacagcgactattggtactctaactgatcttggatttctttggttcagagaattttaccttgaatcttctcgtgtcattcagtttccaattgaatgctcgctcccgtggatgctggtgggccatgtcattgaatcagaagatgctggtcttctcgaaagcattttgattccatttgacctgtacaatgactctgctcaacatgcactaacttctctcaagcagagatttctttatgatgaaattgaagctgaggctgatctttgcttcgatcttcttgctcagaagcttaatgagatcatctttacatattataagagctgtgcagcaagtactcttcttgatagttcatttacatatgcatgcgatgatggtgacaagtattttgtcaaacctttgcgattcgacgcgattttcaagttaaggagagtaatggttttagggaggacaattgatctaagaagcataattactcagagaatgaacaaaatattcagggaaaatattgactttctacttgagcgctttgaaaatggagatctttgtggtgttgtggaactgcaacaactgctggatattttggagcttacacaccaatcaatatcaagatttcttgaattggattcttactctcttatgcttagcgagatgcaagaaaatctttcgttggtttcttattcaagtcgcatctcttctcagatatggagtgagatgcagacagatttcttgccgaatttcatcttatgtaataccacacagcggtttgtccggtccgcaaaaggaactcaccactcttcgcatagatcaagcgcttctactgggaaaccttacttctattgtggatcacatgatttgaccatggcataccagggtcttgctgggctgtaccgtgacttttttggagtccctcatatgtttgcagttgttaaacttcttggttccagatcattacctgcaatcatccgtgctttactggatcatatatcaagtaagattacaggtttgctaccgaaaataaatgcactgcaagaagcattaccaaaatctattgggcttctttcatttgatggtggtatagcaggttgccaaaagatagttcatgaaattttgacatgggaagcaaaatctgaagttaaaactgaagttcttcatgaccttaaggaaattggaagtgctttgtattggatgagcattctggacattgtgttgagacaaatcgacactacacagttcatgcagtcagctccgtggctaggattggttccaggaaatgatgggcaagtgaagcatgcctactctgataatactccatttaccacacttttaagtgctgcctctaatgctgtgacatcaagccctacatgcccaaatccatctacgtttcttgtcatgtcaaagcaagctgaagctgcgagtctgctgtacaaatcaaacctcaactctggtagtgtgctggagtatgctcttgcattcacaagtgctgccctggatagacactatagcaaatggagcgcaactccaaaaacaggctttatcgacattactacttcaaaggatttctatcgcatttttagcggtcttcagtatagttacttagaagatagcattaacaatccttcgaagaaacaagaaatgctgggtgattctgtagcctgggctggctgtacgataatgtacttactgggacagcagcagcacttcgagctttttgatttctcctatcaatttctcaatgtggcagaagtagaaagtgcgacagtatcacactatcaatcttcagagaggactaaaagttcaaatttcttgcaaggctacgagggcatcctggaagcgatgaggaaggctaggaggctcaataaccatgttttctccatgttgagggcacgatgtccccttgaggacaaggttgcatgtgctatcaagccaagtggggcaccgcttcaccggatgaagtttatgaacaccgtttctgcattcgagacattgccacaaagagtcacctaaccagcttccaggcaatgtgcagaatgtactcttgtatgcggggttatatgttatgttgtaaggtaaatgtatattatgtagtcacaagtcacaaccatcaaccgtggatcctggacctgaacaggagaatgtgtttgcttgctatatatgaaaattaggtgggtatgttgaagttgaccctgagttcgcaagtttagctttcaactttgagactatctcgctgaaccaaatatgtaaaccagctggagagttgagccagaggacacgtgctagttagctgttcttctcgtgtctgtatttctcagactgctctcaaagtatatttaatgtatgacgattcagattagcttaaaaagttgtgttatccgagaactcatttcggcgtgcatgtaaccactcccctatcttgctcagtatctcgtcgcatcatgcttttaataaatcagatgatcaagcacataagggttgctgactg

SEQ ID NO: 213444 - DNA, 5809 bp, Zea Mays
atttcacttcgagtacacttcacgtctcgtcttcttcgccccactgggtgtctggcccaccgttgccacaggtcacccggggcagtacgagttccttgtctctccttgacggcctccttgctcagcacgatctcggctccgtctctctctagtctctaccaacggtagcaccatctcgctcccactcccaaccactccgccaccaccgctctcctgcgcctgcgtccgcgcctcctccctgcggccccggccgcaccggcgacatggccatccccgttgaggaggccatcgccgccctctccaccttctcgctcgaggatgagcaaccggatgtgcaggggttagctgtgctcctgtctagtgaaagatatgcgactaacagtcctattgagtacagcgatgttgctgcttatcgtctatcactaggagaagatacaaaagcaatcaaccagctgaatacactgatcaaagaaggaaaagaaatgacatctttgctgtacacataccgtagctgtgtaaaagctctacctcagctgcctgattcaatgaagcataatcaagcagacttgtatcttgaaacctatcaagttcttgacatggaaatgagccatttacgtgaaattcagagatggcaagcttctgctgcttctaagttagcggctgacatgcagagattctctaggccagagagactggttaatggacccacaatcactcatttttggtctatgcttaagttgcttgacgtcctactgcagcttgatcatctcaagaatgcaaaagcaagcataccaaatgatttttcatggtacaagagaacgttcactcaagtaagcacccagtggcaggatactgacaccatgagagaagagctggatgatcttcagatttttctgagcaccagatgggccatcttgttaaatttgcatgctgagatgtttcggacaaataccgttgaggatattctacaggttcttatagtattttgtgtggagtcattggaattggactttgctcttctttttcctgagcgccataccctacttcgtgtcctcccagttttggttgtcctagcaacctcatcagagaaggagagtgagtcactttataaaagggtgaagataaatcgtcttctcaatgtttttaagaatgatccagtgatcccggcatttccagatctgcatctttctcctgctgcaattttgaaggaattgtcatcatattttcaaaatttttccagtcaaactcgtctccttgctcttcaagcgcctcatgaaattcagggtcgtgagctacaagattatcagaggcattacttgattttgaatcacatgggaactatcagagctgatcatgacgacttctctatacgttttgcctctgctatggatcagatgataaggttgaagtcatcagatggtgtgtataatgactggtcccgcgatatcaaagggaacatgtatgatattgttgttgaaggcttccagcttcttagtcgttggactggcaggatttgggaacaatgtgcatggaaattctctcgccctatttcagattctcaacaaaactccatgacatgttttgactatgaaaaggtagtacgctataactatactgctgaagaacgaagggctctgcttgaattaattggttacataaagagtattggattgatgatgcagcattgtgatactttagtgtctgaagctttgtgggaaacgatacacatggaggtccaagattttgtacaggataaacttgatactatgcttcgtacaacatttagaaagaagaaggacctttcccggattctctctgatatgcggaccctctcagcagattggatggccagcactagtaaagcagacccagagcagcactcgctacaccaagaaactgaggaaatgagacaaaacacattttacccaagaccagttgcaccaacagctgcacagattcattgtttgcaatttcttatatgtgaacttgtatctggtggtaatctgagaaaagttggaggactatttgggaatagtggctctggcatacctgtggaagatcttaaacaactagagacatttttctacaagcttagttttttcttgcatattttggattatacagcgactattggtactctaactgatcttggatttctttggttcagagaattttaccttgaatcttctcgtgtcattcagtttccaattgaatgctcgctcccgtggatgctggtgggccatgtcattgaatcagaagatgctggtcttctcgaaagcattttgattccatttgacctgtacaatgactctgctcaacatgcactaacttctctcaagcagagatttctttatgatgaaattgaagctgaggctgatctttgcttcgatcttcttgctcagaagcttaatgagatcatctttacatattataagagctgtgcagcaagtactcttcttgatagttcatttacatatgcatgcgatgatggtgacaagtattttgtcaaacctttgcgattcgacgcgattttcaagttaaggagagtaatggttttagggaggacaattgatctaagaagcataattactcagagaatgaacaaaatattcagggaaaatattgactttctacttgagcgctttgaaaatggagatctttgtggtgttgtggaactgcaacaactgctggatattttggagcttacacaccaatcaatatcaagatttcttgaattggattcttactctcttatgcttagcgagatgcaagaaaatctttcgttggtttcttattcaagtcgcatctcttctcagatatggagtgagatgcagacagatttcttgccgaatttcatcttatgtaataccacacagcggtttgtccggtccgcaaaaggaactcaccactcttcgcatagatcaagcgcttctactgggaaaccttacttctattgtggatcacatgatttgaccatggcataccagggtcttgctgggctgtaccgtgacttttttggagtccctcatatgtttgcagttgttaaacttcttggttccagatcattacctgcaatcatccgtgctttactggatcatatatcaagtaagattacaggtttgctaccgaaaataaatgcactgcaagaagcattaccaaaatctattgggcttctttcatttgatggtggtatagcaggttgccaaaagatagttcatgaaattttgacatgggaagcaaaatctgaagttaaaactgaagttcttcatgaccttaaggaaattggaagtgctttgtattggatgagcattctggacattgtgttgagacaaatcgacactacacagttcatgcagtcagctccgtggctaggattggttccaggaaatgatgggcaagtgaagcatgcctactctgataatactccatttaccacacttttaagtgctgcctctaatgctgtgacatcaagccctacatgcccaaatccatctacgtttcttgtcatgtcaaagcaagctgaagctgcgagtctgctgtacaaatcaaacctcaactctggtagtgtgctggagtatgctcttgcattcacaagtgctgccctggatagacactatagcaaatggagcgcaactccaaaaacaggctttatcgacattactacttcaaaggatttctatcgcatttttagcggtcttcagtatagttacttagaagatagcattaacaatccttcgaagaaacaagaaatgctgggtgattctgtagcctgggctggctgtacgataatgtacttactgggacagcagcagcacttcgagctttttgatttctcctatcaatttctcaatgtggcagaagtagaaagtgcgacagtatcacactatcaatcttcagagaggactaaaagttcaaatttcttgcaaggctacgagggcatcctggaagcgatgaggaaggctaggaggctcaataaccatgttttctccatgttgagggcacgatgtccccttgaggacaaggttgcatgtgctatcaagccaagtggggcaccgcttcaccggatgaagtttatgaacaccgtttctgcattcgagacattgccacaaagagtcacctaaccagcttccaggcaatgtgcagaatgtactcttgtatgcggggttatatgttatgttgtaaggtaaatgtatattatgtagtcacaagtcacaaccatcaaccgtggatcctggacctgaacaggagaatgtgtttgcttgctatatatgaaaattaggtgggtatgttgaagttgaccctgagttcgcaagtttagctttcaactttgagactatctcgctgaaccaaatatgtaaaccagctggagagttgagccagaggacacgtgctagttagctgttcttctcgtgtctgtatttctcagactgctctcaaagtatatttaatgtatgacgattcagattagcttaaaaagttgtgttatccgagaactcatttcggcgtgcatgtaaccactcccctatcttgctcagtatctcgtcgcatcatgcttttaataaatcagatgatcaagcacataagggttgctgactgccaaaaggttagcagaatataatgccaatatcttctgcacacacgatggataaggccagaatggtggcttactgtcttcttgggtgcatttgactaatgtaggtcatgtcatgtcatgtcaagatttcccttgctgacgaagctatgcatcttcatctggattgacagatattagtcgcaacggcattttaagttgcgattggtagggacctccagattgtttctctaagaacatgaggctctctaccaagcaaaaactttttcctggagggaaataagaattactatgagcgttagtttgggaacttcatattttggaatattcctattttctcaagtgaaaatgttacgtccactactcctgagccggcgtgctgctcttccgagaatgaagcccaagtcgcagaagcaggcccaagaaggggaagccgtgtccgcaggcccagttctcgtctacagggttttgtgtagcctagaggagagctgtgagagagagagttaaatggcggctgccattgtatggatgcagacttgaacaatacgaacacaaaaaaatcctgcagattctgtcgtcctcccttcttcctccttgagacttcttctaccactattccaccgctgcttctaacatttggtatcaaagacagcgctcgcgtcctggagccctaccaccaatactacactcggcgtcagaagaatttaggcgccatggatcccaatttcaaaccgatcttcgaagaagcgatgaagatgatgcgagtcgagatcacgaaggaaatctccaagtgcttcgccgaccacgatgcggttgtcaaccaacgcttcgctgatttcgcggcggctgcagaacacaacaacgcccgcgtcacatctctggaagaggccgcatccaagttcgatcacaccttctccaactggcagccagagatcgaggcctccgtcgccgacatcaggctcgaaatctccaagctcaacaaattcttcgatcgcgacgctcgtgaacactccgggtttcaactgggtgttctgggtactgagtcgacgtccgcgcgcccatctgccggattccgcgtcgacgggcctcgtggccaccgcgccgaacctcattaccgggatgatggtcctgggttccacaacacccagacccatcacccggtcaagggctcgttggttcaggtagacccacttcagttcctcacagctcaactgcttc

SEQ ID NO: 213445 - DNA, 3153 bp, Zea Mays
cacaggtcacccggggcagtacgagttccttgtctctccttgacggcctccttgctcagcacgatctcggctccgtctctctctagtctctaccaacggtagcaccatctcgctcccactcccaaccactccgccaccaccgctctcctgcgcctgcgtccgcgcctcctccctgcggccccggccgcaccggcgacatggccatccccgttgaggaggccatcgccgccctctccaccttctcgctcgaggatgagcaaccggatgtgcaggggttagctgtgctcctgtctagtgaaagatatgcgactaacagtcctattgagtacagcgatgttgctgcttatcgtctatcactaggagaagatacaaaagcaatcaaccagctgaatacactgatcaaagaaggaaaagaaatgacatctttgctgtacacataccgtagctgtgtaaaagctctacctcagctgcctgattcaatgaagcataatcaagcagacttgtatcttgaaacctatcaagttcttgacatggaaatgagccatttacgtgaaattcagagatggcaagcttctgctgcttctaagttagcggctgacatgcagagattctctaggccagagagactggttaatggacccacaatcactcatttttggtctatgcttaagttgcttgacgtcctactgcagcttgatcatctcaagaatgcaaaagcaagcataccaaatgatttttcatggtacaagagaacgttcactcaagtaagcacccagtggcaggatactgacaccatgagagaagagctggatgatcttcagatttttctgagcaccagatgggccatcttgttaaatttgcatgctgagatgtttcggacaaataccgttgaggatattctacaggttcttatagtattttgtgtggagtcattggaattggactttgctcttctttttcctgagcgccataccctacttcgtgtcctcccagttttggttgtcctagcaacctcatcagagaaggagagtgagtcactttataaaagggtgaagataaatcgtcttctcaatgtttttaagaatgatccagtgatcccggcatttccagatctgcatctttctcctgctgcaattttgaaggaattgtcatcatattttcaaaatttttccagtcaaactcgtctccttgctcttcaagcgcctcatgaaattcagggtcgtgagctacaagattatcagaggcattacttgattttgaatcacatgggaactatcagagctgatcatgacgacttctctatacgttttgcctctgctatggatcagatgataaggttgaagtcatcagatggtgtgtataatgactggtcccgcgatatcaaagggaacatgtatgatattgttgttgaaggcttccagcttcttagtcgttggactggcaggatttgggaacaatgtgcatggaaattctctcgccctatttcagattctcaacaaaactccatgacatgttttgactatgaaaaggtagtacgctataactatactgctgaagaacgaagggctctgcttgaattaattggttacataaagagtattggattgatgatgcagcattgtgatactttagtgtctgaagctttgtgggaaacgatacacatggaggtccaagattttgtacaggataaacttgatactatgcttcgtacaacatttagaaagaagaaggacctttcccggattctctctgatatgcggaccctctcagcagattggatggccagcactagtaaagcagacccagagcagcactcgctacaccaagaaactgaggaaatgagacaaaacacattttacccaagaccagttgcaccaacagctgcacagattcattgtttgcaatttcttatatgtgaacttgtatctggtggtaatctgagaaaagttggaggactatttgggaatagtggctctggcatacctgtggaagatcttaaacaactagagacatttttctacaagcttagttttttcttgcatattttggattatacagcgactattggtactctaactgatcttggatttctttggttcagagaattttaccttgaatcttctcgtgtcattcagtttccaattgaatgctcgctcccgtggatgctggtgggccatgtcattgaatcagaagatgctggtcttctcgaaagcattttgattccatttgacctgtacaatgactctgctcaacatgcactaacttctctcaagcagagatttctttatgatgaaattgaagctgaggctgatctttgcttcgatcttcttgctcagaagcttaatgagatcatctttacatattataagagctgtgcagcaagtactcttcttgatagttcatttacatatgcatgcgatgatggtgacaagtattttgtcaaacctttgcgattcgacgcgattttcaagttaaggagagtaatggttttagggaggacaattgatctaagaagcataattactcagagaatgaacaaaatattcagggaaaatattgactttctacttgagcgctttgaaaatggagatctttgtggtgttgtggaactgcaacaactgctggatattttggagcttacacaccaatcaatatcaagatttcttgaattggattcttactctcttatgcttagcgagatgcaagaaaatctttcgttggtttcttattcaagtcgcatctcttctcagatatggagtgagatgcagacagatttcttgccgaatttcatcttatgtaataccacacagcggtttgtccggtccgcaaaaggaactcaccactcttcgcatagatcaagcgcttctactgggaaaccttacttctattgtggatcacatgatttgaccatggcataccagggtcttgctgggctgtaccgtgacttttttggagtccctcatatgtttgcagttgttaaacttcttggttccagatcattacctgcaatcatccgtgctttactggatcatatatcaagtaagattacaggtttgctaccgaaaataaatgcactgcaagaagcattaccaaaatctattgggcttctttcatttgatggtggtatagcaggcaatttggtgcacatttttt

SEQ ID NO: 213446 - DNA, 4135 bp, Zea Mays
cacaggtcacccggggcagtacgagttccttgtctctccttgacggcctccttgctcagcacgatctcggctccgtctctctctagtctctaccaacggtagcaccatctcgctcccactcccaaccactccgccaccaccgctctcctgcgcctgcgtccgcgcctcctccctgcggccccggccgcaccggcgacatggccatccccgttgaggaggccatcgccgccctctccaccttctcgctcgaggatgagcaaccggatgtgcaggggttagctgtgctcctgtctagtgaaagatatgcgactaacagtcctattgagtacagcgatgttgctgcttatcgtctatcactaggagaagatacaaaagcaatcaaccagctgaatacactgatcaaagaaggaaaagaaatgacatctttgctgtacacataccgtagctgtgtaaaagctctacctcagctgcctgattcaatgaagcataatcaagcagacttgtatcttgaaacctatcaagttcttgacatggaaatgagccatttacgtgaaattcagagatggcaagcttctgctgcttctaagttagcggctgacatgcagagattctctaggccagagagactggttaatggacccacaatcactcatttttggtctatgcttaagttgcttgacgtcctactgcagcttgatcatctcaagaatgcaaaagcaagcataccaaatgatttttcatggtacaagagaacgttcactcaagtaagcacccagtggcaggatactgacaccatgagagaagagctggatgatcttcagatttttctgagcaccagatgggccatcttgttaaatttgcatgctgagatgtttcggacaaataccgttgaggatattctacaggttcttatagtattttgtgtggagtcattggaattggactttgctcttctttttcctgagcgccataccctacttcgtgtcctcccagttttggttgtcctagcaacctcatcagagaaggagagtgagtcactttataaaagggtgaagataaatcgtcttctcaatgtttttaagaatgatccagtgatcccggcatttccagatctgcatctttctcctgctgcaattttgaaggaattgtcatcatattttcaaaatttttccagtcaaactcgtctccttgctcttcaagcgcctcatgaaattcagggtcgtgagctacaagattatcagaggcattacttgattttgaatcacatgggaactatcagagctgatcatgacgacttctctatacgttttgcctctgctatggatcagatgataaggttgaagtcatcagatggtgtgtataatgactggtcccgcgatatcaaagggaacatgtatgatattgttgttgaaggcttccagcttcttagtcgttggactggcaggatttgggaacaatgtgcatggaaattctctcgccctatttcagattctcaacaaaactccatgacatgttttgactatgaaaaggtagtacgctataactatactgctgaagaacgaagggctctgcttgaattaattggttacataaagagtattggattgatgatgcagcattgtgatactttagtgtctgaagctttgtgggaaacgatacacatggaggtccaagattttgtacaggataaacttgatactatgcttcgtacaacatttagaaagaagaaggacctttcccggattctctctgatatgcggaccctctcagcagattggatggccagcactagtaaagcagacccagagcagcactcgctacaccaagaaactgaggaaatgagacaaaacacattttacccaagaccagttgcaccaacagctgcacagattcattgtttgcaatttcttatatgtgaacttgtatctggtggtaatctgagaaaagttggaggactatttgggaatagtggctctggcatacctgtggaagatcttaaacaactagagacatttttctacaagcttagttttttcttgcatattttggattatacagcgactattggtactctaactgatcttggatttctttggttcagagaattttaccttgaatcttctcgtgtcattcagtttccaattgaatgctcgctcccgtggatgctggtgggccatgtcattgaatcagaagatgctggtcttctcgaaagcattttgattccatttgacctgtacaatgactctgctcaacatgcactaacttctctcaagcagagatttctttatgatgaaattgaagctgaggctgatctttgcttcgatcttcttgctcagaagcttaatgagatcatctttacatattataagagctgtgcagcaagtactcttcttgatagttcatttacatatgcatgcgatgatggtgacaagtattttgtcaaacctttgcgattcgacgcgattttcaagttaaggagagtaatggttttagggaggacaattgatctaagaagcataattactcagagaatgaacaaaatattcagggaaaatattgactttctacttgagcgctttgaaaatggagatctttgtggtgttgtggaactgcaacaactgctggatattttggagcttacacaccaatcaatatcaagatttcttgaattggattcttactctcttatgcttagcgagatgcaagaaaatctttcgttggtttcttattcaagtcgcatctcttctcagatatggagtgagatgcagacagatttcttgccgaatttcatcttatgtaataccacacagcggtttgtccggtccgcaaaaggaactcaccactcttcgcatagatcaagcgcttctactgggaaaccttacttctattgtggatcacatgatttgaccatggcataccagggtcttgctgggctgtaccgtgacttttttggagtccctcatatgtttgcagttgttaaacttcttggttccagatcattacctgcaatcatccgtgctttactggatcatatatcaagtaagattacaggtttgctaccgaaaataaatgcactgcaagaagcattaccaaaatctattgggcttctttcatttgatggtggtatagcaggttgccaaaagatagttcatgaaattttgacatgggaagcaaaatctgaagttaaaactgaagttcttcatgaccttaaggaaattggaagtgctttgtattggatgagcattctggacattgtgttgagacaaatcgacactacacagttcatgcagtcagctccgtggctaggattggttccaggaaatgatgggcaagtgaagcatgcctactctgataatactccatttaccacacttttaagtgctgcctctaatgctgtgacatcaagccctacatgcccaaatccatctacgtttcttgtcatgtcaaagcaagctgaagctgcgaggctacgagggcatcctggaagcgatgaggaaggctaggaggctcaataaccatgttttctccatgttgagggcacgatgtccccttgaggacaaggttgcatgtgctatcaagccaagtggggcaccgcttcaccggatgaagtttatgaacaccgtttctgcattcgagacattgccacaaagagtcacctaaccagcttccaggcaatgtgcagaatgtactcttgtatgcggggttatatgttatgttgtaaggtaaatgtatattatgtagtcacaagtcacaaccatcaaccgtggatcctggacctgaacaggagaatgtgtttgcttgctatatatgaaaattaggtgggtatgttgaagttgaccctgagttcgcaagtttagctttcaactttgagactatctcgctgaaccaaatatgtaaaccagctggagagttgagccagaggacacgtgctagttagctgttcttctcgtgtctgtatttctcagactgctctcaaagtatatttaatgtatgacgattcagattagcttaaaaagttgtgttatccgagaactcatttcggcgtgcatgtaaccactcccctatcttgctcagtatctcgtcgcatcatgcttttaataaatcagatgatcaagcacataagggttgctgactg

SEQ ID NO: 213447 - DNA, 4443 bp, Zea Mays
cacaggtcacccggggcagtacgagttccttgtctctccttgacggcctccttgctcagcacgatctcggctccgtctctctctagtctctaccaacggtagcaccatctcgctcccactcccaaccactccgccaccaccgctctcctgcgcctgcgtccgcgcctcctccctgcggccccggccgcaccggcgacatggccatccccgttgaggaggccatcgccgccctctccaccttctcgctcgaggatgagcaaccggatgtgcaggggttagctgtgctcctgtctagtgaaagatatgcgactaacagtcctattgagtacagcgatgttgctgcttatcgtctatcactaggagaagatacaaaagcaatcaaccagctgaatacactgatcaaagaaggaaaagaaatgacatctttgctgtacacataccgtagctgtgtaaaagctctacctcagctgcctgattcaatgaagcataatcaagcagacttgtatcttgaaacctatcaagttcttgacatggaaatgagccatttacgtgaaattcagagatggcaagcttctgctgcttctaagttagcggctgacatgcagagattctctaggccagagagactggttaatggacccacaatcactcatttttggtctatgcttaagttgcttgacgtcctactgcagcttgatcatctcaagaatgcaaaagcaagcataccaaatgatttttcatggtacaagagaacgttcactcaagtaagcacccagtggcaggatactgacaccatgagagaagagctggatgatcttcagatttttctgagcaccagatgggccatcttgttaaatttgcatgctgagatgtttcggacaaataccgttgaggatattctacaggttcttatagtattttgtgtggagtcattggaattggactttgctcttctttttcctgagcgccataccctacttcgtgtcctcccagttttggttgtcctagcaacctcatcagagaaggagagtgagtcactttataaaagggtgaagataaatcgtcttctcaatgtttttaagaatgatccagtgatcccggcatttccagatctgcatctttctcctgctgcaattttgaaggaattgtcatcatattttcaaaatttttccagtcaaactcgtctccttgctcttcaagcgcctcatgaaattcagggtcgtgagctacaagattatcagaggcattacttgattttgaatcacatgggaactatcagagctgatcatgacgacttctctatacgttttgcctctgctatggatcagatgataaggttgaagtcatcagatggtgtgtataatgactggtcccgcgatatcaaagggaacatgtatgatattgttgttgaaggcttccagcttcttagtcgttggactggcaggatttgggaacaatgtgcatggaaattctctcgccctatttcagattctcaacaaaactccatgacatgttttgactatgaaaagcattgtgatactttagtgtctgaagctttgtgggaaacgatacacatggaggtccaagattttgtacaggataaacttgatactatgcttcgtacaacatttagaaagaagaaggacctttcccggattctctctgatatgcggaccctctcagcagattggatggccagcactagtaaagcagacccagagcagcactcgctacaccaagaaactgaggaaatgagacaaaacacattttacccaagaccagttgcaccaacagctgcacagattcattgtttgcaatttcttatatgtgaacttgtatctggtggtaatctgagaaaagttggaggactatttgggaatagtggctctggcatacctgtggaagatcttaaacaactagagacatttttctacaagcttagttttttcttgcatattttggattatacagcgactattggtactctaactgatcttggatttctttggttcagagaattttaccttgaatcttctcgtgtcattcagtttccaattgaatgctcgctcccgtggatgctggtgggccatgtcattgaatcagaagatgctggtcttctcgaaagcattttgattccatttgacctgtacaatgactctgctcaacatgcactaacttctctcaagcagagatttctttatgatgaaattgaagctgaggctgatctttgcttcgatcttcttgctcagaagcttaatgagatcatctttacatattataagagctgtgcagcaagtactcttcttgatagttcatttacatatgcatgcgatgatggtgacaagtattttgtcaaacctttgcgattcgacgcgattttcaagttaaggagagtaatggttttagggaggacaattgatctaagaagcataattactcagagaatgaacaaaatattcagggaaaatattgactttctacttgagcgctttgaaaatggagatctttgtggtgttgtggaactgcaacaactgctggatattttggagcttacacaccaatcaatatcaagatttcttgaattggattcttactctcttatgcttagcgagatgcaagaaaatctttcgttggtttcttattcaagtcgcatctcttctcagatatggagtgagatgcagacagatttcttgccgaatttcatcttatgtaataccacacagcggtttgtccggtccgcaaaaggaactcaccactcttcgcatagatcaagcgcttctactgggaaaccttacttctattgtggatcacatgatttgaccatggcataccagggtcttgctgggctgtaccgtgacttttttggagtccctcatatgtttgcagttgttaaacttcttggttccagatcattacctgcaatcatccgtgctttactggatcatatatcaagtaagattacaggtttgctaccgaaaataaatgcactgcaagaagcattaccaaaatctattgggcttctttcatttgatggtggtatagcaggttgccaaaagatagttcatgaaattttgacatgggaagcaaaatctgaagttaaaactgaagttcttcatgaccttaaggaaattggaagtgctttgtattggatgagcattctggacattgtgttgagacaaatcgacactacacagttcatgcagtcagctccgtggctaggattggttccaggaaatgatgggcaagtgaagcatgcctactctgataatactccatttaccacacttttaagtgctgcctctaatgctgtgacatcaagccctacatgcccaaatccatctacgtttcttgtcatgtcaaagcaagctgaagctgcgagtctgctgtacaaatcaaacctcaactctggtagtgtgctggagtatgctcttgcattcacaagtgctgccctggatagacactatagcaaatggagcgcaactccaaaaacaggctttatcgacattactacttcaaaggatttctatcgcatttttagcggtcttcagtatagttacttagaagatagcattaacaatccttcgaagaaacaagaaatgctgggtgattctgtagcctgggctggctgtacgataatgtacttactgggacagcagcagcacttcgagctttttgatttctcctatcaatttctcaatgtggcagaagtagaaagtgcgacagtatcacactatcaatcttcagagaggactaaaagttcaaatttcttgcaaggctacgagggcatcctggaagcgatgaggaaggctaggaggctcaataaccatgttttctccatgttgagggcacgatgtccccttgaggacaaggttgcatgtgctatcaagccaagtggggcaccgcttcaccggatgaagtttatgaacaccgtttctgcattcgagacattgccacaaagagtcacctaaccagcttccaggcaatgtgcagaatgtactcttgtatgcggggttatatgttatgttgtaaggtaaatgtatattatgtagtcacaagtcacaaccatcaaccgtggatcctggacctgaacaggagaatgtgtttgcttgctatatatgaaaattaggtgggtatgttgaagttgaccctgagttcgcaagtttagctttcaactttgagactatctcgctgaaccaaatatgtaaaccagctggagagttgagccagaggacacgtgctagttagctgttcttctcgtgtctgtatttctcagactgctctcaaagtatatttaatgtatgacgattcagattagcttaaaaagttgtgttatccgagaactcatttcggcgtgcatgtaaccactcccctatcttgctcagtatctcgtcgcatcatgcttttaataaatcagatgatcaagcacataagggttgctgactg

SEQ ID NO: 213448 - DNA, 4523 bp, Zea Mays
cacaggtcacccggggcagtacgagttccttgtctctccttgacggcctccttgctcagcacgatctcggctccgtctctctctagtctctaccaacggtagcaccatctcgctcccactcccaaccactccgccaccaccgctctcctgcgcctgcgtccgcgcctcctccctgcggccccggccgcaccggcgacatggccatccccgttgaggaggccatcgccgccctctccaccttctcgctcgaggatgagcaaccggatgtgcaggggttagctgtgctcctgtctagtgaaagatatgcgactaacagtcctattgagtacagcgatgttgctgcttatcgtctatcactaggagaagatacaaaagcaatcaaccagctgaatacactgatcaaagaaggaaaagaaatgacatctttgctgtacacataccgtagctgtgtaaaagctctacctcagctgcctgattcaatgaagcataatcaagcagacttgtatcttgaaacctatcaagttcttgacatggaaatgagccatttacgtgaaattcagagatggcaagcttctgctgcttctaagttagcggctgacatgcagagattctctaggccagagagactggttaatggacccacaatcactcatttttggtctatgcttaagttgcttgacgtcctactgcagcttgatcatctcaagaatgcaaaagcaagcataccaaatgatttttcatggtacaagagaacgttcactcaagtaagcacccagtggcaggatactgacaccatgagagaagagctggatgatcttcagatttttctgagcaccagatgggccatcttgttaaatttgcatgctgagatgtttcggacaaataccgttgaggatattctacaggttcttatagtattttgtgtggagtcattggaattggactttgctcttctttttcctgagcgccataccctacttcgtgtcctcccagttttggttgtcctagcaacctcatcagagaaggagagtgagtcactttataaaagggtgaagataaatcgtcttctcaatgtttttaagaatgatccagtgatcccggcatttccagatctgcatctttctcctgctgcaattttgaaggaattgtcatcatattttcaaaatttttccagtcaaactcgtctccttgctcttcaagcgcctcatgaaattcagggtcgtgagctacaagattatcagaggcattacttgattttgaatcacatgggaactatcagagctgatcatgacgacttctctatacgttttgcctctgctatggatcagatgataaggttgaagtcatcagatggtgtgtataatgactggtcccgcgatatcaaagggaacatgtatgatattgttgttgaaggcttccagcttcttagtcgttggactggcaggatttgggaacaatgtgcatggaaattctctcgccctatttcagattctcaacaaaactccatgacatgttttgactatgaaaaggtagtacgctataactatactgctgaagaacgaagggctctgcttgaattaattggttacataaagagtattggattgatgatgcagcattgtgatactttagtgtctgaagctttgtgggaaacgatacacatggaggtccaagattttgtacaggataaacttgatactatgcttcgtacaacatttagaaagaagaaggacctttcccggattctctctgatatgcggaccctctcagcagattggatggccagcactagtaaagcagacccagagcagcactcgctacaccaagaaactgaggaaatgagacaaaacacattttacccaagaccagttgcaccaacagctgcacagattcattgtttgcaatttcttatatgtgaacttgtatctggtggtaatctgagaaaagttggaggactatttgggaatagtggctctggcatacctgtggaagatcttaaacaactagagacatttttctacaagcttagttttttcttgcatattttggattatacagcgactattggtactctaactgatcttggatttctttggttcagagaattttaccttgaatcttctcgtgtcattcagtttccaattgaatgctcgctcccgtggatgctggtgggccatgtcattgaatcagaagatgctggtcttctcgaaagcattttgattccatttgacctgtacaatgactctgctcaacatgcactaacttctctcaagcagagatttctttatgatgaaattgaagctgaggctgatctttgcttcgatcttcttgctcagaagcttaatgagatcatctttacatattataagagctgtgcagcaagtactcttcttgatagttcatttacatatgcatgcgatgatggtgacaagtattttgtcaaacctttgcgattcgacgcgattttcaagttaaggagagtaatggttttagggaggacaattgatctaagaagcataattactcagagaatgaacaaaatattcagggaaaatattgactttctacttgagcgctttgaaaatggagatctttgtggtgttgtggaactgcaacaactgctggatattttggagcttacacaccaatcaatatcaagatttcttgaattggattcttactctcttatgcttagcgagatgcaagaaaatctttcgttggtttcttattcaagtcgcatctcttctcagatatggagtgagatgcagacagatttcttgccgaatttcatcttatgtaataccacacagcggtttgtccggtccgcaaaaggaactcaccactcttcgcatagatcaagcgcttctactgggaaaccttacttctattgtggatcacatgatttgaccatggcataccagggtcttgctgggctgtaccgtgacttttttggagtccctcatatgtttgcagttgttaaacttcttggttccagatcattacctgcaatcatccgtgctttactggatcatatatcaagtaaggtttgctaccgaaaataaatgcactgcaagaagcattaccaaaatctattgggcttctttcatttgatggtggtatagcaggttgccaaaagatagttcatgaaattttgacatgggaagcaaaatctgaagttaaaactgaagttcttcatgaccttaaggaaattggaagtgctttgtattggatgagcattctggacattgtgttgagacaaatcgacactacacagttcatgcagtcagctccgtggctaggattggttccaggaaatgatgggcaagtgaagcatgcctactctgataatactccatttaccacacttttaagtgctgcctctaatgctgtgacatcaagccctacatgcccaaatccatctacgtttcttgtcatgtcaaagcaagctgaagctgcgagtctgctgtacaaatcaaacctcaactctggtagtgtgctggagtatgctcttgcattcacaagtgctgccctggatagacactatagcaaatggagcgcaactccaaaaacaggctttatcgacattactacttcaaaggatttctatcgcatttttagcggtcttcagtatagttacttagaagatagcattaacaatccttcgaagaaacaagaaatgctgggtgattctgtagcctgggctggctgtacgataatgtacttactgggacagcagcagcacttcgagctttttgatttctcctatcaatttctcaatgtggcagaagtagaaagtgcgacagtatcacactatcaatcttcagagaggactaaaagttcaaatttcttgcaaggctacgagggcatcctggaagcgatgaggaaggctaggaggctcaataaccatgttttctccatgttgagggcacgatgtccccttgaggacaaggttgcatgtgctatcaagccaagtggggcaccgcttcaccggatgaagtttatgaacaccgtttctgcattcgagacattgccacaaagagtcacctaaccagcttccaggcaatgtgcagaatgtactcttgtatgcggggttatatgttatgttgtaaggtaaatgtatattatgtagtcacaagtcacaaccatcaaccgtggatcctggacctgaacaggagaatgtgtttgcttgctatatatgaaaattaggtgggtatgttgaagttgaccctgagttcgcaagtttagctttcaactttgagactatctcgctgaaccaaatatgtaaaccagctggagagttgagccagaggacacgtgctagttagctgttcttctcgtgtctgtatttctcagactgctctcaaagtatatttaatgtatgacgattcagattagcttaaaaagttgtgttatccgagaactcatttcggcgtgcatgtaaccactcccctatcttgctcagtatctcgtcgcatcatgcttttaataaatcagatgatcaagcacataagggttgctgactg

SEQ ID NO: 213449 - DNA, 4481 bp, Zea Mays
cttgtctctccttgacggcctccttgctcagcacgatctcggctccgtctctctctagtctctaccaacggtagcaccatctcgctcccactcccaaccactccgccaccaccgctctcctgcgcctgcgtccgcgcctcctccctgcggccccggccgcaccggcgacatggccatccccgttgaggaggccatcgccgccctctccaccttctcgctcgaggggttagctgtgctcctgtctagtgaaagatatgcgactaacagtcctattgagtacagcgatgttgctgcttatcgtctatcactaggagaagatacaaaagcaatcaaccagctgaatacactgatcaaagaaggaaaagaaatgacatctttgctgtacacataccgtagctgtgtaaaagctctacctcagctgcctgattcaatgaagcataatcaagcagacttgtatcttgaaacctatcaagttcttgacatggaaatgagccatttacgtgaaattcagagatggcaagcttctgctgcttctaagttagcggctgacatgcagagattctctaggccagagagactggttaatggacccacaatcactcatttttggtctatgcttaagttgcttgacgtcctactgcagcttgatcatctcaagaatgcaaaagcaagcataccaaatgatttttcatggtacaagagaacgttcactcaagtaagcacccagtggcaggatactgacaccatgagagaagagctggatgatcttcagatttttctgagcaccagatgggccatcttgttaaatttgcatgctgagatgtttcggacaaataccgttgaggatattctacaggttcttatagtattttgtgtggagtcattggaattggactttgctcttctttttcctgagcgccataccctacttcgtgtcctcccagttttggttgtcctagcaacctcatcagagaaggagagtgagtcactttataaaagggtgaagataaatcgtcttctcaatgtttttaagaatgatccagtgatcccggcatttccagatctgcatctttctcctgctgcaattttgaaggaattgtcatcatattttcaaaatttttccagtcaaactcgtctccttgctcttcaagcgcctcatgaaattcagggtcgtgagctacaagattatcagaggcattacttgattttgaatcacatgggaactatcagagctgatcatgacgacttctctatacgttttgcctctgctatggatcagatgataaggttgaagtcatcagatggtgtgtataatgactggtcccgcgatatcaaagggaacatgtatgatattgttgttgaaggcttccagcttcttagtcgttggactggcaggatttgggaacaatgtgcatggaaattctctcgccctatttcagattctcaacaaaactccatgacatgttttgactatgaaaaggtagtacgctataactatactgctgaagaacgaagggctctgcttgaattaattggttacataaagagtattggattgatgatgcagcattgtgatactttagtgtctgaagctttgtgggaaacgatacacatggaggtccaagattttgtacaggataaacttgatactatgcttcgtacaacatttagaaagaagaaggacctttcccggattctctctgatatgcggaccctctcagcagattggatggccagcactagtaaagcagacccagagcagcactcgctacaccaagaaactgaggaaatgagacaaaacacattttacccaagaccagttgcaccaacagctgcacagattcattgtttgcaatttcttatatgtgaacttgtatctggtggtaatctgagaaaagttggaggactatttgggaatagtggctctggcatacctgtggaagatcttaaacaactagagacatttttctacaagcttagttttttcttgcatattttggattatacagcgactattggtactctaactgatcttggatttctttggttcagagaattttaccttgaatcttctcgtgtcattcagtttccaattgaatgctcgctcccgtggatgctggtgggccatgtcattgaatcagaagatgctggtcttctcgaaagcattttgattccatttgacctgtacaatgactctgctcaacatgcactaacttctctcaagcagagatttctttatgatgaaattgaagctgaggctgatctttgcttcgatcttcttgctcagaagcttaatgagatcatctttacatattataagagctgtgcagcaagtactcttcttgatagttcatttacatatgcatgcgatgatggtgacaagtattttgtcaaacctttgcgattcgacgcgattttcaagttaaggagagtaatggttttagggaggacaattgatctaagaagcataattactcagagaatgaacaaaatattcagggaaaatattgactttctacttgagcgctttgaaaatggagatctttgtggtgttgtggaactgcaacaactgctggatattttggagcttacacaccaatcaatatcaagatttcttgaattggattcttactctcttatgcttagcgagatgcaagaaaatctttcgttggtttcttattcaagtcgcatctcttctcagatatggagtgagatgcagacagatttcttgccgaatttcatcttatgtaataccacacagcggtttgtccggtccgcaaaaggaactcaccactcttcgcatagatcaagcgcttctactgggaaaccttacttctattgtggatcacatgatttgaccatggcataccagggtcttgctgggctgtaccgtgacttttttggagtccctcatatgtttgcagttgttaaacttcttggttccagatcattacctgcaatcatccgtgctttactggatcatatatcaagtaagattacaggtttgctaccgaaaataaatgcactgcaagaagcattaccaaaatctattgggcttctttcatttgatggtggtatagcaggttgccaaaagatagttcatgaaattttgacatgggaagcaaaatctgaagttaaaactgaagttcttcatgaccttaaggaaattggaagtgctttgtattggatgagcattctggacattgtgttgagacaaatcgacactacacagttcatgcagtcagctccgtggctaggattggttccaggaaatgatgggcaagtgaagcatgcctactctgataatactccatttaccacacttttaagtgctgcctctaatgctgtgacatcaagccctacatgcccaaatccatctacgtttcttgtcatgtcaaagcaagctgaagctgcgagtctgctgtacaaatcaaacctcaactctggtagtgtgctggagtatgctcttgcattcacaagtgctgccctggatagacactatagcaaatggagcgcaactccaaaaacaggctttatcgacattactacttcaaaggatttctatcgcatttttagcggtcttcagtatagttacttagaagatagcattaacaatccttcgaagaaacaagaaatgctgggtgattctgtagcctgggctggctgtacgataatgtacttactgggacagcagcagcacttcgagctttttgatttctcctatcaatttctcaatgtggcagaagtagaaagtgcgacagtatcacactatcaatcttcagagaggactaaaagttcaaatttcttgcaaggctacgagggcatcctggaagcgatgaggaaggctaggaggctcaataaccatgttttctccatgttgagggcacgatgtccccttgaggacaaggttgcatgtgctatcaagccaagtggggcaccgcttcaccggatgaagtttatgaacaccgtttctgcattcgagacattgccacaaagagtcacctaaccagcttccaggcaatgtgcagaatgtactcttgtatgcggggttatatgttatgttgtaaggtaaatgtatattatgtagtcacaagtcacaaccatcaaccgtggatcctggacctgaacaggagaatgtgtttgcttgctatatatgaaaattaggtgggtatgttgaagttgaccctgagttcgcaagtttagctttcaactttgagactatctcgctgaaccaaatatgtaaaccagctggagagttgagccagaggacacgtgctagttagctgttcttctcgtgtctgtatttctcagactgctctcaaagtatatttaatgtatgacgattcagattagcttaaaaagttgtgttatccgagaactcatttcggcgtgcatgtaaccactcccctatcttgctcagtatctcgtcgcatcatgcttttaataaatcagatgatcaagcacataagggttgctgactg

SEQ ID NO: 213450 - DNA, 3446 bp, Zea Mays
tttaagatgatccagtgatcccggcatttccagatctgcatctttctcctgctgcaattttgaaggaattgtcatcatattttcaaaatttttccagtcaaactcgtctccttgctcttcaagcgcctcatgaaattcagggtcgtgagctacaagattatcagaggcattacttgattttgaatcacatgggaactatcagagctgatcatgacgacttctctatacgttttgcctctgctatggatcagatgataaggttgaagtcatcagatggtgtgtataatgactggtcccgcgatatcaaagggaacatgtatgatattgttgttgaaggcttccagcttcttagtcgttggactggcaggatttgggaacaatgtgcatggaaattctctcgccctatttcagattctcaacaaaactccatgacatgttttgactatgaaaaggtagtacgctataactatactgctgaagaacgaagggctctgcttgaattaattggttacataaagagtattggattgatgatgcagcattgtgatactttagtgtctgaagctttgtgggaaacgatacacatggaggtccaagattttgtacaggataaacttgatactatgcttcgtacaacatttagaaagaagaaggacctttcccggattctctctgatatgcggaccctctcagcagattggatggccagcactagtaaagcagacccagagcagcactcgctacaccaagaaactgaggaaatgagacaaaacacattttacccaagaccagttgcaccaacagctgcacagattcattgtttgcaatttcttatatgtgaacttgtatctggtggtaatctgagaaaagttggaggactatttgggaatagtggctctggcatacctgtggaagatcttaaacaactagagacatttttctacaagcttagttttttcttgcatattttggattatacagcgactattggtactctaactgatcttggatttctttggttcagagaattttaccttgaatcttctcgtgtcattcagtttccaattgaatgctcgctcccgtggatgctggtgggccatgtcattgaatcagaagatgctggtcttctcgaaagcattttgattccatttgacctgtacaatgactctgctcaacatgcactaacttctctcaagcagagatttctttatgatgaaattgaagctgaggctgatctttgcttcgatcttcttgctcagaagcttaatgagatcatctttacatattataagagctgtgcagcaagtactcttcttgatagttcatttacatatgcatgcgatgatggtgacaagtattttgtcaaacctttgcgattcgacgcgattttcaagttaaggagagtaatggttttagggaggacaattgatctaagaagcataattactcagagaatgaacaaaatattcagggaaaatattgactttctacttgagcgctttgaaaatggagatctttgtggtgttgtggaactgcaacaactgctggatattttggagcttacacaccaatcaatatcaagatttcttgaattggattcttactctcttatgcttagcgagatgcaagaaaatctttcgttggtttcttattcaagtcgcatctcttctcagatatggagtgagatgcagacagatttcttgccgaatttcatcttatgtaataccacacagcggtttgtccggtccgcaaaaggaactcaccactcttcgcatagatcaagcgcttctactgggaaaccttacttctattgtggatcacatgatttgaccatggcataccagggtcttgctgggctgtaccgtgacttttttggagtccctcatatgtttgcagttgttaaacttcttggttccagatcattacctgcaatcatccgtgctttactggatcatatatcaagtaaggtttgctaccgaaaataaatgcactgcaagaagcattaccaaaatctattgggcttctttcatttgatggtggtatagcaggttgccaaaagatagttcatgaaattttgacatgggaagcaaaatctgaagttaaaactgaagttcttcatgaccttaaggaaattggaagtgctttgtattggatgagcattctggacattgtgttgagacaaatcgacactacacagttcatgcagtcagctccgtggctaggattggttccaggaaatgatgggcaagtgaagcatgcctactctgataatactccatttaccacacttttaagtgctgcctctaatgctgtgacatcaagccctacatgcccaaatccatctacgtttcttgtcatgtcaaagcaagctgaagctgcgagtctgctgtacaaatcaaacctcaactctggtagtgtgctggagtatgctcttgcattcacaagtgctgccctggatagacactatagcaaatggagcgcaactccaaaaacaggctttatcgacattactacttcaaaggatttctatcgcatttttagcggtcttcagtatagttacttagaagatagcattaacaatccttcgaagaaacaagaaatgctgggtgattctgtagcctgggctggctgtacgataatgtacttactgggacagcagcagcacttcgagctttttgatttctcctatcaatttctcaatgtggcagaagtagaaagtgcgacagtatcacactatcaatcttcagagaggactaaaagttcaaatttcttgcaaggctacgagggcatcctggaagcgatgaggaaggctaggaggctcaataaccatgttttctccatgttgagggcacgatgtccccttgaggacaaggttgcatgtgctatcaagccaagtggggcaccgcttcaccggatgaagtttatgaacaccgtttctgcattcgagacattgccacaaagagtcacctaaccagcttccaggcaatgtgcagaatgtactcttgtatgcggggttatatgttatgttgtaaggtaaatgtatattatgtagtcacaagtcacaaccatcaaccgtggatcctggacctgaacaggagaatgtgtttgcttgctatatatgaaaattaggtgggtatgttgaagttgaccctgagttcgcaagtttagctttcaactttgagactatctcgctgaaccaaatatgtaaaccagctggagagttgagccagaggacacgtgctagttagctgttcttctcgtgtctgtatttctcagactgctctcaaagtatatttaatgtatgacgattcagattagcttaaaaagttgtgttatccgagaactcatttcggcgtgcatgtaaccactcccctatcttgctcagtatctcgtcgcatcatgcttttaataaatcagatgatcaagcacataagggttgctgactg

SEQ ID NO: 213451 - DNA, 2262 bp, Zea Mays
ctacctggatccttaaatgcgtcttgatagctctgagggctgatctttgcttcgatcttcttgctcagaagcttaatgagatcatctttacatattataagagctgtgcagcaagtactcttcttgatagttcatttacatatgcatgcgatgatggtgacaagtattttgtcaaacctttgcgattcgacgcgattttcaagttaaggagagtaatggttttagggaggacaattgatctaagaagcataattactcagagaatgaacaaaatattcagggaaaatattgactttctacttgagcgctttgaaaatggagatctttgtggtgttgtggaactgcaacaactgctggatattttggagcttacacaccaatcaatatcaagatttcttgaattggattcttactctcttatgcttagcgagatgcaagaaaatctttcgttggtttcttattcaagtcgcatctcttctcagatatggagtgagatgcagacagatttcttgccgaatttcatcttatgtaataccacacagcggtttgtccggtccgcaaaaggaactcaccactcttcgcatagatcaagcgcttctactgggaaaccttacttctattgtggatcacatgatttgaccatggcataccagggtcttgctgggctgtaccgtgacttttttggagtccctcatatgtttgcagttgttaaacttcttggttccagatcattacctgcaatcatccgtgctttactggatcatatatcaagtaagattacaggtttgctaccgaaaataaatgcactgcaagaagcattaccaaaatctattgggcttctttcatttgatggtggtatagcaggttgccaaaagatagttcatgaaattttgacatgggaagcaaaatctgaagttaaaactgaagttcttcatgaccttaaggaaattggaagtgctttgtattggatgagcattctggacattgtgttgagacaaatcgacactacacagttcatgcagtcagctccgtggctaggattggttccaggaaatgatgggcaagtgaagcatgcctactctgataatactccatttaccacacttttaagtgctgcctctaatgctgtgacatcaagccctacatgcccaaatccatctacgtttcttgtcatgtcaaagcaagctgaagctgcgagtctgctgtacaaatcaaacctcaactctggtagtgtgctggagtatgctcttgcattcacaagtgctgccctggatagacactatagcaaatggagcgcaactccaaaaacaggctttatcgacattactacttcaaaggatttctatcgcatttttagcggtcttcagtatagttacttagaagatagcattaacaatccttcgaagaaacaagaaatgctgggtgattctgtagcctgggctggctgtacgataatgtacttactgggacagcagcagcacttcgagctttttgatttctcctatcaatttctcaatgtggcagaagtagaaagtgcgacagtatcacactatcaatcttcagagaggactaaaagttcaaatttcttgcaaggctacgagggcatcctggaagcgatgaggaaggctaggaggctcaataaccatgttttctccatgttgagggcacgatgtccccttgaggacaaggttgcatgtgctatcaagccaagtggggcaccgcttcaccggatgaagtttatgaacaccgtttctgcattcgagacattgccacaaagagtcacctaaccagcttccaggcaatgtgcagaatgtactcttgtatgcggggttatatgttatgttgtaaggtaaatgtatattatgtagtcacaagtcacaaccatcaaccgtggatcctggacctgaacaggagaatgtgtttgcttgctatatatgaaaattaggtgggtatgttgaagttgaccctgagttcgcaagtttagctttcaactttgagactatctcgctgaaccaaatatgtaaaccagctggagagttgagccagaggacacgtgctagttagctgttcttctcgtgtctgtatttctcagactgctctcaaagtatatttaatgtatgacgattcagattagcttaaaaagttgtgttatccgagaactcatttcggcgtgcatgtaaccactcccctatcttgctcagtatctcgtcgcatcatgcttttaataaatcagatgatcaagcacataagggttgctgactg

SEQ ID NO: 213452 - DNA, 762 bp, Zea Mays
cacctcgccctagtcatatgatcctctccccgccctcccaaccgcccccgtggcccctcccctcactctgtgagaccaatgcccgcagtgcttgccgccgcccaaccatggagatagggcagtacgccacgaccagctgctccaaggagcatcagaagatttccgctcgtggacgcatgtttgattttgtcccccctactatgtttccttcgatccccaatccccttcccaggtaagaaacacacgtctccacaggcggccaccactgattcggtctagctggaggtaacagtggcgatggagatggcggtcacagagccatgaactcatgggcgggggagcgtgtcaagaaaagaattacttcgccgagaaaagaaatctgacgaaatgacaatgcaagtagggattgttaacctgctaacacgtggagggctcgccttcaaggggatgcaacatggttgtaatctctaaagaagtaacatatgtctccaacaacaaagggtccatttatgtttttatggtttgaagctcctgacttgcttcaggaagattagtacaagctttgttgttttgatccctagctgtagttagtcctgggtgtagttggtaaatttgtgtttggaaattgatccagacatgtgcttttagtgtctgtccatgtaaaaacacagttagatcttattactttccattcctggctctgacagaatgacttgcgagactgttctatgctattagttttcatatttgttaaaaaaaaaa

SEQ ID NO: 213453 - DNA, 767 bp, Zea Mays
agcagacataactagaaacttcactttacacactttacggaagcatctatcgtaaaaaggaatgataattgggggagaaactaatacgcacagtacagattctgatgccttaggctaaaagaacaacttgcatcacgcatcatcactaaacagattaatattgttccaatggtacatcatgcacactgtgtaaagtactactgcaccgttgccctacagtctagctttttatttaaaaaaattgcaatgattaattttacaatatgcaaaggtaagtcaatggactacagtgctgagaactagatagccaataatttaacatgcagattgcacacaaggcaaagcaagtcttccaaggaagcttatatatgcaagcaaccatggggaaaacactaaccagagttgtccggtgaaggaagccaaacccacagaaattcagagctctccacaaggcagctatgctgatatttgggttaggggtctggatcattccaatgacgctcatctttgcaccatgcaggcgcctggttctccttgttgtcaagttccaggaactagaagcgagcatcatgcgcagtaggtcatcatatccagaagtatggagtcgcatagcgaggatacaaacaataagcatcacactgtgaaggaagattggaagtaattcccagttgagatatgcatttgaactttcatcagtctccttctcctgcacgtattgaatgcatatcagcatatgaaagcagtggtggcatgtaaccagaatcatg

SEQ ID NO: 213454 - DNA, 2505 bp, Zea Mays
cccgattcggtcacgtcaggccgtcgcgtccgacgcttcgcttacgccttcgggcgagcggcgctgctctcccgttcataatggtgaggtctgacggaaatcgagatcccaaccaaattcgttttttttagcgtgggagaagcgcggcgccaagacggcattgagctcgtcggcggcgctttcgaaagctggagcacgcgaagagcacattgccagaactagggttcaacaaattactttccatgatgtcagcgtgtccactgcttgaaccgaaatcaagattagaccggtgaagtgcaagcaaaagaaccccttctggaagatggaatcaagaacccaccgagttacatttgctagggaatcttgcaaaggccggtgtggcccgggattggagatcggtgaaaggcgaatatgaggggctggaaacagaccgacaatcgcttcgtgaaaactgtgcgcgtgaattggctccagtagagcatcaaaagcattaatggaaagagccccatagtggttggaccttggggagggacaggagggtacccttgggatgacggcgtgtactcaacaatacgccagatcgtgattggccatggtgcagctattgactcaataaggattgaatatgatctgaaaggaaggtcggtttggtcagaaacgcatggaggtactgatggtggctccgaaacagataaggtgaaactagattttccagatgaagtcctcgtgtctgtaagtggacactacggatctgtctgcgggacaccggtcatcataagatcgttgacgtttcagagcaacagctcgacgtacggacccttcggcaccgaggatggcacacctttctcactcccagttagcagtggcaagatcattggattccacgggcggtctgggtcgtatctcaactcaatcggtttctacctgaagcaggtgcattttccaactccagtgaatccttctccagcttcacctctgagcctcccgagtccacaaagtagaaacagcgcctatggcctcaccggtggcgacgctagacctgacatggttctcgccgtgcgagacagaggagacagctatgctgtctacgcgagcaatcaccccaaacagcagtacacaaacccgtcaccggacggagcaatctggaacaagatggtttctgtccccagttactacggagatactacaggagctgcagccgtgggcggcagccctcagacctatggcccctggggtgggagcggcggcaccatatttgacgacggcgtgtacactggcgtgtggcagatcaacttgacgcgcgcagtgggaatctcttctatcaaggttctgtatgatcggaacgggcaggccgtgtggggtaacaagcatggtttcagcagcggtgtcataccagacaagataatattcgacttcccgtcagaggtgctgactcacataaccgggttctacgattcagcaataatcatgggcccgaccgtggtcaggtctctgacgtttcacacgaacaagcggacgtacgggccgtacggcgatgagtacggcacgtacttctccacgagctttaccaatggaaggatagtggggtttcatggccgggaggggtggtacatcgacggcattggagtccatgttcaggaaggcaaggtggcgcagcagcggtttgttagcagaccgaagactccgactagcccattggtgcattacaacatgctcgcccaggcgccgagtgctacttacacggacggcgaggttgcttatggcatggtgaaagaaccggtcccgatgggaccagggccatggggtggggagggaggtcgggcatgggacgacggggtttacactggcgtgaagcagatctacgtcatgagaggagcgttcatcgggtcgatacagatcgagtatgacaggagcggccactccatctggtcttcaaggcacgggaacagcggccacatcacccacagggtgaagctggacttcccgcacgaagtgctgacgtgcgtgtacggctactacaacacgagcaaggaggacgggccccgggtcctgaggtcgctgacgttcctcaccaacaggggcaagtacgggccgttcggcgacgagttcggcgcctacttctcgtcggcgacgacggaggggaaggtggtggggttccacggccgcagcggccagcacctggacgccatcggcgtgcacatgcagcactggctcggggacaggaggcctgcccccaagtacgtgctgtccaagtacctgttctgattcatcacctggctgctcgggttacacgtatctaattttgggcgggtggattctaattacttgtatcatcaccatttattggttcggggcatactcatgcttgatttcgtatcgattaattgaaaagaagtacatcatctctctctctctctctctctgttgaatttcaagacattctttgtcagttatgatgcccaaatattcattgtgcctctgcttgttatggacgcagtacgcaga

SEQ ID NO: 213455 - DNA, 515 bp, Zea Mays
agttttggcttcccctccgccactctcgagagggccacacacaaaaaccccaatgcgagcgcccctggcttgtcggcgtcgcctccttcagccaaaaccctagcttgcatacgcgcccgaacaaagcttcgtctgcgaggggcgtcctcctgccgccagaagctttcaggagcatcagcgatggtgtggttccaatgcgaggactgtggcgagaacctcaagaagcccaaacttgccggccacttccgctcctgctccgcgtacaagctgtcatgcatcgattgcggcgagttattcagccacgacaccgtgcaggggcacacccagtgcatctccgaggccgagaagtacggtcctaagggacagaccaaaccatccaatggtgcacagggtaaggcagataagccaaagccaaatgcagatgtcgatatcaatgttgggctgtcgacacggcctccttggttctgtaggagcttgtttagatatttaggaactgtgtacttatcatggttttt

SEQ ID NO: 213456 - DNA, 247 bp, Zea Mays
cttcaaagtgggaaatggtcaagctaccagattctggaaggacaaatgggtaaccagtcgacctcttagtgagcaatttccgaatctctttaatatagttattttcagatgtactcactggttaagattctggagaccgctacaaaaggaggaatcgcaacaacaaattctcgttgcttcgcacgttttggaagtggtggcgatggaagtcttcgcaaaccatggatggcgctcaaatacaagaatt

SEQ ID NO: 213457 - DNA, 2309 bp, Zea Mays
gcacccgctctcgtactcgtaggcaaggcaacttcgcaaaacggcaaaaaggcagccacgccttgttcatttttatttttttaatctcctcccgtcggcgaaattttacacgccagcaaaaccgccctgaggatgaaatagaaaaaaccccaaacaagccctaacgcgtcccccggaaccagaacaagtccagtctgtccagaaatacattagaaaaaagagccaaagaggagaacaccggccggcgaggtggacgaagcggcccgccgaggaaatggcgtcgatgcagagctggcgcaaggcctacggcgccatcaaggacaccaccaccgttagcatcgccaatctcaactccgacttcaaggatctggatgtggcgatcgtgaaggcgactaaccacgtggagtgcccgcctaaggagcgacacctgcgcagggttgttgcagcgacgtccatcaccaggcctcgggcagatgtcgcctactgcatccacgcgcttgcccgccgtcttgccaagacccgcaactggatcgttgctctaaaagcacttgtagtgatccatagacttcttcgcgagggtgatcctacatttcgagaagagcttctcaactttacacagaggggacggatcctgcaactttcaaactttaaggatgactccagtccaattgcttgggattgttctgcctgggtgcgcacatatggtttgtatttggaggaaaggttggaatgcttcagagttctgaaatatgatgtcgaagctgagcgcttgtccaaacaaggtcaaggtcctgaaaagggtcacagtagaacgagagagttggattcacaggatctgttagagcagctgccagcattgcagcagttactgtaccgacttgttggatgtcggcctgaaggagctgcaaataataactacttggtgcaatatgctcttgctttggtgctaaaagaaagctttaaaatttattgtgcaataaatgatggaatcataaacctcgttgataagttttttgagatgccaagacatgatgcacttaaagctcttgaaatctacagaagggctggccaacaggctgggaatctatctgatttctacgagaattgccggggattagaacttgctaggaattttcagtttcccactctgagggagccaccacaaacatttcttgctactatggaggactatgtgaaggaggctccacgcatggtcccagttcgagaacccctggaacttcctgagaggctgcttcttacatacaaacctgaagaatcagaggaaattcttgagcctgctcctgttgaagaggaaaaagtaccagttgaagaacctgttcttgtaccacctgttactgaagttgtttcacctcctcccaaggctgaggtgcccgatactgggcttagatgatacaaatcctgctgtatcagctatagaggaaagcaatgctcttgccttggctattgttccaacagatggcgcttcaacaactggtaacactgcatttcaagataaggggtttgatcctacaggatgggaacttgcccttgttactgcaccaagcaatacaacttcatctacttctgttggtcaattgggtggtggactcgacaagctcattttggagagcctttatgatgatggggcctacaggcagaggcaacaacaacagctgtatggttcagcagctcctaatccattcatggcaaatgatcctttcgcgatgtcgaaccaagttgctcctccaccatcagttcaaatggctgccatgtctcagcagcatcagcaaatcccaacgatgatgcaaccaaatccctttggaccacctatgcatccacaggtgagcatggcccctgcaacaaacaatccctttctggatgctggcttcggggcattcccagcggcgaacaacggccatcagcaacacaacccatttggcagtgcccaacttctgtaggtcacttagtcacaagagcaaatttgtgccccagcagatgcgatttttgtgtgattatatcatgcattgtgctggacctttcttgcatgtgacgcgtgtattatgttatggcttcaccacacggagagctgtgcctatgtcgtgacccaactcttgttgtaaagaaattagtcacctgtgtaacatccaatatatgtcaataaacagtaggcagtgttattacatctataaacaaaagaacagtggtatgtaggaaattcttaatattgtttattccattgctttttatcttcttggaaagctgttccgttgttgtttgattgccactcttttgcatgcattgtgattgat

SEQ ID NO: 213458 - DNA, 2187 bp, Zea Mays
cttcgatccggatctggatgtggcgatcgtgaaggcgactaaccacgtggagtgcccgcctaaggagcgacacctgcgcagtgcgttgatttgttcttataccccgtgtttccgcgtatctaggcttcggcctaatttagtgtttttctattgggggcgggcggaattagatcgtgcctataagtggcgaggggaggctctgaaggggggagggaagggcgtgcgtgcttttgggttcgtgcagtgtttaatgatggttgattgttgcgtggtggtatcacaggggttgttgcagcgacgtccatcaccaggcctcgggcagatgtcgcctactgcatccacgcgcttgcccgccgtcttgccaagacccgcaactggatcgttgctctaaaagcacttgtagtgatccatagacttcttcgcgagggtgatcctacatttcgagaagagcttctcaactttacacagaggggacggatcctgcaactttcaaactttaaggatgactccagtccaattggttagaatttctagcttgcttgggattgttctgcctgggtgcgcacatatggtttgtatttggaggaaaggttggaatgcttcagagttctgaaatatgatgtcgaagctgagcgcttgtccaaacaaggtcaaggtcctgaaaagggtcacagtagaacgagagagttggattcacaggatctgttagagcagctgccagcattgcagcagttactgtaccgacttgttggatgtcggcctgaaggagctgcaaataataactacttggtgcaatatgctcttgctttggtgctaaaagaaagctttaaaatttattgtgcaataaatgatggaatcataaacctcgttgataagttttttgagatgccaagacatgatgcacttaaagctcttgaaatctacagaagggctggccaacaggctgggaatctatctgatttctacgagaattgccggggattagaacttgctaggaattttcagtttcccactctgagggagccaccacaaacatttcttgctactatggaggactatgtgaaggaggctccacgcatggtcccagttcgagaacccctggaacttcctgagaggctgcttcttacatacaaacctgaagaatcagaggaaattcttgagcctgctcctgttgaagaggaaaaagtaccagttgaagaacctgttcttgtaccacctgttactgaagttgtttcacctcctcccaaggctgaggtgcccgatactggtgacttactgggcttagatgatacaaatcctgctgtatcagctatagaggaaagcaatgctcttgccttggctattgttccaacagatggcgcttcaacaactggtaacactgcatttcaagataaggggtttgatcctacaggatgggaacttgcccttgttactgcaccaagcaatacaacttcatctacttctgttggtcaattgggtggtggactcgacaagctcattttggagagcctttatgatgatggggcctacaggcagaggcaacaacaacagctgtatggttcagcagctcctaatccattcatggcaaatgatcctttcgcgatgtcgaaccaagttgctcctccaccatcagttcaaatggctgccatgtctcagcagcatcagcaaatcccaacgatgatgcaaccaaatccctttggaccacctatgcatccacaggtgagcatggcccctgcaacaaacaatccctttctggatgctggcttcggggcattcccagcggcgaacaacggccatcagcaacacaacccatttggcagtgcccaacttctgtaggtcacttagtcacaagagcaaatttgtgccccagcagatgcgatttttgtgtgattatatcatgcattgtgctggacctttcttgcatgtgacgcgtgtattatgttatggcttcaccacacggagagctgtgcctatgtcgtgacccaactcttgttgtaaagaaattagtcacctgtgtaacatccaatatatgtcaataaacagtaggcagtgttattacatctataaacaaaagaacagtggtatgtaggaaattcttaatattgtttattccattgctttttatcttcttggaaagctgttccgttgttgtttgattgccactcttttgcatgcattgtgattgat

SEQ ID NO: 213459 - DNA, 3421 bp, Zea Mays
ccacgcggctgcgggctgcggcgggggcggcgtccgaggcttagggtttagcgtttggaggagtttaggggtttgtgaggaggaagaggaggaggaggaggaggaggaggagcggatggggacagcggggaagggcgcgtgggtggtgccggcgccggcgtacagggaggtggaggggtgggagggcgcgggggacgacgcgccgggcttcaggtgcgcccactcgctcaccgccgtcgcgcctaccaagggccacggcccgcggctcatcctcttcggcggcgccaccgccatcgagaccggcgcatcttcgggcctccccggcatcaggctcgcgggggtgacgaactcggtgcactcgtacgacgtggagacgcgcaggtggacgaggttacatcctgctggagagcctccgtctccgagggccgcgcatgctgcagctgcagtgggcaccatggttgttttccagggcactccacagacgatctctatgtccttgacctcacaaacgacaagtttaaatggcacagggttgttgttcaaggggcggggcctggtcctcgctatggtcactgcatggatttggtagctcaacggtatcttgttactgtctcaggaaatgacggaaagcgggccttgtcagatgcttgggcattggacacagcacagaaaccatataggtggcagaaacttaaccctgaaggtgatagaccttcagcaagaatgtatgctaccgccagtacacgctctgatggcatgcttttactttgtggtggaagggatgcttctggaatgccactgtctgatgcctatgggctactaatgcatacaaatggccagtgggaatggactctagccccaggggtatctccatctcctagatatcagcatgcagccgtttttgttggtgctcggttgcatgttactggaggtgtccttagaggaggcagagctattgaaggagagggcgcaatagcagtcctggacactgctgctggagtttggttggatagaaatggcattgtgacctctcgtactttgaagtcatccaatgaacatgatgcttcttcggatctacttcggcgctgtcgtcatgctgctgcctcagttggttctcagatttacatttatggtggactcaggggagatatcctcctcgatgatttcctggttgctgagaatgcacccttccaatcagaaatcacttcgtctatgtacaatgttgatagagtccctaggggggaaactcaaaatagaaacaataattttcattcagattcacctgtccatcaatctacaaataacaggcaagaggcagcttctggtttcagtgcggacaagaagtcaattgacatgttgatagaggcctcaactgcggaagctgaagctgtcagcgctgtatggcgagctgctaaggaagcatctgcagcgtcttcggaagacagtctttcggagggaataggatcagaatccccattgagtgaaacttcaccaatgcctgaagatttcgatgatggggggtctctagaaccagatgtgaaactacattctagagcagttgtggttgctaaagaagcagtaggagatttaggatgcttggtcaggcagctctcactggatcagtttgagaatgaaagcagacggatgcatccttcaaacaatgaccaatcttatccaggccggagaacattaaatagacaacgatcaccacaaggtttgcataagaaggttatttcgttcttacttaagccaagaaattggagagctcctgctgatagaacattttttctggattcttacgaagttggcgagctatgctacgctgccgagcagatttttatgcaagaaccaactgttttacaattaaaagcaccaattaaagtatttggtgatcttcatgggcagtttggggacttaatgcgcctttttgatgagtatggttttccgtcaactgctggtgacataacgtatattgattatctcttcttgggagactatgttgaccgaggtcagcacagcttagagacaatagctttgcttcttgctcttaaaatcgagtaccctgaaaatgtacacttgatcagaggaaatcatgaagctgctgacatcaatgccctttttggcttccgccttgaatgcattgagagaatgggtgaaagtgatggaatatgggcttggacaagattcaatcaactgttcaattatctcccactcgctgccatgatagaaaagaaaataatctgcatgcatggaggcataggaaggtcaataaacacagtggagcaaattgagaaacttgagaggcctatcacaatggatgttggttccattgtcctcatggacctgctatggtctgatcctacagaaaatgatagtgtggagggtttgagacctaatgcacgagggcccggcttagtgacatttgggcctgatcgagtaacagaattctgtaaacgaaacaaattgcagttgatcataagagcccatgagtgtgttatggatgggtttgagcgtttcgctcatggacaattgatcactttattttcagcaacaaattactgtggtactgcgaacaacgcaggggccatacttgttgtcggcaggggcttagttatcgtgccaaagttaattcatccacttccacctcctgttaattcacctgagtcctcccccgaacgtggggatgccacatggatgcaggagcttaacattcagcggccacctactccaaccagagggcggccacaagctgccggtgataggaattctcttgcttacatatgatacttgacacgacagagccacctccatctgctggatatgtttgtttgtaatcagaaatttctttaccagtttcaaggtacatatggtatagccaagaagaacaatcaaccaacaggacatcatggatacacttgtgatcagttccctggtaatcctttgtgatgcatcggttttaactgtagttgtgtgctaccgtgacttcagctcctaactggggagctgcataatcagcatttcagatctcaagcaacattgtatgattgcgataccagtggacaataatcaagtctgatgtagttgtaatagctaatctgtaatttcagtgtacatggatagattgttctttcgtcagagtaggaaggtttccaaatgtttgcatactatgcatgctgcagcctgggacgcggtttaaacaggacagctatacaagttgccagatctgagctagattgggcagagaagatttgaaccattttatttgctctccgcggagcgcgaatgtaagaggttgtgttgtgttgtgaaatactgaattcgttataggtatttgtgcaataaattaagttttgcttaaatcagtgaatgctttggtttagtgacctgagttacaacgacaacaaagccctttagttagaga

SEQ ID NO: 213460 - DNA, 3747 bp, Zea Mays
actccagttcccacacggcggcggccgcgcccgccatttactccgctccggcgtactcctcccactcctgagctgtcgctgacactgacagcaacccccattgactcccgacatccacagccgcacttactcacgtgccaccgacactccggtcccaccctatgaaccccctcccaccgccaccagggccccgccgcgttcccaccctactacctgtcaccgcggccgtcgtctcccccgtcctattcacgaattccgaattccactgcgctgcgcttctgctccccccttctctctccctccgtgttcgctccctcggatcccacgcggctgcgggctgcggcgggggcggcgtccgaggcttagggtttagcgtttggaggagtttaggggtttgtgaggaggaagaggaggaggaggaggaggaggaggagcggatggggacagcggggaagggcgcgtgggtggtgccggcgccggcgtacagggaggtggaggggtgggagggcgcgggggacgacgcgccgggcttcaggtgcgcccactcgctcaccgccgtcgcgcctaccaagggccacggcccgcggctcatcctcttcggcggcgccaccgccatcgagaccggcgcatcttcgggcctccccggcatcaggctcgcgggggtgacgaactcggtgcactcgtacgacgtggagacgcgcaggtggacgaggttacatcctgctggagagcctccgtctccgagggccgcgcatgctgcagctgcagtgggcaccatggttgttttccagggtggaattggaccagcagggcactccacagacgatctctatgtccttgacctcacaaacgacaagtttaaatggcacagggttgttgttcaaggggcggggcctggtcctcgctatggtcactgcatggatttggtagctcaacggtatcttgttactgtctcaggaaatgacggaaagcgggccttgtcagatgcttgggcattggacacagcacagaaaccatataggtggcagaaacttaaccctgaaggtgatagaccttcagcaagaattacacgctctgatggcatgcttttactttgtggtggaagggatgcttctggaatgccactgtctgatgcctatgggctactaatgcatacaaatggccagtgggaatggactctagccccaggggtatctccatctcctagatatcagcatgcagccgtttttgttggtgctcggttgcatgttactggaggtgtccttagaggaggcagagctattgaaggagagggcgcaatagcagtcctggacactgctgctggagtttggttggatagaaatggcattgtgacctctcgtactttgaagtcatccaatgaacatgatgcttcttcggatctacttcggcgctgtcgtcatgctgctgcctcagttggttctcagatttacatttatggtggactcaggggagatatcctcctcgatgatttcctggttgctgagaatgcacccttccaatcagaaatcacttcgtctatgtacaatgttgatagagtccctaggggggaaactcaaaatagaaacaataattttcattcagattcacctgtccatcaatctacaaataacaggcaagaggcagcttctggtttcagtgcggacaagaagtcaattgacatgttgatagaggcctcaactgcggaagctgaagctgtcagcgctgtatggcgagctgctaaggaagcatctgcagcgtcttcggaagacagtctttcggagggaataggatcagaatccccattgagtgaaacttcaccaatgcctgaagatttcgatgatggggggtctctagaaccagatgtgaaactacattctagagcagttgtggttgctaaagaagcagtaggagatttaggatgcttggtcaggcagctctcactggatcagtttgagaatgaaagcagacggatgcatccttcaaacaatgaccaatcttatccaggccggagaacattaaatagacaacgatcaccacaaggtttgcataagaaggttatttcgttcttacttaagccaagaaattggagagctcctgctgatagaacattttttctggattcttacgaagttggcgagctatgctacgctgccgagcagatttttatgcaagaaccaactgttttacaattaaaagcaccaattaaagtatttggtgatcttcatgggcagtttggggacttaatgcgcctttttgatgagtatggttttccgtcaactgctggtgacataacgtatattgattatctcttcttgggagactatgttgaccgaggtcagcacagcttagagacaatagctttgcttcttgctcttaaaatcgagtaccctgaaaatgtacacttgatcagaggaaatcatgaagctgctgacatcaatgccctttttggcttccgccttgaatgcattgagagaatgggtgaaagtgatggaatatgggcttggacaagattcaatcaactgttcaattatctcccactcgctgccatgatagaaaagaaaataatctgcatgcatggaggcataggaaggtcaataaacacagtggagcaaattgagaaacttgagaggcctatcacaatggatgttggttccattgtcctcatggacctgctatggtctgatcctacagaaaatgatagtgtggagggtttgagacctaatgcacgagggcccggcttagtgacatttgggcctgatcgagtaacagaattctgtaaacgaaacaaattgcagttgatcataagagcccatgagtgtgttatggatgggtttgagcgtttcgctcatggacaattgatcactttattttcagcaacaaattactgtggtactgcgaacaacgcaggggccatacttgttgtcggcaggggcttagttatcgtgccaaagttaattcatccacttccacctcctgttaattcacctgagtcctcccccgaacgtggggatgccacatggatgcaggagcttaacattcagcggccacctactccaaccagagggcggccacaagctgccggtgataggaattctcttgcttacatatgatacttgacacgacagagccacctccatctgctggatatgtttgtttgtaatcagaaatttctttaccagtttcaaggtacatatggtatagccaagaagaacaatcaaccaacaggacatcatggatacacttgtgatcagttccctggtaatcctttgtgatgcatcggttttaactgtagttgtgtgctaccgtgacttcagctcctaactggggagctgcataatcagcatttcagatctcaagcaacattgtatgattgcgataccagtggacaataatcaagtctgatgtagttgtaatagctaatctgtaatttcagtgtacatggatagattgttctttcgtcagagtaggaaggtttccaaatgtttgcatactatgcatgctgcagcctgggacgcggtttaaacaggacagctatacaagttgccagatctgagctagattgggcagagaagatttgaaccattttatttgctctccgcggagcgcgaatgtaagaggttgtgttgtgttgtgaaatactgaattcgttataggtatttgtgcaataaattaagttttgcttaaatcagtgaatgctttggtttagtgacctgagttacaacgacaacaaagccctttagttagaga

SEQ ID NO: 213461 - DNA, 3732 bp, Zea Mays
ccacactccagttcccacacggcggcggccgcgcccgccatttactccgctccggcgtactcctcccactcctgagctgtcgctgacactgacagcaacccccattgactcccgacatccacagccgcacttactcacgtgccaccgacactccggtcccaccctatgaaccccctcccaccgccaccagggccccgccgcgttcccaccctactacctgtcaccgcggccgtcgtctcccccgtcctattcacgaattccgaattccactgcgctgcgcttctgctccccccttctctctccctccgtgttcgctccctcggatcccacgcggctgcgggctgcggcgggggcggcgtccgaggcttagggtttagcgtttggaggagtttaggggtttgtgaggaggaagaggaggaggaggaggaggaggaggagcggatggggacagcggggaagggcgcgtgggtggtgccggcgccggcgtacagggaggtggaggggtgggagggcgcgggggacgacgcgccgggcttcaggtgcgcccactcgctcaccgccgtcgcgcctaccaagggccacggcccgcggctcatcctcttcggcggcgccaccgccatcgagaccggcgcatcttcgggcctccccggcatcaggctcgcgggggtgacgaactcggtgcactcgtacgacgtggagacgcgcaggtggacgaggttacatcctgctggagagcctccgtctccgagggccgcgcatgctgcagctgcagtgggcaccatggttgttttccagggtggaattggaccagcagggcactccacagacgatctctatgtccttgacctcacaaacgacaagtttaaatggcacagggttgttgttcaaggggcggggcctggtcctcgctatggtcactgcatggatttggtagctcaacggtatcttgttactgtctcaggaaatgacggaaagcgggccttgtcagatgcttgggcattggacacagcacagaaaccatataggtggcagaaacttaaccctgaaggtgatagaccttcagcaagaatgtatgctaccgccagtacacgctctgatggcatgcttttactttgtggtggaagggatgcttctggaatgccactgtctgatgcctatgggctactaatgcatacaaatggccagtgggaatggactctagccccaggggtatctccatctcctagatatcagcatgcagccgtttttgttggtgctcggttgcatgttactggaggtgtccttagaggaggcagagctattgaaggagagggcgcaatagcagaaatggcattgtgacctctcgtactttgaagtcatccaatgaacatgatgcttcttcggatctacttcggcgctgtcgtcatgctgctgcctcagttggttctcagatttacatttatggtggactcaggggagatatcctcctcgatgatttcctggttgctgagaatgcacccttccaatcagaaatcacttcgtctatgtacaatgttgatagagtccctaggggggaaactcaaaatagaaacaataattttcattcagattcacctgtccatcaatctacaaataacaggcaagaggcagcttctggtttcagtgcggacaagaagtcaattgacatgttgatagaggcctcaactgcggaagctgaagctgtcagcgctgtatggcgagctgctaaggaagcatctgcagcgtcttcggaagacagtctttcggagggaataggatcagaatccccattgagtgaaacttcaccaatgcctgaagatttcgatgatggggggtctctagaaccagatgtgaaactacattctagagcagttgtggttgctaaagaagcagtaggagatttaggatgcttggtcaggcagctctcactggatcagtttgagaatgaaagcagacggatgcatccttcaaacaatgaccaatcttatccaggccggagaacattaaatagacaacgatcaccacaaggtttgcataagaaggttatttcgttcttacttaagccaagaaattggagagctcctgctgatagaacattttttctggattcttacgaagttggcgagctatgctacgctgccgagcagatttttatgcaagaaccaactgttttacaattaaaagcaccaattaaagtatttggtgatcttcatgggcagtttggggacttaatgcgcctttttgatgagtatggttttccgtcaactgctggtgacataacgtatattgattatctcttcttgggagactatgttgaccgaggtcagcacagcttagagacaatagctttgcttcttgctcttaaaatcgagtaccctgaaaatgtacacttgatcagaggaaatcatgaagctgctgacatcaatgccctttttggcttccgccttgaatgcattgagagaatgggtgaaagtgatggaatatgggcttggacaagattcaatcaactgttcaattatctcccactcgctgccatgatagaaaagaaaataatctgcatgcatggaggcataggaaggtcaataaacacagtggagcaaattgagaaacttgagaggcctatcacaatggatgttggttccattgtcctcatggacctgctatggtctgatcctacagaaaatgatagtgtggagggtttgagacctaatgcacgagggcccggcttagtgacatttgggcctgatcgagtaacagaattctgtaaacgaaacaaattgcagttgatcataagagcccatgagtgtgttatggatgggtttgagcgtttcgctcatggacaattgatcactttattttcagcaacaaattactgtggtactgcgaacaacgcaggggccatacttgttgtcggcaggggcttagttatcgtgccaaagttaattcatccacttccacctcctgttaattcacctgagtcctcccccgaacgtggggatgccacatggatgcaggagcttaacattcagcggccacctactccaaccagagggcggccacaagctgccggtgataggaattctcttgcttacatatgatacttgacacgacagagccacctccatctgctggatatgtttgtttgtaatcagaaatttctttaccagtttcaaggtacatatggtatagccaagaagaacaatcaaccaacaggacatcatggatacacttgtgatcagttccctggtaatcctttgtgatgcatcggttttaactgtagttgtgtgctaccgtgacttcagctcctaactggggagctgcataatcagcatttcagatctcaagcaacattgtatgattgcgataccagtggacaataatcaagtctgatgtagttgtaatagctaatctgtaatttcagtgtacatggatagattgttctttcgtcagagtaggaaggtttccaaatgtttgcatactatgcatgctgcagcctgggacgcggtttaaacaggacagctatacaagttgccagatctgagctagattgggcagagaagatttgaaccattttatttgctctccgcggagcgcgaatgtaagaggttgtgttgtgttgtgaaatactgaattcgttataggtatttgtgcaataaattaagttttgcttaaatcagtgaatgctttggtttagtgacctgagttacaacgacaacaaagccctttagttagaga

SEQ ID NO: 213462 - DNA, 3821 bp, Zea Mays
ttgggacccgcaccgcactggctatcaaaacggagccttggcagcgggaggagccccacactccagttcccacacggcggcggccgcgcccgccatttactccgctccggcgtactcctcccactcctgagctgtcgctgacactgacagcaacccccattgactcccgacatccacagccgcacttactcacgtgccaccgacactccggtcccaccctatgaaccccctcccaccgccaccagggccccgccgcgttcccaccctactacctgtcaccgcggccgtcgtctcccccgtcctattcacgaattccgaattccactgcgctgcgcttctgctccccccttctctctccctccgtgttcgctccctcggatcccacgcggctgcgggctgcggcgggggcggcgtccgaggcttagggtttagcgtttggaggagtttaggggtttgtgaggaggaagaggaggaggaggaggaggaggaggagcggatggggacagcggggaagggcgcgtgggtggtgccggcgccggcgtacagggaggtggaggggtgggagggcgcgggggacgacgcgccgggcttcaggtgcgcccactcgctcaccgccgtcgcgcctaccaagggccacggcccgcggctcatcctcttcggcggcgccaccgccatcgagaccggcgcatcttcgggcctccccggcatcaggctcgcgggggtgacgaactcggtgcactcgtacgacgtggagacgcgcaggtggacgaggttacatcctgctggagagcctccgtctccgagggccgcgcatgctgcagctgcagtgggcaccatggttgttttccagggtggaattggaccagcagggcactccacagacgatctctatgtccttgacctcacaaacgacaagtttaaatggcacagggttgttgttcaaggggcggggcctggtcctcgctatggtcactgcatggatttggtagctcaacggtatcttgttactgtctcaggaaatgacggaaagcgggccttgtcagatgcttgggcattggacacagcacagaaaccatataggtggcagaaacttaaccctgaaggtgatagaccttcagcaagaatgtatgctaccgccagtacacgctctgatggcatgcttttactttgtggtggaagggatgcttctggaatgccactgtctgatgcctatgggctactaatgcatacaaatggccagtgggaatggactctagccccaggggtatctccatctcctagatatcagcatgcagccgtttttgttggtgctcggttgcatgttactggaggtgtccttagaggaggcagagctattgaaggagagggcgcaatagcagtcctggacactgctgctggagtttggttggatagaaatggcattgtgacctctcgtactttgaagtcatccaatgaacatgatgcttcttcggatctacttcggcgctgtcgtcatgctgctgcctcagttggttctcagatttacatttatggtggactcaggggagatatcctcctcgatgatttcctggttgctgagaatgcacccttccaatcagaaatcacttcgtctatgtacaatgttgatagagtccctaggggggaaactcaaaatagaaacaataattttcattcagattcacctgtccatcaatctacaaataacaggcaagaggcagcttctggtttcagtgcggacaagaagtcaattgacatgttgatagaggcctcaactgcggaagctgaagctgtcagcgctgtatggcgagctgctaaggaagcatctgcagcgtcttcggaagacagtctttcggagggaataggatcagaatccccattgagtgaaacttcaccaatgcctgaagatttcgatgatggggggtctctagaaccagatgtgaaactacattctagagcagttgtggttgctaaagaagcagtaggagatttaggatgcttggtcaggcagctctcactggatcagtttgagaatgaaagcagacggatgcatccttcaaacaatgaccaatcttatccaggccggagaacattaaatagacaacgatcaccacaaggtttgcataagaaggttatttcgttcttacttaagccaagaaattggagagctcctgctgatagaacattttttctggattcttacgaagttggcgagctatgctacgctgccgagcagatttttatgcaagaaccaactgttttacaattaaaagcaccaattaaagtatttggtgatcttcatgggcagtttggggacttaatgcgcctttttgatgagtatggttttccgtcaactgctggtgacataacgtatattgattatctcttcttgggagactatgttgaccgaggtcagcacagcttagagacaatagctttgcttcttgctcttaaaatcgagtaccctgaaaatgtacacttgatcagaggaaatcatgaagctgctgacatcaatgccctttttggcttccgccttgaatgcattgagagaatgggtgaaagtgatggaatatgggcttggacaagattcaatcaactgttcaattatctcccactcgctgccatgatagaaaagaaaataatctgcatgcatggaggcataggaaggtcaataaacacagtggagcaaattgagaaacttgagaggcctatcacaatggatgttggttccattgtcctcatggacctgctatggtctgatcctacagaaaatgatagtgtggagggtttgagacctaatgcacgagggcccggcttagtgacatttgggcctgatcgagtaacagaattctgtaaacgaaacaaattgcagttgatcataagagcccatgagtgtgttatggatgggtttgagcgtttcgctcatggacaattgatcactttattttcagcaacaaattactgtggtactgcgaacaacgcaggggccatacttgttgtcggcaggggcttagttatcgtgccaaagttaattcatccacttccacctcctgttaattcacctgagtcctcccccgaacgtggggatgccacatggatgcaggagcttaacattcagcggccacctactccaaccagagggcggccacaagctgccggtgataggaattctcttgcttacatatgatacttgacacgacagagccacctccatctgctggatatgtttgtttgtaatcagaaatttctttaccagtttcaaggtacatatggtatagccaagaagaacaatcaaccaacaggacatcatggatacacttgtgatcagttccctggtaatcctttgtgatgcatcggttttaactgtagttgtgtgctaccgtgacttcagctcctaactggggagctgcataatcagcatttcagatctcaagcaacattgtatgattgcgataccagtggacaataatcaagtctgatgtagttgtaatagctaatctgtaatttcagtgtacatggatagattgttctttcgtcagagtaggaaggtttccaaatgtttgcatactatgcatgctgcagcctgggacgcggtttaaacaggacagctatacaagttgccagatctgagctagattgggcagagaagatttgaaccattttatttgctctccgcggagcgcgaatgtaagaggttgtgttgtgttgtgaaatactgaattcgttataggtatttgtgcaataaattaagttttgcttaaatcagtgaatgctttggtttagtgacctgagttacaacgacaacaaagccctttagttagaga

SEQ ID NO: 213463 - DNA, 815 bp, Zea Mays
cttaggaccttccaattccaaactgaagcaaataaaagattgggatggcatcagaaatcttgtcagtgccttgccacagacagtcaagagactggttcttgtgtcatccattggtgttacaaaatacaatgagataccatggagcatcatgaatctctttggtgtgcttaagtacaagaagatgggagaagactttgtctgcaattcagggataccattcacgattattagggctggaagattgacagacgggccctacacttcgtatgatcttaatacacttcttaaagctacagctggagagcgacgagcagtagtcataggcaaaggtgacaagcttgtgggggaagttagcagacttgtggtagcagaagcttgtatccaagctttagatattgaatccactgaaggacaaatatatgagattaactcagttaagggtgaagggcccggaactgacccagagaaatgggaggagctattcagatctgctcggtcagactagtggcattctgcaaagcgtagtaacgtaatgtaggaatatgcatcgtaatacaatgtaatccatagagtgcagccctaattcaatagtcactgaacagtagcgatcatgtagagaatatttggtttgtgtacatagtatgagcattcatatatgacgattatacctcctaaaagtgatagtttttgttggaaagtaaaatgttcagtgttatccttatccactttcagacttgattttattttctttttctcggaatgcaatcataatttgattgttcatttcaatatatatccttatttttcaaatatgt

SEQ ID NO: 213464 - DNA, 1527 bp, Zea Mays
gaaatcctgtgcaaaggagcagtgcagaagaatgtgtgaagttgtttccgggttagtagagcaaatttcacatgatgtgtgccagagctgacccagcagatgtgggactccaagaacatgatgtgtgctgctgaccctcgtcacggtcgctacctcacggcatctgctatgttctgtgggaagatgagcaccaaggaagtggatgagcaaatgttgaacatgcagaacaagaactcttcctactttgtggagtggatccccaacaatgtgaagtcgaggtgtatatggctaccctattgagattcaagcccttttctttatggcactaaggtgtgctcttcaaatgcttaagcatgataatgaagggaaggaatttgtagagaagattgctacccgccttcacgctttaagttatcacatgcgaagttatttttggctcgatttccaacagctaaatgacatttatcgttacaagacagaagaatattcccacacagctgtcaacaaattcaatgttattcccgattcaattccggactggttatttgactttatgccttgtcagggtggttttttcgttggtaatgttagtcctgccaggatggacttccgatggtttgcacttggaaacatgatcgctatactttcttctctcgcaacacctgagcaatctaacgctataatggatcttattgaggagcgctgggaagagcttatcggtgaaatgcctctgaagatatgttatcctgctattgagaaccatgaatggcgaattgtgactggctgtgatccaaaaaatactagatggagttatcacaatggaggatcgtggccagtgcttctgtggctgctgactgcagcctgcatcaaaactggacggccgcagattgcaagaagagcaatcgacctagcagagaggaggctgttgaaggatggctggccggagtactatgatgggaagcttggtcggtatgttggcaagcaggcgaggaaattccagacttggtccatcacggggtatttggtcgccaagatgctgttggaagatccttcacatcttggcatgatcgccctggaagaggacaaggcgatgttgaagcctgttttgaagcggtccgcgtcatggacaaattgagatggtgacgaaaatttttagggaggcgaagtcagctgaaaacacgaattcctgtggtagcgtctccttgtctgctgaccccttcatttgacttccaaaccaggatggtttgtgtctacttggttgtacaatatctcagctcgtttcctgagttgaaaaaaagaagcaactgcagaaatgggcattttatttttttctctctctttctcaatctctgtaagaagacactctgattcttgcttaggtcataccctataaataatggatccttttggttaggctcaactttgttgtaccagtggactatacagatgagtaagctgattccagcttccctgtgaagcataagtgctatttctaacgaatgaataagctactttccctgcgttgct

SEQ ID NO: 213465 - DNA, 2356 bp, Zea Mays
caccttcatccacgcgagggcccccttgacccaccaatccaccattgctcgctataagactccgtggtgccgcacggctccgccgccggcgaggcctcatctcggtttactataagagtataagtacgtctccgcaacaagctaatcttttttttgccccctccttccacgtccccaccctgccgtcgtcgctactcgcatagagattcgcgcggccgtgtcttgctcgcgcctgcccccttccttccttgtcgtgccagcgcccagatctctcgctcgccggcgctcgggccagatctgggtgggggctcggaggcggagccgggcgcaggtttggtttgacccaaggggcgaggaggagagggaagaagaccccggacgccatggagctggcggttggcggcgggatgcggcggtcggcgtcgcacacctcgctgtcggagtcggatgactttgagctcacgcggctgctcagtaagccgcggatcaacgtcgagcgccagcgctccttcgacgaccactctctcagcgacgtctcgcactccggcggatacggcaggggtggcttcgacggcatgtactcgcctgggggcggcctgcgctccctcgtcggcacgccggcctcctccgcgctgcactccttcgagccccaccctatcgtcggcgacgcctgggaggcgctccgccgctccctcgtcttctttcgcggccagccccttggcaccgttgccgccgtcgaccacgcgtccgaggaagtcctcaactacgaccaaggctgggagaagaaagtcgaccggttcaagcttggggagggagccatgccggctagcttcaaggtgatgcatgacgccaagaagggggtcgagaccctacatgctgattttggagagagcgccattgggagggttgcacctgtggattctgggttctggtggattatactcctccgggcctacacaaaaagtactggcgatttgacgctggcagagacaccggagtgccagaaagggatgaggctcatactcagcctgtgcttatctgaggggtttgataccttcccgacattgttgtgtgctgatggttgctgtatgatagatcgcagaatgggtgtatatggctaccctattgagattcaagcccttttctttatggcactaaggtgtgctcttcaaatgcttaagcatgataatgaagggaaggaatttgtagagaagattgctacccgccttcacgctttaagttatcacatgcgaagttatttttggctcgatttccaacagctaaatgacatttatcgttacaagacagaagaatattcccacacagctgtcaacaaattcaatgttattcccgattcaattccggactggttatttgactttatgccttgtcagggtggttttttcgttggtaatgttagtcctgccaggatggacttccgatggtttgcacttggaaacatgatcgctatactttcttctctcgcaacacctgagcaatctaacgctataatggatcttattgaggagcgctgggaagagcttatcggtgaaatgcctctgaagatatgttatcctgctattgagaaccatgaatggcgaattgtgactggctgtgatccaaaaaatactagatggagttatcacaatggaggatcgtggccagtgcttctgtggctgctgactgcagcctgcatcaaaactggacggccgcagattgcaagaagagcaatcgacctagcagagaggaggctgttgaaggatggctggccggagtactatgatgggaagcttggtcggtatgttggcaagcaggcgaggaaattccagacttggtccatcacggggtatttggtcgccaagatgctgttggaagatccttcacatcttggcatgatcgccctggaagaggacaaggcgatgttgaagcctgttttgaagcggtccgcgtcatggacaaattgagatggtgacgaaaatttttagggaggcgaagtcagctgaaaacacgaattcctgtggtagcgtctccttgtctgctgaccccttcatttgacttccaaaccaggatggtttgtgtctacttggttgtacaatatctcagctcgtttcctgagttgaaaaaaagaagcaactgcagaaatgggcattttatttttttctctctctttctcaatctctgtaagaagacactctgattcttgcttaggtcataccctataaataatggatccttttggttaggctcaactttgttgtaccagtggactatacagatgagtaagctgattccagcttccctgtgaagcataagtgctatttctaacgaatgaataagctactttccctgcgttgct

SEQ ID NO: 213466 - DNA, 2357 bp, Zea Mays
ctcgtcagactttcagttcttccaatctcttgcaagcacaactgcacaagggaacaggaggaaaaaagagcgagaactcgcagctgacgcgcacacggcaagccccaatcggagccgcggaccggatcagaactaggtctcgaggcgatggcaagcggaggcgagggcgcagggagcggcgaatcccctcccgccgcctcagtggaggcggcagcggtcgaggcgacgctgcacatccggtgcgcgaacggctccaagttcacggtgcagacggacctgggcgccacggtgggcgcgttcaaggaggtcttatccggtagctgcggcgtgccagcaccgcagcagcgcctgatctacaagggccgcatcctcaaggacgagcaaaccctagacagctatggcgttgagacggatcacacaattcacttggtgcgaggtgtcgccacaccagctgcatccagtgcacctgctgctgccaacccccttgcttcatttactcctagtagtggccctgcaggtggcctgggaggcctatttccaggtgttgatgctccaggaaatgacaggccatcaggtatatttaggccaggatttccagaattagagcaagttgagcaacatttaagccagaatcccaacttgatgagggagataatgaatatgccggcaatgcaaaatctcatgaataaccctgatttaatacgtaatatgatcatgaacaacccacaaatgcgcgagatcatggatcggaatcctgatcttgcccatgtgctcaatgacccaagcgtcctccgccaaacactcgaagctgctaggaaccctgaaatcatgagagagatgatgcggaacacagacagagctatgagcaacattgagtcttctcctgaaggttttaatatgctccgccgcatgtacgaaactgtccaggagccatttctaaatgcaacaacaatgggtggggaaggaagcacagcctcaaatccattttcagctcttctcgggaatcaggggtctagccaacctggtcaaggtcaacctgcaacaaatgctccaactactggttcagaatcgacaactggaaccccagctccaaatactaatccacttccaaatccctggagcaccaatgctgggagtgcacaaggtgcaacacggactcctagtggcaatgcaagaactggtggtgttgggggcactggtgccaccggtggactgggaggattgggttcaccagaattgagtagtttgcttggtggtcttgctggcagtccaagaactggttctgctggtggtttaggaggttcgggttcaccagatttggggagtatgcttggtggttcacctgatgtttctccgttcagtcagatgttgcaaaaccctgcaatgatacagatgatgcagaacattatgtctgacccacagaccatgaaccagttgcttaacctcaacccaaatgcacgcaacctgatggaatcaaacactcatatgagggaaatgtttcaaaatccagaatttcttcgccagctgacatcgcctgagactttgcagcaattactctcatttcagcagactttattaggacagcttggtcaacatcaacctagccagggcgggaacaatgcaggcagtgccacaggtacacggggaaaccctagccttgacaccttgatgagcatgctcagcgggcttggttcgggaggtggtctaggtgttccaaatacctccagcgtgccaccggaggagctctatgccacacagcttactcaactccaagaaatggggtttattgacaccgcggagaacattcaagcactggtcgctactgctgggaatgtacatgctgcggtggaacgccttcttgggaaccttggacagtagctaacccgagcgagccagacactattcgtaaatcttaaaattgtcgcgcatatgcaggagtgttcggcttaatgttcctcaagccccagaatttgaaggcggcggcgtccatagtcccgaaaacaaaataatgaaagagtcaggcagccgtttacttttgtcatacatgacttgtgtcaatactgatcgttgtgggcttgtggcattagtactgcagaaacaggtggacatgtatgggatgtgccggacgacaactccatccgggaagccagtagtcggcggggtaacgagacaggctggtgattatttcgttgatgcgctgcgcaagtaataacatgttcagtgaaaagcaaacttgaaccttgatgaacaacactaaccaacttttttttggcaaaccacaatatcacaagtacatacaaggacccacccacccttacgagacacgcatacacagcttactccaataaacatatata

SEQ ID NO: 213467 - DNA, 2377 bp, Zea Mays
aaatttctcaaactaatcgtacagtagatgggcgcgagtaaaacagaacacagggagaagaaccggtggcaaacgaacagggaaaagggtaaattcgctttcagaggcaagcgctgcgttgccacacagcgggaatcctgcccagagctgccgaatcgggtccaatcccgtcgacctttctggccgccgccgccactggactccatccagaaattaccttcgattcggccggggccgtgggagcggggatggggctcggggaggcggcggggcggctcctggcggccgtggactgggagcgagaggcctacccggcgtacgacgacttcctcgcgctccccgtcttcgtccttttcttccccaccgtccgctacctcctcgaccgcttcgtcttcgagtgggttgcaaggaggcttataaatagaaatggacatcagagcactaataatgaaacagaagaaggaaggaagaagataagaaaattcaaggaatcagcttggaaatgtgtttatttcctgtctggagagcttttagctttgtcggttacatataacgagccttggttcaccaataccagatatttttgggtaggaccaggagaacaggtctggcctgatcaaaagataaaattgaaacttaaggctgtatatatgtatgctgctggattctacacatattccatatttgcacttatgttttgggaaacaaggcgttcagactttggagtgtcaatgtcacatcatgttgctactgtcgtcctgattgttctatcttacgtgttcagatttgctagagttggctctatagtattggcaattcatgatgcaagtgatgttttcctggaagtagggaagatgtccaagtacagtcattgtgattggcttgccaatgtttcgtttctgttttttgttatttcatgggttcttctccgcctcacttattttccattctggattctgagaagtacaaggtaaattcttctgttctggctcataagtctatcagattcttatgccaagaaaaatcatcgagttcgtaaaagtttgtttgcatatacagtcgaaagtagattggtatcttatttgttctgtactcaaacggttattgtgaaaacttggacagtgacttcctctagtctaaagaacattcctttatatagtcggacagtagcatcttagactctaaagagaattttactatgtacttccattggccacacaaatgaaggtttggatattttttgtatgcaccactggagacttcacacctttgtggacttggctaatcatataactcagtgtccaaaatatatcataataaacaattatagacatgtcaaattctgacaaggtaccatacagattcgccccattgcagtgttggtctggttcacagtttctttgttgtggtgcttgttgagttgctgtgaggttgtggccttcatcatgtgagttggtgttgttttctgttgtaactgtagttttccctctgttcttctccttctcaattaatacataggcctactgttaacctgctggcttttttaaaacaaacaaacaaacccagtttcaccacttcgctttagaataaactaattgaatgtttctggattcttttcacatgatctgactgaacccatttgtctcagctatgaggtcttgttgactttggacaaaaagaagcacaattttgatggtcctatatactattatgtgttcaattcccttctattttcactacttgttctccacatatattggtgggtcttaatatatcggatgcttctgagacaaatcaagacaagaaatgttggagatgatgttcgatctgattctgaaggagaagacgaccatgaagactgattggcgtcaccatcttagtttgcatattatgtcggtgctagaagcatcacccccaataccgtccctgagcttatacattctttggctggattccaagaatacgtgcagattatgagaggacgagcatttgttcctcacgagaatcaccgaagccgggctacgatttcttctgtctcgactgctcatttgtgttgtactaagtatgcattagaaacagcgctgcaatgtgttaaaaaagttggatgtcggatataacattcttgtgagtgttcagacaaagtgcagcggtaaatgtagcattccagaaaaaggactggctgtaaactatatggcctttctttcgacaaaccattgtaaaaattgtgtatgccaggatagccttgcttgggatttaccacaatcccaatcagaaactgtcccttctgaagcatgtatttcaccattcagtgattcgcctgatgataatttgataaattcatttatccaacacacctgatgcatatttgctgaaaaat

SEQ ID NO: 213468 - DNA, 2133 bp, Zea Mays
cagaacacagggagaagaaccggtggcaaacgaacagggaaaagggtaaattcgctttcagaggcaagcgctgcgttgccacacagcgggaatcctgcccagagctgccgaatcgggtccaatcccgtcgacctttctggccgccgccgccactggactccatccagaaattaccttcgattcggccggggccgtgggagcggggatggggctcggggaggcggcggggcggctcctggcggccgtggactgggagcgagaggcctacccggcgtacgacgacttcctcgcgctccccgtcttcgtccttttcttccccaccgtccgctacctcctcgaccgcttcgtcttcgagtgggttgcaaggaggcttataaatagaaatggacatcagagcactaataatgaaacagaagaaggaaggaagaagataagaaaattcaaggaatcagcttggaaatgtgtttatttcctgtctggagagcttttagctttgtcggttacatataacgagccttggttcaccaataccagatatttttgggtaggaccaggagaacaggtctggcctgatcaaaagataaaattgaaacttaaggctgtatatatgtatgctgctggattctacacatattccatatttgcacttatgttttgggaaacaaggcgttcagactttggagtgtcaatgtcacatcatgttgctactgtcgtcctgattgttctatcttacgtgttcagatttgctagagttggctctatagtattggcaattcatgatgcaagtgatgttttcctggaagtagggaagatgtccaagtacagtcattgtgattggcttgccaatgtttcgtttctgttttttgttatttcatgggttcttctccgcctcacttattttccattctggattctgagaagtacaaggtaaattcttctgttctggctcataagtctatcagattcttatgccaagaaaaatcatcgagttcgtaaaagtttgtttgcatatacagtcgaaagtagattggtatcttatttgttctgtactcaaacggttattgtgaaaacttggacagtgacttcctctagtctaaagaacattcctttatatagtcggacagtagcatcttagactctaaagagaattttactatgtacttccattggccacacaaatgaaggtttggatattttttgtatgcaccactggagacttcacacctttgtggacttggctaatcatataactcagtgtccaaaatatatcataataaacaattatagacatgtcaaattctgacaaggtaccatacagattcgccccattgcagtgttggtctggttcacagtttctttgttgtggtgcttgttgagttgctgtgaggttgtggccttcatcatctatgaggtcttgttgactttggacaaaaagaagcacaattttgatggtcctatatactattatgtgttcaattcccttctattttcactacttgttctccacatatattggtgggtcttaatatatcggatgcttctgagacaaatcaagacaagaaatgttggagatgatgttcgatctgattctgaaggagaagacgaccatgaagactgattggcgtcaccatcttagtttgcatattatgtcggtgctagaagcatcacccccaataccgtccctgagcttatacattctttggctggattccaagaatacgtgcagattatgagaggacgagcatttgttcctcacgagaatcaccgaagccgggctacgatttcttctgtctcgactgctcatttgtgttgtactaagtatgcattagaaacagcgctgcaatgtgttaaaaaagttggatgtcggatataacattcttgtgagtgttcagacaaagtgcagcggtaaatgtagcattccagaaaaaggactggctgtaaactatatggcctttctttcgacaaaccattgtaaaaattgtgtatgccaggatagccttgcttgggatttaccacaatcccaatcagaaactgtcccttctgaagcatgtatttcaccattcagtgattcgcctgatgataatttgataaattcatttatccaacacacctgatgcatatttgctgaaaaat

SEQ ID NO: 213469 - DNA, 965 bp, Zea Mays
gtttggatgagttaaatgctccgtcttagagaaacggcttagtgtggtcttaatgacaaatacgaaataccacaattcaagaactggcttccttggaaagacacgtgggattcgtccttgtgttttccctgctggaagagttggatttgtcagaacagtagtggaatgcaaggaatctagaattggaaagcagcccatcgaagttccatcaaatgttactctcacattagaagagcagtttgtcaaagctaagggtccgctgggggagttatctctgagctttccaggtgacttgaagatcgtgaaagaagaatccggtaacctgagagtttataagactgcagagaccaagagggcgaaccagatgcacggacttttcagaacgttgacagacaacatcatcgtcggtgtgtcaaaaggattcgacaagaagcttcagttagtaggtgtcgggtaccgtgcggcggtggagggcaacgatctcgtgatgaacctgggattctcccaccctgttcggatggccattcccgaaggcctggcggtcaaggtggaagagaacacaaggatcatcgtgagcggctacgacaagagcgcgatcggtcagttcgctgctaccataaagaagtggaggccacctgagccatacaaggggaagggtatcagatacatggatgaagttgtcagaaggaaggaaggaaaagctgggaagaagaaatagaagtgtttgttttttgtttgtcctttccatgcttcatttcattttcccgctgtaacggtcctcgtctgctatgaccgaacccgagaaaaaaagtattgttctgtggctgtgctgatcatgccatatttatgtgcaccttgagcatcccagtatcccactgtaatggtttccatgtacaccaagcggagccgtttgacccccgtttggttggtgaagacgcaaaactgctcgatgagcgctaccgcta

SEQ ID NO: 213470 - DNA, 1797 bp, Zea Mays
tgctcagccagtaaaacttctcacatgctggcttgttcttgctgccaaataccaccgctgtatagcttggttaccacacaaattagtttcaccacaatttgactcagccacggcctcatgagtggctggtacggtggcaggtggcagctctgagacttgaaagcaacagcacagcagctgaagcctgccagcccccagcatggcaacatcctccacccaccaaagcccaggggggggggggggggttgggggttgtaaaaatacgtcgcagatccagagcttccaaccattactgtcgacgagatatcaccagacgtacggctctggatatgaaatccagatgcagcaggccatgcctcttgggctctggaggtcacgtgaggagacggacagcggtggactgagcaaagaccttgccatgcagaaatgcaggatccagagcttgctcatccatttattatgccaacttatcacttttaatccaccttttcttttatatactcctgtagggccccatctttcatctgggtatgaaatccgaccgtccgtccgaacttgttagctttggtttggatgactttctcttccacggtcttagactgaagatttggagttggtttccattcattttgtcgcagcgaagagccatgtcaactgtcttcctttcctgctgctcgatactgaaacacccaagctttgtattcggatcttgtgcccgctaacttcgattgtgctgtaaattttttttgttaagttcgaaatgggatacatgaaaaaaaatgcagaaaggcacatgcataacagtcaacagacgaagtgacgctatggtaataattgaaccaagcccccccgtagctaagtttcagatgcacctgttatcccgtgcgttcgtgcatacgagagggtggagccacatggacatggtggtctccgcagtccccactgttccctctccataccagtgtctctgcatggtatggcacagggatatgcatatgcaaggcatgagcagagtctcagtcacagagcggccgcacacaggccattgcacctgtctccagtttatataacctctagcatttgctcccttatgctgtttctctgaatccaaataaagcatcatcctcccatatgctacccatcgctcacttgaacaagaggaatggctaatggttgccccacatctaccacaagctccctgcccctcttcttccttctctcttgcctgcttatcggccatgctctctgcagccaagcccacaatggcagaacatcagaattgactactaagcatataattttgccgaaggtcatcaagggtctaaacaagggcatactgtcaaagtatgcaaggagaatgttgatcggctcaattgctccaatatgtacatacaacgagtgcagggggtgtcgattcaagtgtactgctgagcaagtcccagtggatgcaaatgaccccatgaacagtgcttaccactacaagtgtgtttgccacaggtgatcttcaatgagtaggaggagctgctatgttatggtatgtcctggagaatagtagtatttttttccccattcttggttctccgttctccctcttcgcttccttctattctttgttttctctgttgaaaagggttccttttttttcatttctattttacaagaggctagctagtagaggactggagcctagaggagcattttgtactttaaaatgcttgttcaggttatgaactagtaattttgttagtaaatggttatcaattttgacatctgaagtatgaatgacccctattcaag

SEQ ID NO: 213471 - DNA, 1826 bp, Zea Mays
ccacagcgtcacaaactcacaacgctacacaatacgcacacttcgcaaagcgtcttcctccgaccccatcgcctctgtggcttcctggctgtctgactgcgtctgcctggtcgtacgcgagcgcgtgcgtcccttcaccgtcacgagcggcgcacaccgtcaccgccacgctccgtcgccttccagaaaatctaaaccccagcggagccggccacggccagtcagccctcacacggactccgacgcgctgcccgctcgcctgccaaacccccaccccctcgccggcgatgctgccgcgtcggtttagcaaccacccgggctcctcctcacccctcccgttcctcgtcgtctgcggcctgctcctcgctgcggccgtagcattttccccggtcgctgccgccgaggccgctggccgcggcggcggcggcggcggcggcggcgctgggcacgagggccgcgcggggaagccggaggtcgaggcggaggcggaggcgcgcggggatggggtggccgtggcggaggccggcggcgaggtggtggctcagggcaatgccacggaggccaaggagggcagcctcgccgacatgatcgaccgcgcgctggagaaggagttcccggagtccgagagcgagcagggcggcggagagaccgatcctggtagcttcaacaacacggtagctgagaagcagggagttcttgaaactgtagctagaagagtaacaaagaagaatgaaaccaaagataacaagtcatttccttttaaggaggtcttcttggatcgatctgagcaagaagatgttcccacattgattgatcggaaggacaatgtttttatcatatcaaacccaaagtcaaaataccctgtgctgcagctggaccttagattgatatcagatcttgttgttgttatcgtgtctgctacatgtggtggaatcgcttttgcttgccttgggcaacctgatctataattgggcctggaggttttagctttgtcaatgaaatggtgcaagttgaaacggtagcccagtttggtgtgatatttctcctgtttgcattgggacttgagttttctactgcaaaacttcgagttgttcgtgctgttgctgttctcggaggaatgctccaaattatgctgttcatgtttctttgtggtattttggctacactatgtggaggcaaaacaaaagaaggtgtttttgttggtgtgcttctctccatgtcttcaacagctgtggttttaaagtttctgatggaaagaaatagtatcaatgctcttcatggccaagttacagttgggacacttatattgcaggattgtgctgttggtctgctgtttgcgcttcttccaattttgagtggtacatctggccttcttcacggagttgcatcaatgacgaagtcgttggtggtattgataacgttcctgaccattctctctatcctctcccgcacgggcgttccttggtttcttaaactgatgataagtctgtcatcacagacaaatgaactataccagctggcagcggttgcgttctgcttgttatttgcttgggagattcggcttattttctggcttttaccgaagtacccatcccacttggaggatcgctggcatttgctatccacaacggcataaccaagaactgagcattgctgcccttttgccacccacaactacttttcccttgaacacgcaggagagctgctatttgccaattacctataagccagcgtacaagctgggttgccaaacaacaacaacaacaacaacaacaacaacaaagcctttttgggctagagttgaaatccaacaaaaaccacaagtc

SEQ ID NO: 213472 - DNA, 1830 bp, Zea Mays
acacaatacgcacacttcgcaaagcgtcttcctccgaccccatcgcctctgtggcttcctggctgtctgactgcgtctgcctggtcgtacgcgagcgcgtgcgtcccttcaccgtcacgagcggcgcacaccgtcaccgccacgctccgtcgccttccagaaaatctaaaccccagcggagccggccacggccagtcagccctcacacggactccgacgcgctgcccgctcgcctgccaaacccccaccccctcgccggcgatgctgccgcgtcggtttagcaaccacccgggctcctcctcacccctcccgttcctcgtcgtctgcggcctgctcctcgctgcggccgtagcattttccccggtcgctgccgccgaggccgctggccgcggcggcggcggcggcggcggcggcgctgggcacgagggccgcgcggggaagccggaggtcgaggcggaggcggaggcgcgcggggatggggtggccgtggcggaggccggcggcgaggtggtggctcagggcaatgccacggaggccaaggagggcagcctcgccgacatgatcgaccgcgcgctggagaaggagttcccggagtccgagagcgagcagggcggcggagagaccgatcctggtagcttcaacaacacggtagctgagaagcagggagttcttgaaactgtagctagaagagtaacaaagaagaatgaaaccaaagataacaagtcatttccttttaaggaggtcttcttggatcgatctgagcaagaagatgttcccacattgattgatcggaaggacaatgtttttatcatatcaaacccaaagtcaaaataccctgtgctgcagctggaccttagattgatatcagatcttgttgttgttatcgtgtctgctacatgtggtggaatcgcttttgcttgccttgggcaacctgtgattacaggttatctacttgcaggatctataattgggcctggaggttttagctttgtcaatgaaatggtgcaagtaaggttgaaacggtagcccagtttggtgtgatatttctcctgtttgcattgggacttgagttttctactgcaaaacttcgagttgttcgtgctgttgctgttctcggaggaatgctccaaattatgctgttcatgtttctttgtggtattttggctacactatgtggaggcaaaacaaaagaaggtgtttttgttggtgtgcttctctccatgtcttcaacagctgtggttttaaagtttctgatggaaagaaatagtatcaatgctcttcatggccaagttacagttgggacacttatattgcaggattgtgctgttggtctgctgtttgcgcttcttccaattttgagtggtacatctggccttcttcacggagttgcatcaatgacgaagtcgttggtggtattgataacgttcctgaccattctctctatcctctcccgcacgggcgttccttggtttcttaaactgatgataagtctgtcatcacagacaaatgaactataccagctggcagcggttgcgttctgcttgttatttgcttgggagattcggcttattttctggcttttaccgaagtacccatcccacttggaggatcgctggcatttgctatccacaacggcataaccaagaactgagcattgctgcccttttgccacccacaactacttttcccttgaacacgcaggagagctgctatttgccaattacctataagccagcgtacaagctgggttgccaaacaacaacaacaacaacaacaacaacaacaaagcctttttgggctagagttgaaatccaacaaaaaccacaagtc

SEQ ID NO: 213473 - DNA, 2656 bp, Zea Mays
acacaatacgcacacttcgcaaagcgtcttcctccgaccccatcgcctctgtggcttcctggctgtctgactgcgtctgcctggtcgtacgcgagcgcgtgcgtcccttcaccgtcacgagcggcgcacaccgtcaccgccacgctccgtcgccttccagaaaatctaaaccccagcggagccggccacggccagtcagccctcacacggactccgacgcgctgcccgctcgcctgccaaacccccaccccctcgccggcgatgctgccgcgtcggtttagcaaccacccgggctcctcctcacccctcccgttcctcgtcgtctgcggcctgctcctcgctgcggccgtagcattttccccggtcgctgccgccgaggccgctggccgcggcggcggcggcggcggcggcggcgctgggcacgagggccgcgcggggaagccggaggtcgaggcggaggcggaggcgcgcggggatggggtggccgtggcggaggccggcggcgaggtggtggctcagggcaatgccacggaggccaaggagggcagcctcgccgacatgatcgaccgcgcgctggagaaggagttcccggagtccgagagcgagcagggcggcggagagaccgatcctggtagcttcaacaacacggtagctgagaagcagggagttcttgaaactgtagctagaagagtaacaaagaagaatgaaaccaaagataacaagtcatttccttttaaggaggtcttcttggatcgatctgagcaagaagatgttcccacattgattgatcggaaggacaatgtttttatcatatcaaacccaaagtcaaaataccctgtgctgcagctggaccttagattgatatcagatcttgttgttgttatcgtgtctgctacatgtggtggaatcgcttttgcttgccttgggcaacctgtgattacaggttatctacttgcaggatctataattgggcctggaggttttagctttgtcaatgaaatggtgcaagtaaggttgaaacggtagcccagtttggtgtgatatttctcctgtttgcattgggacttgagttttctactgcaaaacttcgagttgttcgtgctgttgctgttctcggaggaatgctccaaattatgctgttcatgtttctttgtggtattttggctacactatgtggaggcaaaacaaaagaaggtgtttttgttggtgtgcttctctccatgtcttcaacagctgtggttttaaagtttctgatggaaagaaatagtatcaatgctcttcatggccaagttacagttgggacacttatattgcaggattgtgctgttggtctgctgtttgcgcttcttccaattttgagtggtacatctggccttcttcacggagttgcatcaatgacgaagtcgttggtggtattgataacgttcctgaccattctctctatcctctcccgcacgggcgttccttggtttcttaaactgatgataagtctgtcatcacagacaaatgaactataccagctggcagcggttgcgttctgcttgttatttgcttggtgtagtgataagctgggcctgagtctcgagttgggttcatttgcagctggagtaatgatatcaacaacagaccttgcgcaacatactcttgaacaacattgggatgctaattaatgtccatttcttgtggaaccatgtggatatactccttgcagcggtaattttggtgatcaccgtaaagacatttattgttgctattgtcgtaaaagggtttgggtatagcaacaaaacatctcttcttgtcggcatgtctcttgcacaaataggagagtttgcttttgttctcctaagccgtgcttcaagtatccatctcatcgagggcaagctatacctgcttcttcttggaaccactgcactcagtttggtgacaacccctctgctattcaaaatgatcccagcagtggtccacctcggggttcttttgagatggttttctgtcgataccaatcaggtggagctgggcctaaaaaatgatgtcctccgcattgatagcggcaagcgcataaatctgatagtccaaggctcacatgactcatgacacatggcacactgcaagctacttttttgtatggcttgagtttacaagctctgtaaagtgttttcacctgtattgaagagtttgtagcagatatacaagggtggaggcaagagaactcaactcagatcttgctcatagggtgagatcaatcctcccccatcatggagactgcatgggcagttgggtttgccgtttttgagagcagtgtgtctaggatgattggtggagtgagtggctgtcgaccccaaatgagggtctcgtgtaacataagaatgtatgatggttaattgattggatcagcatgataggatctaggcgtgatcgttatgccattgtatcctttcagcaaaactgtgtatcctcgcaacacgaaagtgtgtacaacagtatccatcagatcacgaatttcgttatgtaaccatatactcgtcctagttcatgattttttttcacgcgaggcttctagtaacctgtctatatatcactttgttggattcaggctcacaatgatgggtgtgcctcaacgaattgattgaatccattttattatgcgtggtcccgt

SEQ ID NO: 213474 - DNA, 1630 bp, Zea Mays
cccatccatatgtcatcattgtatagcttttgggcactttgactttatatgatcattttgctttatgttgtttgatcggcattttcctagtgctgatgagggacatcaatatcttggatgttgtttatttcgtgctatgcttggcaatgttaagggcttatttgtttcggctttttttatgagcttttctgagaatctggttgtggggagaatttggttgtgagggagaatctgagtatcgtggggattacgtgcggaggaatatgaaggggtacatagtgtttaggatctaggaagtgacggattccttctatcgtgatgattcagccgattgtgtattcatgttgattttggacggttttcaccaaatcaattatcatagaagtgggctgaaaagctaggcgtttgtcagtccacagcacagtagcttctggcgaccagaatcaacaaaaaagctgaaacaaacatgcccgaagtatgactatatgcttgttgtgcacatgggagggagttcttgaaactgtagctagaagagtaacaaagaagaatgaaaccaaagataacaagtcatttccttttaaggaggtcttcttggatcgatctgagcaagaagatgttcccacattgattgatcggaaggacaatgtttttatcatatcaaacccaaagtcaaaataccctgtgctgcagctggaccttagattgatatcagatcttgttgttgttatcgtgtctgctacatgtggtggaatcgcttttgcttgccttgggcaacctgatctataattgggcctggaggttttagctttgtcaatgaaatggtgcaagttgaaacggtagcccagtttggtgtgatatttctcctgtttgcattgggacttgagttttctactgcaaaacttcgagttgttcgtgctgttgctgttctcggaggaatgctccaaattatgctgttcatgtttctttgtgctatgtggaggcaaaacaaaagaaggtgtttttgttggtgtgcttctctccatgtcttcaacagctgtggttttaaagtttctgatggaaagaaatagtatcaatgctcttcatggccaagttacagttgggacacttatattgcaggattgtgctgttggtctgctgtttgcgcttcttccaattttgagtggtacatctggccttcttcacggagttgcatcaatgacgaagtcgttggtggtattgataacgttcctgaccattctctctatcctctcccgcacgggcgttccttggtttcttaaactgatgataagtctgtcatcacagacaaatgaactataccagctggcagcggttgcgttctgcttgttatttgcttgggagattcggcttattttctggcttttaccgaagtacccatcccacttggaggatcgctggcatttgctatccacaacggcataaccaagaactgagcattgctgcccttttgccacccacaactacttttcccttgaacacgcaggagagctgctatttgccaattacctataagccagcgtacaagctgggttgccaaacaacaacaacaacaacaacaacaacaacaaagcctttttgggctagagttgaaatccaacaaaaaccacaagtc

SEQ ID NO: 213475 - DNA, 5914 bp, Zea Mays
aaactactactcatctagaaagacaaaaaaaggcgtcaacttgaattcacctgtgataccgagtagtactccaccaatacatatccaacctcggtgctgcagagcaaagagaccaacaagtacaacacaggccatgaatacgatccatccggggggcaagcctgggaggggccgaggaggcccgcttacgaatctcgcgatccccaatccggaagcctcgattcgccgatccgggctcggccggggagagagggatcccgccgatcggggggcgctcgtgctgcaccgattcgagctcgctccctgctctgcccgcgcggggtgcgttcctgcggaggtccgcgccgggccggtagctgctgcgtgctgcctggtggctgctgctaggtaggtggttaggcggcggcaggaggatgcgggcggcggccgcgtagcgccagcgcaggcgcagcagccccggcatgggcgacgacgccgagctcgaggagggggaggcctgcgcctgcggggacgacaccgccttcgtcgaccccgatgtcgcgctctcttacattgacgaaaagcttcaagacatacttggccatttccagaaggacttcgaaggaggcgtttctgcagataatctagggtcaaaatttggtgcatatggttcatttttgcctacgtaccagcgctctcctcttcctcaaactagaagtccccctaaggcaggaaatattacctcaaaatctccctttcaccagtcgaatgaggacttgtctcagaaacctccagctgtggcagtttcatctaccccccaaagtaatggtcctgtggtgcctttttctggtgattcaattaaaaaggaaatacgcccatccacaaagtctgaaaggggttccgtctcccatgattcatatgggccatcaaaatgtagtgaccaaaacagacttaaagtccggataaaggttggctctgataatgttttggcaagaaataatgcagctatctacagtggcctgggccttgatatttcttcaccttcatcaaacgaggatagccctgatggccgtgggagcctgtcccctgaagttaacaatgtgccacatgaatctccacaaaccattcttcagatcatgacatgcttttcagttcctggaggcttcctgttatcccctctaccagccaatatcttgcagttgacaaaaaaggtcgtgtcttcatcaaagaagtgggaatcaaatgtggatgtagaaaatgtacaagaatcatatgaaggccatgtggctaaaagggtgaaatctgatggtaacaaaaagaggctgatagatgcaaaaaattcaaagaacaaaaatgatattagtgcagttatgaaaaaggagattgatatggaattagttgctggtcaaaagatagtatctgaagctcttaaaatatcattgctgtctgaccccagagctatggatgcaaaaggtgagaatcgtcttgaagaggagccagcagaaaacaacttggttggaattagagatgctcgattgaaagagcggtgcaccaagactgactccatgacagtcaaagtggaacctgccaaagcagaggtgatggaatgtttagagaacagtagttttggcagttcagaaatggatctttcagcagtgaaagggaaatcaaaacccaagacagaaaagggtgaggcaactttagaagataggaatacaactaatgacaaagacctaatatcagataggaagcaaaaaaagaaaataaaatctgggagtaaatataatgcctctaactttgaaggtagcattagcaatgttataaacgaaggagcttcagctgttttccacatgggaaaaatttctggtctagaagctttgccttatgacacaaatggggaaaataattccaagagtgaggtcaaaaaaatgcagagagaacaaaaggccaatgtttcgacgtcttctgatttcctggaggaggagaaacacattcattcttctgctgcagttaaggagagaagtgacatgcaatcaaaacctatccatactggaaagaaacccaaagcaaaatcacatagagatgttagggacaacaattttcctgaaggatcttatggaagcaaggaacaggattcattggagaataaaagtgcctttggagatccccggccaaaggaaaaaccatggaagtttgacagcgaggactctgatgcacctgggatctcgaggaaggatagttcttatgtaaagcttgacaaacacctggctactgaggagcagaagatgcatatacttccacctgccactgcttcaactgcgaatgcagcttttatacatgcagccccagtcgtaatagaggaacattgggtgtgctgtgacatatgccagaaatggcgtctcctaccttatgaaatgaatccttcagatcttcctaagaagtggaaatgtagcatgctacagtggctacctgggatgaataggtgtgagattagtgaagaggagactacaaatgctctgaatgcactgtatgtccctgcccctgcaaatggtattccttcagttggccttcctcatgttgcttcatcaggactagtaacatccagcactcccaatatgaatggacatattgagcagagtaggaaaagaaagaatgttctaagtgatggaaattttgtggctgagggttctcaccaaacacagggttcaggtcatccaatgagcaaccaacatgctcccaataaaagtaaaactcatactgatggtatccagtatcctattgatagagattctgtaagcaaatcagttgacccaacaattaaaaagcaaaggtccaaaagcaaacatcacagtagctattctgatggagtagatcttgttgaaagacctaagaagcattctaaagtaaaaagcaagagagacttggatcgtgatgaatacaaagcttctaaaaaaatcaggaaagaagagcgccattttgatagagatcggaaccttggatccggtttagctagtcgtgatgttcccgatgaggccaaggcttttcctgtgaagtcagtaacgtcaaagggttcaggtgaaaggagtgatctttcttcatcaaagcaaaaaaatgtctcacatcataaccatttggaaaattccaagaaagcaaggcaagattatgtaggttttcctgaagacgagagcaaggaatattttcaccagtcagatgtgcaaagatcagatttgtctagtaagaagaggatagtgaagaaatgggaggagagtcagtacaatccagtagctcaggtaagcaaaggagctatcaaggaaacctatagggatcagaacttaaaggaagcaaagttgatgtcattgaattctgaagaactgttttctatgacgagctccaaaccaccgaaagctcaacatgctgatcaggttttgttttatgatggggggcgtacgaacagcgagttagttgaggataacacacactttagtggcaaaacaggtctccctgagcaagaaaatagtctttctgataaggctttagacttgggcaaacctgctagtgatgtggcctatattcagacttcagctgtaacttcaagttcttcaaaggcttcagtctcacaaaaaaagaagcagaccactcaagctatgaagacatcgtcaattgagtctctttctttgtcaccacagagaaactctaacattgacaatgtctctgcctctcatagtagagtttcagtcaatgatcaatggtctagtgaacctattttggttggttcttcccgaagaaaatctgatagagataatggacaggttcagttaactcaaggtcatgcctctgatggtattcatcctgaaaggggtttgaatgaggacctgcagcctgaatctgggagaaaggattccaatataaaaaactcccatattcctaaaagttctaaccatttgcattctggtgaaaaaaataactataatacagatggctctcctatgcaaccaggaaagcatcttgttgatccaaagacaccagtcttggataaaggtgattcaagtatgcatgaaaataagaaaagtgcaaattctcttcaagatagaaatggatcaactcattgcccaccagatggaaatcctctgctcggtttaccatctggaaaagagaaatcatatctcaaaaacaacaggcaagattcacagaagcctaaaccccagatctcacctctgaaagaaagcaaattggattcccattccactccattaaaacctaatgggtcaaaattgactccacaatcaagacaatacaatgctgaaaatggagggcgacatggcactgcaaaacaagcaattcgtagtcctgctgatacttttagtccagctaggaaggacaatacttcaactgcgtatgctctcaaagaagcccgtgatttaaagcataaggctaatcgtttgaaggaagaaggaaaagagcttgaaagtacaagactctactttgactccgccttaaaatttttgcatgttgcatcacttttggaacctcctagctttgatggtttgaaacaaggcgatgcagcccagagcatgtattcagatactgcaaaactttgcaactttgttggtcacgcgtatgaaaaatgcaagaagatggctgctgctgctttagcatacaagtgtgttgaagttgcttatctgaaggctgcatactgcaagcacccaactgcaagcaaggatagacaagtgttacaggcagttgtacagactgctccaggtgaatcaccatcatcttcagcctcagacattgataatttaaataacaatggattatccaagggcccttcaagcaaggatgccaattcaccacaagtggttggaaatcatttgttgctggccactcgaaatcaaccacacttgatgcggttactagcttatacaaatgatgtcaatagtgcctttgaggctactcggaagtctcacatggcaattgcttctgcttctggcaatcacgaaaatggagttgatggtctttcttcagtaaaaacagtgctggattttaacttccgaagtgtgaatgatctactaagcatgaagctgaatataatccaacagtgcaaaagcataggtctttcatttgagcttgctggtcaacttgtacagagagtgatcatatttcttctttttttacgttgattacacccaattagtatatatagttgcatacccacttggatgatttagttagtgaggaacacaagtgaagatgagctttgcactgttcaatgcttctgcttggaagaaggatgctcttgtggccgcagttcgttgttatctggaaagtggcttgctactgagcattctcttactacatgatgtaaattgtgaatctccatcaaggctggcttatggctgaagagtcagtatcatagtttcctttgatgggagaggacagcaaagccagctaatctcgctatccaagaaatcggctagtagttttttcccttttgaaccttgtcacgatgccttgtcttctggataaagttcacgcaggtttcaaataagaaatcacatggactatcagacttgtatggaatatggatgctgtacaaagatttctaatgtacattagtctaactttttttttcgtgatccccgaaatgccgactatcaccagcgcatgtacatgtatatatacatacaataaaggttggggcatttttaccacgtgctggtctctatgtatgacgcctttggttccgtccaacttttagtctttcacatttttgaaattttgtgacattctagttttttgttaggatagcgtctagtactgggaatttgttgcagaatgcaaaataaattccgtgctgtacaacttgtagccgagtttcaggtcgtcgagtgaagtgatggtaactgctcgccgaatttgcactatgcggtctgtggat

SEQ ID NO: 213476 - DNA, 5786 bp, Zea Mays
ggcaggggaggacagcgaagagagagagagagagaggggagaccggggggcaagcctgggaggggccgaggaggcccgcttacgaatctcgcgatccccaatccggaagcctcgattcgccgatccgggctcggccggggagagagggatcccgccgatcggggggcgctcgtgctgcaccgattcgagctcgctccctgctctgcccgcgcggggtgcgttcctgcggaggtccgcgccgggccggtagctgctgcgtgctgcctggtggctgctgctaggtaggtggttaggcggcggcaggaggatgcgggcggcggccgcgtagcgccagcgcaggcgcagcagccccggcatgggcgacgacgccgagctcgaggagggggaggcctgcgcctgcggggacgacaccgccttcgtcgaccccgatgtcgcgctctcttacattgacgaaaagcttcaagacatacttggccatttccagaaggacttcgaaggaggcgtttctgcagataatctagggtcaaaatttggtgcatatggttcatttttgcctacgtaccagcgctctcctcttcctcaaactagaagtccccctaaggcaggaaatattacctcaaaatctccctttcaccagtcgaatgaggacttgtctcagaaacctccagctgtggcagtttcatctaccccccaaagtaatggtcctgtggtgcctttttctggtgattcaattaaaaaggaaatacgcccatccacaaagtctgaaaggggttccgtctcccatgattcatatgggccatcaaaatgtagtgaccaaaacagacttaaagtccggataaaggttggctctgataatgttttggcaagaaataatgcagctatctacagtggcctgggccttgatatttcttcaccttcatcaaacgaggatagccctgatggccgtgggagcctgtcccctgaagttaacaatgtgccacatgaatctccacaaaccattcttcagatcatgacatgcttttcagttcctggaggcttcctgttatcccctctaccagccaatatcttgcagttgacaaaaaaggtcgtgtcttcatcaaagaagtgggaatcaaatgtggatgtagaaaatgtacaagaatcatatgaaggccatgtggctaaaagggtgaaatctgatggtaacaaaaagaggctgatagatgcaaaaaattcaaagaacaaaaatgatattagtgcagttatgaaaaaggagattgatatggaattagttgctggtcaaaagatagtatctgaagctcttaaaatatcattgctgtctgaccccagagctatggatgcaaaaggtgagaatcgtcttgaagaggagccagcagaaaacaacttggttggaattagagatgctcgattgaaagagcggtgcaccaagactgactccatgacagtcaaagtggaacctgccaaagcagaggtgatggaatgtttagagaacagtagttttggcagttcagaaatggatctttcagcagtgaaagggaaatcaaaacccaagacagaaaagggtgaggcaactttagaagataggaatacaactaatgacaaagacctaatatcagataggaagcaaaaaaagaaaataaaatctgggagtaaatataatgcctctaactttgaaggtagcattagcaatgttataaacgaaggagcttcagctgttttccacatgggaaaaatttctggtctagaagctttgccttatgacacaaatggggaaaataattccaagagtgaggtcaaaaaaatgcagagagaacaaaaggccaatgtttcgacgtcttctgatttcctggaggaggagaaacacattcattcttctgctgcagttaaggagagaagtgacatgcaatcaaaacctatccatactggaaagaaacccaaagcaaaatcacatagagatgttagggacaacaattttcctgaaggatcttatggaagcaaggaacaggattcattggagaataaaagtgcctttggagatccccggccaaaggaaaaaccatggaagtttgacagcgaggactctgatgcacctgggatctcgaggaaggatagttcttatgtaaagcttgacaaacacctggctactgaggagcagaagatgcatatacttccacctgccactgcttcaactgcgaatgcagcttttatacatgcagccccagtcgtaatagaggaacattgggtgtgctgtgacatatgccagaaatggcgtctcctaccttatgaaatgaatccttcagatcttcctaagaagtggaaatgtagcatgctacagtggctacctgggatgaataggtgtgagattagtgaagaggagactacaaatgctctgaatgcactgtatgtccctgcccctgcaaatggtattccttcagttggccttcctcatgttgcttcatcaggactagtaacatccagcactcccaatatgaatggacatattgagcagagtaggaaaagaaagaatgttctaagtgatggaaattttgtggctgagggttctcaccaaacacagggttcaggtcatccaatgagcaaccaacatgctcccaataaaagtaaaactcatactgatggtatccagtatcctattgatagagattctgtaagcaaatcagttgacccaacaattaaaaagcaaaggtccaaaagcaaacatcacagtagctattctgatggagtagatcttgttgaaagacctaagaagcattctaaagtaaaaagcaagagagacttggatcgtgatgaatacaaagcttctaaaaaaatcaggaaagaagagcgccattttgatagagatcggaaccttggatccggtttagctagtcgtgatgttcccgatgaggccaaggcttttcctgtgaagtcagtaacgtcaaagggttcaggtgaaaggagtgatctttcttcatcaaagcaaaaaaatgtctcacatcataaccatttggaaaattccaagaaagcaaggcaagattatgtaggttttcctgaagacgagagcaaggaatattttcaccagtcagatgtgcaaagatcagatttgtctagtaagaagaggatagtgaagaaatgggaggagagtcagtacaatccagtagctcaggtaagcaaaggagctatcaaggaaacctatagggatcagaacttaaaggaagcaaagttgatgtcattgaattctgaagaactgttttctatgacgagctccaaaccaccgaaagctcaacatgctgatcaggttttgttttatgatggggggcgtacgaacagcgagttagttgaggataacacacactttagtggcaaaacaggtctccctgagcaagaaaatagtctttctgataaggctttagacttgggcaaacctgctagtgatgtggcctatattcagacttcagctgtaacttcaagttcttcaaaggcttcagtctcacaaaaaaagaagcagaccactcaagctatgaagacatcgtcaattgagtctctttctttgtcaccacagagaaactctaacattgacaatgtctctgcctctcatagtagagtttcagtcaatgatcaatggtctagtgaacctattttggttggttcttcccgaagaaaatctgatagagataatggacaggttcagttaactcaaggtcatgcctctgatggtattcatcctgaaaggggtttgaatgaggacctgcagcctgaatctgggagaaaggattccaatataaaaaactcccatattcctaaaagttctaaccatttgcattctggtgaaaaaaataactataatacagatggctctcctatgcaaccaggaaagcatcttgttgatccaaagacaccagtcttggataaaggtgattcaagtatgcatgaaaataagaaaagtgcaaattctcttcaagatagaaatggatcaactcattgcccaccagatggaaatcctctgctcggtttaccatctggaaaagagaaatcatatctcaaaaacaacaggcaagattcacagaagcctaaaccccagatctcacctctgaaagaaagcaaattggattcccattccactccattaaaacctaatgggtcaaaattgactccacaatcaagacaatacaatgctgaaaatggagggcgacatggcactgcaaaacaagcaattcgtagtcctgctgatacttttagtccagctaggaaggacaatacttcaactgcgtatgctctcaaagaagcccgtgatttaaagcataaggctaatcgtttgaaggaagaaggaaaagagcttgaaagtacaagactctactttgactccgccttaaaatttttgcatgttgcatcacttttggaacctcctagctttgatggtttgaaacaaggcgatgcagcccagagcatgtattcagatactgcaaaactttgcaactttgttggtcacgcgtatgaaaaatgcaagaagatggctgctgctgctttagcatacaagtgtgttgaagttgcttatctgaaggctgcatactgcaagcacccaactgcaagcaaggatagacaagtgttacaggcagttgtacagactgctccaggtgaatcaccatcatcttcagcctcagacattgataatttaaataacaatggattatccaagggcccttcaagcaaggatgccaattcaccacaagtggttggaaatcatttgttgctggccactcgaaatcaaccacacttgatgcggttactagcttatacaaatgatgtcaatagtgcctttgaggctactcggaagtctcacatggcaattgcttctgcttctggcaatcacgaaaatggagttgatggtctttcttcagtaaaaacagtgctggattttaacttccgaagtgtgaatgatctactaagtagcatgaagctgaatataatccaacagtgcaaaagcataggtctttcatttgagcttgctggtcaacttgtacagagagtgatcatatttcttctttttttacgttgattacacccaattagtatatatagttgcatacccacttggatgatttagttagtgaggaacacaagtgaagatgagctttgcactgttcaatgcttctgcttggaagaaggatgctcttgtggccgcagttcgttgttatctggaaagtggcttgctactgagcattctcttactacatgatgtaaattgtgaatctccatcaaggctggcttatggctgaagaggagaggacagcaaagccagctaatctcgctatccaagaaatcggctagtagttttttcccttttgaaccttgtcacgatgccttgtcttctggataaagttcacgcaggtttcaaataagaaatcacatggactatcagacttgtatggaatatggatgctgtacaaagatttctaatgtacattagtctaactttttttttcgtgatccccgaaatgccgactatcaccagcgcatgtacatgtatatatacatacaataaaggttggggcatttttaccacgtgctggtctctatgtatgacgcctttggttccgtccaacttttagtctttcacatttttgaaattttgtgacattctagttttttgttaggatagcgtctagtactgggaatttgttgcagaatgcaaaataaattccgtgctgtacaacttgtagccgagtttcaggtcgtcgagtgaagtgatggtaactgctcgccgaatttgcactatgcggtctgtggat

SEQ ID NO: 213477 - DNA, 5880 bp, Zea Mays
ggcaggggaggacagcgaagagagagagagagagaggggagaccggggggcaagcctgggaggggccgaggaggcccgcttacgaatctcgcgatccccaatccggaagcctcgattcgccgatccgggctcggccggggagagagggatcccgccgatcggggggcgctcgtgctgcaccgattcgagctcgctccctgctctgcccgcgcggggtgcgttcctgcggaggtccgcgccgggccggtagctgctgcgtgctgcctggtggctgctgctaggtaggtggttaggcggcggcaggaggatgcgggcggcggccgcgtagcgccagcgcaggcgcagcagccccggcatgggcgacgacgccgagctcgaggagggggaggcctgcgcctgcggggacgacaccgccttcgtcgaccccgatgtcgcgctctcttacattgacgaaaagcttcaagacatacttggccatttccagaaggacttcgaaggaggcgtttctgcagataatctagggtcaaaatttggtgcatatggttcatttttgcctacgtaccagcgctctcctcttcctcaaactagaagtccccctaaggcaggaaatattacctcaaaatctccctttcaccagtcgaatgagaaacctccagctgtggcagtttcatctaccccccaaagtaatggtcctgtggtgcctttttctggtgattcaattaaaaaggaaatacgcccatccacaaagtctgaaaggggttccgtctcccatgattcatatgggccatcaaaatgtagtgaccaaaacagacttaaagtccggataaaggttggctctgataatgttttggcaagaaataatgcagctatctacagtggcctgggccttgatatttcttcaccttcatcaaacgaggatagccctgatggccgtgggagcctgtcccctgaagttaacaatgtgccacatgaatctccacaaaccattcttcagatcatgacatgcttttcagttcctggaggcttcctgttatcccctctaccagccaatatcttgcagttgacaaaaaaggtcgtgtcttcatcaaagaagtgggaatcaaatgtggatgtagaaaatgtacaagaatcatatgaaggccatgtggctaaaagggtgaaatctgatggtaacaaaaagaggctgatagatgcaaaaaattcaaagaacaaaaatgatattagtgcagttatgaaaaaggagattgatatggaattagttgctggtcaaaagatagtatctgaagctcttaaaatatcattgctgtctgaccccagagctatggatgcaaaaggtgagaatcgtcttgaagaggagccagcagaaaacaacttggttggaattagagatgctcgattgaaagagcggtgcaccaagactgactccatgacagtcaaagtggaacctgccaaagcagaggtgatggaatgtttagagaacagtagttttggcagttcagaaatggatctttcagcagtgaaagggaaatcaaaacccaagacagaaaagggtgaggcaactttagaagataggaatacaactaatgacaaagacctaatatcagataggaagcaaaaaaagaaaataaaatctgggagtaaatataatgcctctaactttgaaggtagcattagcaatgttataaacgaaggagcttcagctgttttccacatgggaaaaatttctggtctagaagctttgccttatgacacaaatggggaaaataattccaagagtgaggtcaaaaaaatgcagagagaacaaaaggccaatgtttcgacgtcttctgatttcctggaggaggagaaacacattcattcttctgctgcagttaaggagagaagtgacatgcaatcaaaacctatccatactggaaagaaacccaaagcaaaatcacatagagatgttagggacaacaattttcctgaaggatcttatggaagcaaggaacaggattcattggagaataaaagtgcctttggagatccccggccaaaggaaaaaccatggaagtttgacagcgaggactctgatgcacctgggatctcgaggaaggatagttcttatgtaaagcttgacaaacacctggctactgaggagcagaagatgcatatacttccacctgccactgcttcaactgcgaatgcagcttttatacatgcagccccagtcgtaatagaggaacattgggtgtgctgtgacatatgccagaaatggcgtctcctaccttatgaaatgaatccttcagatcttcctaagaagtggaaatgtagcatgctacagtggctacctgggatgaataggtgtgagattagtgaagaggagactacaaatgctctgaatgcactgtatgtccctgcccctgcaaatggtattccttcagttggccttcctcatgttgcttcatcaggactagtaacatccagcactcccaatatgaatggacatattgagcagagtaggaaaagaaagaatgttctaagtgatggaaattttgtggctgagggttctcaccaaacacagggttcaggtcatccaatgagcaaccaacatgctcccaataaaagtaaaactcatactgatggtatccagtatcctattgatagagattctgtaagcaaatcagttgacccaacaattaaaaagcaaaggtccaaaagcaaacatcacagtagctattctgatggagtagatcttgttgaaagacctaagaagcattctaaagtaaaaagcaagagagacttggatcgtgatgaatacaaagcttctaaaaaaatcaggaaagaagagcgccattttgatagagatcggaaccttggatccggtttagctagtcgtgatgttcccgatgaggccaaggcttttcctgtgaagtcagtaacgtcaaagggttcaggtgaaaggagtgatctttcttcatcaaagcaaaaaaatgtctcacatcataaccatttggaaaattccaagaaagcaaggcaagattatgtaggttttcctgaagacgagagcaaggaatattttcaccagtcagatgtgcaaagatcagatttgtctagtaagaagaggatagtgaagaaatgggaggagagtcagtacaatccagtagctcaggtaagcaaaggagctatcaaggaaacctatagggatcagaacttaaaggaagcaaagttgatgtcattgaattctgaagaactgttttctatgacgagctccaaaccaccgaaagctcaacatgctgatcaggttttgttttatgatggggggcgtacgaacagcgagttagttgaggataacacacactttagtggcaaaacaggtctccctgagcaagaaaatagtctttctgataaggctttagacttgggcaaacctgctagtgatgtggcctatattcagacttcagctgtaacttcaagttcttcaaaggcttcagtctcacaaaaaaagaagcagaccactcaagctatgaagacatcgtcaattgagtctctttctttgtcaccacagagaaactctaacattgacaatgtctctgcctctcatagtagagtttcaggtaaggatggatctctgaatgctaactcaagcactgtgccggccatggcaaaacaactaaatactcaagttggtgtagcagtcaatgatcaatggtctagtgaacctattttggttggttcttcccgaagaaaatctgatagagataatggacaggttcagttaactcaaggtcatgcctctgatggtattcatcctgaaaggggtttgaatgaggacctgcagcctgaatctgggagaaaggattccaatataaaaaactcccatattcctaaaagttctaaccatttgcattctggtgaaaaaaataactataatacagatggctctcctatgcaaccaggaaagcatcttgttgatccaaagacaccagtcttggataaaggtgattcaagtatgcatgaaaataagaaaagtgcaaattctcttcaagatagaaatggatcaactcattgcccaccagatggaaatcctctgctcggtttaccatctggaaaagagaaatcatatctcaaaaacaacaggcaagattcacagaagcctaaaccccagatctcacctctgaaagaaagcaaattggattcccattccactccattaaaacctaatgggtcaaaattgactccacaatcaagacaatacaatgctgaaaatggagggcgacatggcactgcaaaacaagcaattcgtagtcctgctgatacttttagtccagctaggaaggacaatacttcaactgcgtatgctctcaaagaagcccgtgatttaaagcataaggctaatcgtttgaaggaagaaggaaaagagcttgaaagtacaagactctactttgactccgccttaaaatttttgcatgttgcatcacttttggaacctcctagctttgatggtttgaaacaaggcgatgcagcccagagcatgtattcagatactgcaaaactttgcaactttgttggtcacgcgtatgaaaaatgcaagaagatggctgctgctgctttagcatacaagtgtgttgaagttgcttatctgaaggctgcatactgcaagcacccaactgcaagcaaggatagacaagtgttacaggcagttgtacagactgctccaggtgaatcaccatcatcttcagcctcagacattgataatttaaataacaatggattatccaagggcccttcaagcaaggatgccaattcaccacaagtggttggaaatcatttgttgctggccactcgaaatcaaccacacttgatgcggttactagcttatacaaatgatgtcaatagtgcctttgaggctactcggaagtctcacatggcaattgcttctgcttctggcaatcacgaaaatggagttgatggtctttcttcagtaaaaacagtgctggattttaacttccgaagtgtgaatgatctactaagtagcatgaagctgaatataatccaacagtgcaaaagcataggtctttcatttgagcttgctggtcaacttgtacagagagtgatcatatttcttctttttttacgttgattacacccaattagtatatatagttgcatacccacttggatgatttagttagtgaggaacacaagtgaagatgagctttgcactgttcaatgcttctgcttggaagaaggatgctcttgtggccgcagttcgttgttatctggaaagtggcttgctactgagcattctcttactacatgatgtaaattgtgaatctccatcaaggctggcttatggctgaagagtcagtatcatagtttcctttgatgggagaggacagcaaagccagctaatctcgctatccaagaaatcggctagtagttttttcccttttgaaccttgtcacgatgccttgtcttctggataaagttcacgcaggtttcaaataagaaatcacatggactatcagacttgtatggaatatggatgctgtacaaagatttctaatgtacattagtctaactttttttttcgtgatccccgaaatgccgactatcaccagcgcatgtacatgtatatatacatacaataaaggttggggcatttttaccacgtgctggtctctatgtatgacgcctttggttccgtccaacttttagtctttcacatttttgaaattttgtgacattctagttttttgttaggatagcgtctagtactgggaatttgttgcagaatgcaaaataaattccgtgctgtacaacttgtagccgagtttcaggtcgtcgagtgaagtgatggtaactgctcgccgaatttgcactatgcggtctgtggat

SEQ ID NO: 213478 - DNA, 5857 bp, Zea Mays
ggcaggggaggacagcgaagagagagagagagagaggggagaccggggggcaagcctgggaggggccgaggaggcccgcttacgaatctcgcgatccccaatccggaagcctcgattcgccgatccgggctcggccggggagagagggatcccgccgatcggggggcgctcgtgctgcaccgattcgagctcgctccctgctctgcccgcgcggggtgcgttcctgcggaggtccgcgccgggccggtagctgctgcgtgctgcctggtggctgctgctaggtaggtggttaggcggcggcaggaggatgcgggcggcggccgcgtagcgccagcgcaggcgcagcagccccggcatgggcgacgacgccgagctcgaggagggggaggcctgcgcctgcggggacgacaccgccttcgtcgaccccgatgtcgcgctctcttacattgacgaaaagcttcaagacatacttggccatttccagaaggacttcgaaggaggcgtttctgcagataatctagggtcaaaatttggtgcatatggttcatttttgcctacgtaccagcgctctcctcttcctcaaactagaagtccccctaaggcaggaaatattacctcaaaatctccctttcaccagtcgaatgagaaacctccagctgtggcagtttcatctaccccccaaagtaatggtcctgtggtgcctttttctggtgattcaattaaaaaggaaatacgcccatccacaaagtctgaaaggggttccgtctcccatgattcatatgggccatcaaaatgtagtgaccaaaacagacttaaagtccggataaaggttggctctgataatgttttggcaagaaataatgcagctatctacagtggcctgggccttgatatttcttcaccttcatcaaacgaggatagccctgatggccgtgggagcctgtcccctgaagttaacaatgtgccacatgaatctccacaaaccattcttcagatcatgacatgcttttcagttcctggaggcttcctgttatcccctctaccagccaatatcttgcagttgacaaaaaaggtcgtgtcttcatcaaagaagtgggaatcaaatgtggatgtagaaaatgtacaagaatcatatgaaggccatgtggctaaaagggtgaaatctgatggtaacaaaaagaggctgatagatgcaaaaaattcaaagaacaaaaatgatattagtgcagttatgaaaaaggagattgatatggaattagttgctggtcaaaagatagtatctgaagctcttaaaatatcattgctgtctgaccccagagctatggatgcaaaaggtgagaatcgtcttgaagaggagccagcagaaaacaacttggttggaattagagatgctcgattgaaagagcggtgcaccaagactgactccatgacagtcaaagtggaacctgccaaagcagaggtgatggaatgtttagagaacagtagttttggcagttcagaaatggatctttcagcagtgaaagggaaatcaaaacccaagacagaaaagggtgaggcaactttagaagataggaatacaactaatgacaaagacctaatatcagataggaagcaaaaaaagaaaataaaatctgggagtaaatataatgcctctaactttgaaggtagcattagcaatgttataaacgaaggagcttcagctgttttccacatgggaaaaatttctggtctagaagctttgccttatgacacaaatggggaaaataattccaagagtgaggtcaaaaaaatgcagagagaacaaaaggccaatgtttcgacgtcttctgatttcctggaggaggagaaacacattcattcttctgctgcagttaaggagagaagtgacatgcaatcaaaacctatccatactggaaagaaacccaaagcaaaatcacatagagatgttagggacaacaattttcctgaaggatcttatggaagcaaggaacaggattcattggagaataaaagtgcctttggagatccccggccaaaggaaaaaccatggaagtttgacagcgaggactctgatgcacctgggatctcgaggaaggatagttcttatgtaaagcttgacaaacacctggctactgaggagcagaagatgcatatacttccacctgccactgcttcaactgcgaatgcagcttttatacatgcagccccagtcgtaatagaggaacattgggtgtgctgtgacatatgccagaaatggcgtctcctaccttatgaaatgaatccttcagatcttcctaagaagtggaaatgtagcatgctacagtggctacctgggatgaataggtgtgagattagtgaagaggagactacaaatgctctgaatgcactgtatgtccctgcccctgcaaatggtattccttcagttggccttcctcatgttgcttcatcaggactagtaacatccagcactcccaatatgaatggacatattgagcagagtaggaaaagaaagaatgttctaagtgatggaaattttgtggctgagggttctcaccaaacacagggttcaggtcatccaatgagcaaccaacatgctcccaataaaagtaaaactcatactgatggtatccagtatcctattgatagagattctgtaagcaaatcagttgacccaacaattaaaaagcaaaggtccaaaagcaaacatcacagtagctattctgatggagtagatcttgttgaaagacctaagaagcattctaaagtaaaaagcaagagagacttggatcgtgatgaatacaaagcttctaaaaaaatcaggaaagaagagcgccattttgatagagatcggaaccttggatccggtttagctagtcgtgatgttcccgatgaggccaaggcttttcctgtgaagtcagtaacgtcaaagggttcaggtgaaaggagtgatctttcttcatcaaagcaaaaaaatgtctcacatcataaccatttggaaaattccaagaaagcaaggcaagattatgtaggttttcctgaagacgagagcaaggaatattttcaccagtcagatgtgcaaagatcagatttgtctagtaagaagaggatagtgaagaaatgggaggagagtcagtacaatccagtagctcaggtaagcaaaggagctatcaaggaaacctatagggatcagaacttaaaggaagcaaagttgatgtcattgaattctgaagaactgttttctatgacgagctccaaaccaccgaaagctcaacatgctgatcaggttttgttttatgatggggggcgtacgaacagcgagttagttgaggataacacacactttagtggcaaaacaggtctccctgagcaagaaaatagtctttctgataaggctttagacttgggcaaacctgctagtgatgtggcctatattcagacttcagctgtaacttcaagttcttcaaaggcttcagtctcacaaaaaaagaagcagaccactcaagctatgaagacatcgtcaattgagtctctttctttgtcaccacagagaaactctaacattgacaatgtctctgcctctcatagtagagtttcaggtaaggatggatctctgaatgctaactcaagcactgtgccggccatggcaaaacaactaaatactcaagttggtgtagcagtcaatgatcaatggtctagtgaacctattttggttggttcttcccgaagaaaatctgatagagataatggacaggttcagttaactcaaggtcatgcctctgatggtattcatcctgaaaggggtttgaatgaggacctgcagcctgaatctgggagaaaggattccaatataaaaaactcccatattcctaaaagttctaaccatttgcattctggtgaaaaaaataactataatacagatggctctcctatgcaaccaggaaagcatcttgttgatccaaagacaccagtcttggataaaggtgattcaagtatgcatgaaaataagaaaagtgcaaattctcttcaagatagaaatggatcaactcattgcccaccagatggaaatcctctgctcggtttaccatctggaaaagagaaatcatatctcaaaaacaacaggcaagattcacagaagcctaaaccccagatctcacctctgaaagaaagcaaattggattcccattccactccattaaaacctaatgggtcaaaattgactccacaatcaagacaatacaatgctgaaaatggagggcgacatggcactgcaaaacaagcaattcgtagtcctgctgatacttttagtccagctaggaaggacaatacttcaactgcgtatgctctcaaagaagcccgtgatttaaagcataaggctaatcgtttgaaggaagaaggaaaagagcttgaaagtacaagactctactttgactccgccttaaaatttttgcatgttgcatcacttttggaacctcctagctttgatggtttgaaacaaggcgatgcagcccagagcatgtattcagatactgcaaaactttgcaactttgttggtcacgcgtatgaaaaatgcaagaagatggctgctgctgctttagcatacaagtgtgttgaagttgcttatctgaaggctgcatactgcaagcacccaactgcaagcaaggatagacaagtgttacaggcagttgtacagactgctccaggtgaatcaccatcatcttcagcctcagacattgataatttaaataacaatggattatccaagggcccttcaagcaaggatgccaattcaccacaagtggttggaaatcatttgttgctggccactcgaaatcaaccacacttgatgcggttactagcttatacaaatgatgtcaatagtgcctttgaggctactcggaagtctcacatggcaattgcttctgcttctggcaatcacgaaaatggagttgatggtctttcttcagtaaaaacagtgctggattttaacttccgaagtgtgaatgatctactaagagtagcatgaagctgaatataatccaacagtgcaaaagcataggtctttcatttgagcttgctggtcaacttgtacagagagtgatcatatttcttctttttttacgttgattacacccaattagtatatatagttgcatacccacttggatgatttagttagtgaggaacacaagtgaagatgagctttgcactgttcaatgcttctgcttggaagaaggatgctcttgtggccgcagttcgttgttatctggaaagtggcttgctactgagcattctcttactacatgatgtaaattgtgaatctccatcaaggctggcttatggctgaagaggagaggacagcaaagccagctaatctcgctatccaagaaatcggctagtagttttttcccttttgaaccttgtcacgatgccttgtcttctggataaagttcacgcaggtttcaaataagaaatcacatggactatcagacttgtatggaatatggatgctgtacaaagatttctaatgtacattagtctaactttttttttcgtgatccccgaaatgccgactatcaccagcgcatgtacatgtatatatacatacaataaaggttggggcatttttaccacgtgctggtctctatgtatgacgcctttggttccgtccaacttttagtctttcacatttttgaaattttgtgacattctagttttttgttaggatagcgtctagtactgggaatttgttgcagaatgcaaaataaattccgtgctgtacaacttgtagccgagtttcaggtcgtcgagtgaagtgatggtaactgctcgccgaatttgcactatgcggtctgtggat

SEQ ID NO: 213479 - DNA, 5995 bp, Zea Mays
ggcaggggaggacagcgaagagagagagagagagaggggagaccggggggcaagcctgggaggggccgaggaggcccgcttacgaatctcgcgatccccaatccggaagcctcgattcgccgatccgggctcggccggggagagagggatcccgccgatcggggggcgctcgtgctgcaccgattcgagctcgctccctgctctgcccgcgcggggtgcgttcctgcggaggtccgcgccgggccggtagctgctgcgtgctgcctggtggctgctgctaggtaggtggttaggcggcggcaggaggatgcgggcggcggccgcgtagcgccagcgcaggcgcagcagccccggcatgggcgacgacgccgagctcgaggagggggaggcctgcgcctgcggggacgacaccgccttcgtcgaccccgatgtcgcgctctcttacattgacgaaaagcttcaagacatacttggccatttccagaaggacttcgaaggaggcgtttctgcagataatctagggtcaaaatttggtgcatatggttcatttttgcctacgtaccagcgctctcctcttcctcaaactagaagtccccctaaggcaggaaatattacctcaaaatctccctttcaccagtcgaatgagaaacctccagctgtggcagtttcatctaccccccaaagtaatggtcctgtggtgcctttttctggtgattcaattaaaaaggaaatacgcccatccacaaagtctgaaaggggttccgtctcccatgattcatatgggccatcaaaatgtagtgaccaaaacagacttaaagtccggataaaggttggctctgataatgttttggcaagaaataatgcagctatctacagtggcctgggccttgatatttcttcaccttcatcaaacgaggatagccctgatggccgtgggagcctgtcccctgaagttaacaatgtgccacatgaatctccacaaaccattcttcagatcatgacatgcttttcagttcctggaggcttcctgttatcccctctaccagccaatatcttgcagttgacaaaaaaggtcgtgtcttcatcaaagaagtgggaatcaaatgtggatgtagaaaatgtacaagaatcatatgaaggccatgtggctaaaagggtgaaatctgatggtaacaaaaagaggctgatagatgcaaaaaattcaaagaacaaaaatgatattagtgcagttatgaaaaaggagattgatatggaattagttgctggtcaaaagatagtatctgaagctcttaaaatatcattgctgtctgaccccagagctatggatgcaaaaggtgagaatcgtcttgaagaggagccagcagaaaacaacttggttggaattagagatgctcgattgaaagagcggtgcaccaagactgactccatgacagtcaaagtggaacctgccaaagcagaggtgatggaatgtttagagaacagtagttttggcagttcagaaatggatctttcagcagtgaaagggaaatcaaaacccaagacagaaaagggtgaggcaactttagaagataggaatacaactaatgacaaagacctaatatcagataggaagcaaaaaaagaaaataaaatctgggagtaaatataatgcctctaactttgaaggtagcattagcaatgttataaacgaaggagcttcagctgttttccacatgggaaaaatttctggtctagaagctttgccttatgacacaaatggggaaaataattccaagagtgaggtcaaaaaaatgcagagagaacaaaaggccaatgtttcgacgtcttctgatttcctggaggaggagaaacacattcattcttctgctgcagttaaggagagaagtgacatgcaatcaaaacctatccatactggaaagaaacccaaagcaaaatcacatagagatgttagggacaacaattttcctgaaggatcttatggaagcaaggaacaggattcattggagaataaaagtgcctttggagatccccggccaaaggaaaaaccatggaagtttgacagcgaggactctgatgcacctgggatctcgaggaaggatagttcttatgtaaagcttgacaaacacctggctactgaggagcagaagatgcatatacttccacctgccactgcttcaactgcgaatgcagcttttatacatgcagccccagtcgtaatagaggaacattgggtgtgctgtgacatatgccagaaatggcgtctcctaccttatgaaatgaatccttcagatcttcctaagaagtggaaatgtagcatgctacagtggctacctgggatgaataggtgtgagattagtgaagaggagactacaaatgctctgaatgcactgtatgtccctgcccctgcaaatggtattccttcagttggccttcctcatgttgcttcatcaggactagtaacatccagcactcccaatatgaatggacatattgagcagagtaggaaaagaaagaatgttctaagtgatggaaattttgtggctgagggttctcaccaaacacagggttcaggtcatccaatgagcaaccaacatgctcccaataaaagtaaaactcatactgatggtatccagtatcctattgatagagattctgtaagcaaatcagttgacccaacaattaaaaagcaaaggtccaaaagcaaacatcacagtagctattctgatggagatcttgttgaaagacctaagaagcattctaaagtaaaaagcaagagagacttggatcgtgatgaatacaaagcttctaaaaaaatcaggaaagaagagcgccattttgatagagatcggaaccttggatccggtttagctagtcgtgatgttcccgatgaggccaaggcttttcctgtgaagtcagtaacgtcaaagggttcaggtgaaaggagtgatctttcttcatcaaagcaaaaaaatgtctcacatcataaccatttggaaaattccaagaaagcaaggcaagattatgtaggttttcctgaagacgagagcaaggaatattttcaccagtcagatgtgcaaagatcagatttgtctagtaagaagaggatagtgaagaaatgggaggagagtcagtacaatccagtagctcaggtaagcaaaggagctatcaaggaaacctatagggatcagaacttaaaggaagcaaagttgatgtcattgaattctgaagaactgttttctatgacgagctccaaaccaccgaaagctcaacatgctgatcaggttttgttttatgatggggggcgtacgaacagcgagttagttgaggataacacacactttagtggcaaaacaggtctccctgagcaagaaaatagtctttctgataaggctttagacttgggcaaacctgctagtgatgtggcctatattcagacttcagctgtaacttcaagttcttcaaaggcttcagtctcacaaaaaaagaagcagaccactcaagctatgaagacatcgtcaattgagtctctttctttgtcaccacagagaaactctaacattgacaatgtctctgcctctcatagtagagtttcaggtaaggatggatctctgaatgctaactcaagcactgtgccggccatggcaaaacaactaaatactcaagttggtgtagcagtcaatgatcaatggtctagtgaacctattttggttggttcttcccgaagaaaatctgatagagataatggacaggttcagttaactcaaggtcatgcctctgatggtattcatcctgaaaggggtttgaatgaggacctgcagcctgaatctgggagaaaggattccaatataaaaaactcccatattcctaaaagttctaaccatttgcattctggtgaaaaaaataactataatacagatggctctcctatgcaaccaggaaagcatcttgttgatccaaagacaccagtcttggataaaggtgattcaagtatgcatgaaaataagaaaagtgcaaattctcttcaagatagaaatggatcaactcattgcccaccagatggaaatcctctgctcggtttaccatctggaaaagagaaatcatatctcaaaaacaacaggcaagattcacagaagcctaaaccccagatctcacctctgaaagaaagcaaattggattcccattccactccattaaaacctaatgggtcaaaattgactccacaatcaagacaatacaatgctgaaaatggagggcgacatggcactgcaaaacaagcaattcgtagtcctgctgatacttttagtccagctaggaaggacaatacttcaactgcgtatgctctcaaagaagcccgtgatttaaagcataaggctaatcgtttgaaggaagaaggaaaagagcttgaaagtacaagactctactttgactccgccttaaaatttttgcatgttgcatcacttttggaacctcctagctttgatggtttgaaacaaggcgatgcagcccagagcatgtattcagatactgcaaaactttgcaactttgttggtcacgcgtatgaaaaatgcaagaagatggctgctgctgctttagcatacaagtgtgttgaagttgcttatctgaaggctgcatactgcaagcacccaactgcaagcaaggatagacaagtgttacaggcagttgtacagactgctccaggtgaatcaccatcatcttcagcctcagacattgataatttaaataacaatggattatccaagggcccttcaagcaaggatgccaattcaccacaagtggttggaaatcatttgttgctggccactcgaaatcaaccacacttgatgcggttactagcttatacaaatgatgtcaatagtgcctttgaggctactcggaagtctcacatggcaattgcttctgcttctggcaatcacgaaaatggagttgatggtctttcttcagtaaaaacagtgctggattttaacttccgaagtgtgaatgatctactaaggtttgtgcggatttcaatggagtctatcagctgctgatgtgtgcagaatctgagaaagtgccatctgatggaagttcctgttggatgtttaatctaattaactttgtttttgatgaagtagcatgaagctgaatataatccaacagtgcaaaagcataggtctttcatttgagcttgctggtcaacttgtacagagagtgatcatatttcttctttttttacgttgattacacccaattagtatatatagttgcatacccacttggatgatttagttagtgaggaacacaagtgaagatgagctttgcactgttcaatgcttctgcttggaagaaggatgctcttgtggccgcagttcgttgttatctggaaagtggcttgctactgagcattctcttactacatgatgtaaattgtgaatctccatcaaggctggcttatggctgaagagtcagtatcatagtttcctttgatgggagaggacagcaaagccagctaatctcgctatccaagaaatcggctagtagttttttcccttttgaaccttgtcacgatgccttgtcttctggataaagttcacgcaggtttcaaataagaaatcacatggactatcagacttgtatggaatatggatgctgtacaaagatttctaatgtacattagtctaactttttttttcgtgatccccgaaatgccgactatcaccagcgcatgtacatgtatatatacatacaataaaggttggggcatttttaccacgtgctggtctctatgtatgacgcctttggttccgtccaacttttagtctttcacatttttgaaattttgtgacattctagttttttgttaggatagcgtctagtactgggaatttgttgcagaatgcaaaataaattccgtgctgtacaacttgtagccgagtttcaggtcgtcgagtgaagtgatggtaactgctcgccgaatttgcactatgcggtctgtggat

SEQ ID NO: 213480 - DNA, 916 bp, Zea Mays
ctgcagccccttcatcgaacacacagtaattccacctgcttcatagacaaatgatgtcaatagtgcctttgaggctactcggaagtctcacatggcaattgcttctgcttctggcaatcacgaaaatggagttgatggtctttcttcagtaaaaacagtgctggattttaacttccgaagtgtgaatgatctactaaggtttgtgcggatttcaatggagtctatcagctgctgatgtgtgcagaatctgagaaagtgccatctgatggaagttcctgttggatgtttaatctaattaactttgtttttgatgaagtagcatgaagctgaatataatccaacagtgcaaaagcataggtctttcatttgagcttgctggtcaacttgtacagagagtgatcatatttcttctttttttacgttgattacacccaattagtatatatagttgcatacccacttggatgatttagttagtgaggaacacaagtgaagatgagctttgcactgttcaatgcttctgcttggaagaaggatgctcttgtggccgcagttcgttgttatctggaaagtggcttgctactgagcattctcttactacatgatgtaaattgtgaatctccatcaaggctggcttatggctgaagagtcagtatcatagtttcctttgatggtaactcttagttaaggtcaaatgatttatgtgccttttttaagtgctactacttgatgctgctatcttttttttttggccagggagaggacagcaaagccagctaatctcgctatccaagaaatcggctagtagttttttcccttttgaaccttgtcacgatgccttgtcttctggataaagttcacgcagctattagctttcatttacaaagcgaacttattttcagttattgaagtgcag

SEQ ID NO: 213481 - DNA, 1252 bp, Zea Mays
ctattttccaaaatcgatttcattttcttcatattaggattgacctctaatatgcagtatacttgcatgcttttttcccccaaggtggcggtgagggtcgcctccgtgaaaaatatgcaaaatctattgaacctattcttagtgaagatataagatatgtgcacttcgacttccaccgagtttgtggtcatattcactttgagcgcctttctcagctatatgatcagatcaaggactatcttcagaaacataagtacttccttataaatgataaaggagagaaaattgaggagcagactggcactgtaagaacaaattgtatagattgtctggatcgtaccaatgtgactcagagcatgattggggggaaaattctggaaagccaacttcaacgtataggagttcttagtgctggtgatacaataagcaaacatccagcctttgatacaaactacaaaattttgtgggccaatcatggagatgcaataagcattcagtactctggaactcctgctctgaagggagattttgttcggtacgggaagcgaactactcagggaattctaaacgatttgaggaatgcacttgctagatactacttgaataacttcgttgatgggactaagcaggatgccatggatcttcttcaaggacataacatgacatctgttagtcgagacatggcagtgccaagcaaatcaggacttctggagagttatgcgtccttccgccttgcttttgcattggttatgggagctctagtgttcatgatgatgtcactaagacaagcccggaatgatgctcgccatttgatgctgtcatttctttgggccggtctttgtattggcatctcacattttgtcagagccaacggccgcacgttcactaaccgacctaggtttcacaagtcacgccattgatggatgcaagatgaccgtttgctcgtcaagcgacgtcatagattgtcatcattcatcgaacttgttgacacaaattggtttgcatgaagtgttgcattttttttggcatggtacttgccctttgtaataagttttcttccatttcgtaactagtttttgtttcttcctctcctatgtctggtccatactgttctggccttctatggtcttcggtagaattcattggtaaaaaccatatgaagtgtattatgattttttcgtattgcatactcagtcctcggcatttgcaccagggatggctattcttcttctaacaagaggttcatctatat

SEQ ID NO: 213482 - DNA, 2180 bp, Zea Mays
gcgccgtggatcagccgctcgtatgagattcgattgggcggttataccgccatggatgagacaactgatgcaagcacttcgttgaaactccatacaagattgagactctgggagtttcctgactgttatatatttgaaccaattgatggcctggctgacttgtacttgtcagttagccgggccagcggaacaatgaatctagttcaagacttgccaccacgtggacccactacaaaacataaagttcaaacagtatatggtgtgataggagtgctcaaacttgcagttggatcatattttgtggtgatcacggatcgtgattgtgtgggatcctactttggacacgcaatttttaaagtgacaggactaaaagttcttccctgcaatagtgcacataacaccacctctgctgagcagaaaaaaatggaaacagaattctcagaactcctggatgctgcagagaggactattggccttcacttttcctacgatatcaacctaacactttctgcacagaggctacatgatctaggcgatgagtatagagctcttcctctctggagacaggcggaaccaagatttctatggaatgcttacttgttagaacctctaattgagaacaagctgaaccagtacttattgccggtaattcaaggcagctttcaaaatatccaagcagaagttgggtcagagaaggtaaatgtgatcctgattgcacgaaggtgcacacgaaggataggtactcgaatgtggagacgaggagctgatgcagagggttttgctgcaaacttcgttgaatcagagcagataatgcagtcaaaagggtttacagcatcctatgtacaagttcgaggttctatgccattcttgtgggagcagattgttgatttgacatacaaacctagttttgacattgttagacaagaggatgcgccttctgtgcttgagaggcatttccatgatttgcaaaagaaatacggagctgtcttagctgttgatcttgtcaatacaggtggcggtgagggtcgcctccgtgaaaaatatgcaaaatctattgaacctattcttagtgaagatataagatatgtgcacttcgacttccaccgagtttgtggtcatattcactttgagcgcctttctcagctatatgatcagatcaaggactatcttcagaaacataagtacttccttataaatgataaaggagagaaaattgaggagcagactggcactgtaagaacaaattgtatagattgtctggatcgtaccaatgtgactcagagcatgattggggggaaaattctggaaagccaacttcaacgtataggagttcttagtgctggtgatacaataagcaaacatccagcctttgatacaaactacaaaattttgtgggccaatcatggagatgcaataagcattcagtactctggaactcctgctctgaagggagattttgttcggtacgggaagcgaactactcagggaattctaaacgatttgaggaatgcacttgctagatactacttgaataacttcgttgatgggactaagcaggatgccatggatcttcttcaaggacataacatgacatctgttagtcgagacatggcagtgccaagcaaatcaggacttctggagagttatgcgtccttccgccttgcttttgcattggttatgggagctctagtgttcatgatgatgtcactaagacaagcccggaatgatgctcgccatttgatgctgtcatttctttgggccggtctttgtattggcatctcacattttgtcagagccaacggccgcacgttcactaaccgacctaggtttcacaagtcacgccattgatggatgcaagatgaccgtttgctcgtcaagcgacgtcatagattgtcatcattcatcgaacttgttgacacaaattggtttgcatgaagtgttgcattttttttggcatggtacttgccctttgtaataagttttcttccatttcgtaactagtttttgtttcttcctctcctatgtctggtccatactgttctggccttctatggtcttcggtagaattcattggtaaaaaccatatgaagtgtattatgattttttcgtattgcatactcagtcctcggcatttgcaccagggatggctattcttcttctaacaagaggttcatctatat

SEQ ID NO: 213483 - DNA, 779 bp, Zea Mays
cacagtgcgggtgcgcccagcatcggccgaactggtctatcggcgccgcccttcacgccgagagttccctctttctcgcttgctcactcgcgtcgacgactgggctaccggcgcctccaccctccgcctggtgtccttcgccgtcgacgagcgcacaccagtacgtattgctcgtgatttgtgtaactacggagcaagctgcatacagcacaagatagaagatgggtatccttgagaggatcaaggagattgaggccgagatggctcggactcagaaaaataaagcaacagaatatcatcttggacaactgaaggcaaaactagcaaagttgaggacacaactattagagcctccaaaggtaccaatggggttgtgaaaccacatcagcaattcagaatcttgaaattcatttgcttattcccatgggttccagcggaggtggagatggttttgaagtcacaaagtttgggcatggtcgtgttgcacttattggatttcccagtgttggaaagtcaactcttttaacgatgttgactgggacacattctgaagctgcatcatatgagttcacaacgcttacttgcattcctggaattgttcattacaatgataccaaaatccagcttcttgatcttcctggtatcattgaaggagcttctgaaggcaaggggcgtggtaggcaggttattgctgttgcaaagtcatcagatcttgtgctgatggttctggatgcctcaaagatgaggaaatcttcttttattatcaacaaatcggagaa

SEQ ID NO: 213484 - DNA, 732 bp, Zea Mays
cgcgtcatagcttttccttcgtttggtatctttgccgaggctgtgcgattggccatctccccctcgcgctctcgtgccctcacacgaccttctgctccccgcactgttcgattctgtgtcctcgtgcccttctgtgtgctattccgctcccgcttctgctgccgtgcacaatcgttgccatcacggccgtcttcaccatgttcaggccgccgcgtgctcgtccaacgacgctcgtggaaaccagcgttctagagagtactctcgcttcacagatgcctctagacaggatccgaagccaggtcgttgggtgggggagatggaagactgcggtttggagccctacactgactgctacaggaggcttcggctttgggatgaaggtatgcgtgatatggagatataacccgaaggcaggatgaacggacgctgaagctgtggctgaaggagcttcgtcttagtataatgatgaaggtggaagatgaaaccgacctaaaggggaaaaactacttagtccttgatagcccgccttatgattatcagtaaatatcagggacatgaatgtaattttatccggactgcgccacgtgcttataaatagatgaacagtaacaccatactgttcacgctgaatggtaatcactctcgcgtcactcttgcattttcaccttctggcaagccgaaggtattgatgtaatataaataccattgatgtttatccatgtttgtaaaaag

SEQ ID NO: 213485 - DNA, 2072 bp, Zea Mays
gttaaaacttacccatgagcgtttcaacgtttcgtcgttttaataaccttgattaaaagtgtaggcattggtgagtacaaacctaaggttaaaagaagaatattttgaataaaagtgtttgtatttgccaaatggcttatgcttttagttgagataggtagtatatcaaagttcagggcatcacatagataagaacgaatttgctccgtgtgcaacaaaaagctcgtttttacactgactcctcttctattgcagcctatagctgccaaatagttggatgcaactggtccatttatctggaaatatttatatttaaaaaaatatcgaaaaacattacatttaaaattttataggtagtcttctttcattctgtggagatcattttcactgataactgaaacaacaattacttcattatattcattcaaggacaagcaccacacaatcaacatcatgtttaaactcaaatcaagacgtgttgagtaaaccatccttttacatgttaccaggagtctaagaaactatagtttgggttgttccagatttgagtgtcatacctaaatttgggtacttgtaagtccagattaaatgcaatgtttcctttctcggtttttggacatcttacaatcataaattatccttttacattaacttgcagcctttcaaaaacatatgttttcccaatattatttattaaatgcttttagtattgtatcttcattttagagtgagaaatccgctactcaattcacatcaggatattagttgtcaaatattttagtactaatattgagggggatggcggagggcattgcgctgcggggttacatcgccgtcaccttcgacatgcgcgacataggtgggtccacagggcgggtgtcgctcacgtgctccatcaagaacatcgagtgaggtggtgtgctgctgctctaaagaagggaggagaggaagtagcgacaatgtcgccaagaccacctggcgcgatgtctcctaccagatcaccaagatcaacatgtacaaggatggtcggcatgtacaagatatgcttaaggaatgagccacaaaatctgagagaacttatgctcttggtgctgctgacaacacaactgttgctattagaaagggatttgccattggttcaggtgctcttgtgtccctggtgctgtttggtgccttcgttagcagagctggagtgaagagtgttggaagtgtcgccctaaagatggtggaggaggttcgcaggcagttcaacaccattcttgggttgatggagtgaacaagcaagcctgactatgcaacctatgtgaagatttgcactgatgcttcttccatcaaggagatgattccttggggtgctctggtcatgctgactccctcattgatggaacctctttggcatcgagactctctctggcgtttttgctggtgccctggtttttggagtgcaggtgcgcactttgccttctactctctctgtgcacttcaatgtgtttgcttgttctagggtttatggagatttctgctttggacaaattgccatctctacttccaacactgtgctgcataggataacgcaagaagtatattaagaacaaggccatctcagataaaagtagatgtagctttcataggacttaattccagcaaagcaaaggttggcagtgcaccaaacaatagcgtttatacttcattcttatggattggagaagcctatgcaacatgtcaagccagatgacatgcagatgagaaggttctgcatcaatagaaaccagagaaaaatctgtatgtgtctgtatgacatctcagataaagcctgatgatcagcatgatgaaaggtggggagttctatagctggtttaagctggagctagcttctgaagtccggtcaggtgtctgtatgtgttgcccctttttatttcatttcatgagaaaagattgttatttgttccttgaactgtacttggtcgtacttgtgaataaatattttagcatggttgttcgacttctcataatgtttattcgacatcagttcatgatattagtgttacgtgatattttatcatatgaatttt

SEQ ID NO: 213486 - DNA, 1729 bp, Zea Mays
caaacgttgcagcattgatggcagcgagctcgttctccactctccagcatgtcgatccagcgggagcaccttcgacctcaccggtgaaactagaagaacgtatgaagctagacttgttgcaatttatagacatgtaagagaggatggagttgagggacaacctatttctgtttcaacagaacaatttgcaatgacttgtaagttgacatgtcttgtgctgtgaacttgcagccttgttgataacaataattgatctgggcctcttccaccagaattagtagatacacgtagtcttcttgctatcttgacttcaggctgataataacaacttcagtggaagctccatcctgctgaatacaacaacatacaaacacttctaaagctgatattagttgtcaaatattttagtactaatattgagggggatggcggagggcattgcgctgcggggttacatcgccgtcaccttcgacatgcgcgacataggtgggtccacagggcgggtgtcgctcacgtgctccatcaagaacatcgagtgaggtggtgtgctgctgctctaaagaagggaggagaggaagtagcgacaatgtcgccaagaccacctggcgcgatgtctcctaccagatcaccaagatcaacatgtacaaggtgatccagtccgagccctctccctgcatgcttccattgattttttatttcattccaatcgatttgccgtgatatatgcaatgcaggatggtcggcatgtacaagatatgcttaaggaatgagccacaaaatctgagagaacttatgctcttggtgctgctgacaacacaactgttgctattagaaagggatttgccattggttcaggtgctcttgtgtccctggtgctgtttggtgccttcgttagcagagctggagtgaaggttgtcgatgttctctcctgaaggttttcattggtttgattgttggagacatgtttttgtactggttctctgtcatgaccatgaagagtgttggaagtgtcgccctaaagatggtggaggaggttcgcaggcagttcaacaccattcttgggttgatggagtgaacaagcaagcctgactatgcaacctatgtgaagatttgcactgatgcttcttccatcaaggagatgattccttggggtgctctggtcatgctgactccctcattgatggaacctctttggcatcgagactctctctggcgtttttgctggtgccctggtttttggagtgcagaacaaggccatctcagataaaagtagatgtagctttcataggacttaattccagcaaagcaaaggttggcagtgcaccaaacaatagcgtttatacttcattcttatggattggagaagcctatgcaacatgtcaagccagatgacatgcagatgagaaggttctgcatcaatagaaaccagagaaaaatctgtatgtgtctgtatgacatctcagataaagcctgatgatcagcatgatgaaaggtggggagttctatagctggtttaagctggagctagcttctgaagtccggtcaggtgtctgtatgtgttgcccctttttatttcatttcatgagaaaagattgttatttgttccttgaactgtacttggtcgtacttgtgaataaatattttagcatggttgttcgacttctcataatgtttattcgacatcagttcatgatattagtgttacgtgatattttatcatatgaatttt

SEQ ID NO: 213487 - DNA, 2404 bp, Zea Mays
cctccctccatagttgtcgccccaaacgttgcagcattgatggcagcgagctcgttctccactctccagcatgtcgatccagcgggagcaccttcgacctcaccggtgaaactagaagaacgtatgaagctagacttgttgcaatttatagacatgtaagagaggatggagttgagggacaacctatttctgtttcaacagaacaatttgcagtaagtcaaatcacctcttgtactataatcttgcaattgtttctttctctctcttttctaagaataactattgcattagcatattttactaacttgtataaattgttattttcaagagattttatgtaccgtttctttacaaacaatgctaatgccacatccacaatcttgcagaactttgaatggcaaccagttatctggatctttgcctgatgagattggttaccagatgaactttaacagattagaaataaaatataacaacatatcaggcccatacctaacacttttgccaacttaacaagaattaaacatctgttagtgtcgagtatctttattttctgcccatccctgatgcttctgatttgtaaaattagtaaataattctggttccaattttaccttttagtcacatgaataataactcattacaaatcccatctgagttgtccaacttgccttaactccttcatttgtaagtagacctcaactttttctaatattttctattttgcaagttgcagatgacttgtaagttgacatgtcttgtgctgtgaacttgcagccttgttgataacaataattgatctgggcctcttccaccagaattagtagatacacgtagtcttcttgctatcttgactgctgataataacaacttcagtggaagctccatcctgctgaatacaacaacatacaaacacttctaaagctgtgggtccacagggcgggtgtcgctcacgtgctccatcaagaacatcgagtgaggtggtgtgctgctgctctaaagaagggaggagaggaagtagcgacaatgtcgccaagaccacctggcgcgatgtctcctaccagatcaccaagatcaacatgtacaaggtgatccagtccgagccctctccctgcatgcttccattgattttttatttcattccaatcgatttgccgtgatatatgcaatgcaggatggtcggcatgtacaagatatgcttaaggtgaggttgtaattcaggatgtgcatatatttcttgggcttgaatttgtttaatctaaatagattattttttatccaatccaaatttccaatgacttgccatatcattagcatcagaggctccataaagcagctctgctagaattaactgattcactgtcaaggtcaaacatcactatgatattgctgagatggtccaatcagtgacaatgctggtggtattgttgagatggcaggaatgagccacaaaatctgagagaacttatgctcttggtgctgctgacaacacaactgttgctattagaaagggatttgccattggttcaggtgctcttgtgtccctggtgctgtttggtgccttcgttagcagagctggagtgaaggttgtcgatgttctctcctgaaggttttcattggtttgattgttggagacatgtttttgtactggttctctgtcatgaccatgaagagtgttggaagtgtcgccctaaagatggtggaggaggttcgcaggcagttcaacaccattcttgggttgatggagtgaacaagcaagcctgactatgcaacctatgtgaagatttgcactgatgcttcttccatcaaggagatgattccttggggtgctctggtcatgctgactccctcattgatggaacctctttggcatcgagactctctctggcgtttttgctggtgccctggtttttggagtgcagaacaaggccatctcagataaaagtagatgtagctttcataggacttaattccagcaaagcaaaggttggcagtgcaccaaacaatagcgtttatacttcattcttatggattggagaagcctatgcaacatgtcaagccagatgacatgcagatgagaaggttctgcatcaatagaaaccagagaaaaatctgtatgtgtctgtatgacatctcagataaagcctgatgatcagcatgatgaaaggtggggagttctatagctggtttaagctggagctagcttctgaagtccggtcaggtgtctgtatgtgttgcccctttttatttcatttcatgagaaaagattgttatttgttccttgaactgtacttggtcgtacttgtgaataaatattttagcatggttgttcgacttctcataatgtttattcgacatcagttcatgatattagtgttacgtgatattttatcatatgaatttt

SEQ ID NO: 213488 - DNA, 1922 bp, Zea Mays
cacagctgcagctgccccccgagcaaccctagctctcgctcctccctccatagttgtcgccccaaacgttgcagcattgatggcagcgagctcgttctccactctccagcatgtcgatccagcgggagcaccttcgacctcaccggtgaaactagaagaacgtatgaagctagacttgttgcaatttatagacatgtaagagaggatggagttgagggacaacctatttctgtttcaacagaacaatttgcattgcagatgacttgtaagttgacatgtcttgtgctgtgaacttgcagccttgttgataacaataattgatctgggcctcttccaccagaattagtagatacacgtagtcttcttgctatcttgacttcaggctgataataacaacttcagtggaagctccatcctgctgaatacaacaacatacaaacacttctaaagctgatattagttgtcaaatattttagtactaatattgagggggatggcggagggcattgcgctgcggggttacatcgccgtcaccttcgacatgcgcgacataggtgggtccacagggcgggtgtcgctcacgtgctccatcaagaacatcgagtgaggtggtgtgctgctgctctaaagaagggaggagaggaagtagcgacaatgtcgccaagaccacctggcgcgatgtctcctaccagatcaccaagatcaacatgtacaaggtgatccagtccgagccctctccctgcatgcttccattgattttttatttcattccaatcgatttgccgtgatatatgcaatgcaggatggtcggcatgtacaagatatgcttaagcatcagaggctccataaagcagctctgctagaattaactgattcactgtcaaggtcaaacatcactatgatattgctgagatggtccaatcagtgacaatgctggtggtattgttgagatggcaggaatgagccacaaaatctgagagaacttatgctcttggtgctgctgacaacacaactgttgctattagaaagggatttgccattggttcaggtgctcttgtgtccctggtgctgtttggtgccttcgttagcagagctggagtgaaggttgtcgatgttctctcctgaaggttttcattggtttgattgttggagacatgtttttgtactggttctctgtcatgaccatgaagagtgttggaagtgtcgccctaaagatggtggaggaggttcgcaggcagttcaacaccattcttgggttgatggagtgaacaagcaagcctgactatgcaacctatgtgaagatttgcactgatgcttcttccatcaaggagatgattccttggggtgctctggtcatgctgactccctcattgatggaacctctttggcatcgagactctctctggcgtttttgctggtgccctggtttttggagtgcagaacaaggccatctcagataaaagtagatgtagctttcataggacttaattccagcaaagcaaaggttggcagtgcaccaaacaatagcgtttatacttcattcttatggattggagaagcctatgcaacatgtcaagccagatgacatgcagatgagaaggttctgcatcaatagaaaccagagaaaaatctgtatgtgtctgtatgacatctcagataaagcctgatgatcagcatgatgaaaggtggggagttctatagctggtttaagctggagctagcttctgaagtccggtcaggtgtctgtatgtgttgcccctttttatttcatttcatgagaaaagattgttatttgttccttgaactgtacttggtcgtacttgtgaataaatattttagcatggttgttcgacttctcataatgtttattcgacatcagttcatgatattagtgttacgtgatattttatcatatgaatttt

SEQ ID NO: 213489 - DNA, 2723 bp, Zea Mays
gccgtcgccgcagacgcagccggccacccaccactcgcgcctcccccaccgcgtcgcgtgtgggccacagctacagctgcctcctcgagcaacccacactcctttcttcccctgcctgtcgtctctcttccaccttccaccacaagcgccgtcgcagccggtgcctgctccttcccgatccccgaggcaaagctgcgactccgcaactgccgccatggcgttcgagaagatcaaggtctccaacccaatcatcgagatggacggcgatgagatgaccagggtattctggcagtctatcaaggacaagcttatcttcccatttctggacctggacatcaagtactatgatttggggatactgcacggtgaagcaactgatgacaaggtcacagtggaggctgcagaggctactctcaagtacaatgtggctattaagtgtgcgaccattactccaggtgaaactagaagaacgtatgaagctagacttgttgcaatttatagacatgtaagagaggatggagttgagggacaacctatttctgtttcaacagaacaatttgcagtaagtcaaatcacctcttgtactataatcttgcaattgtttctttctctctcttttctaagaataactattgcattagcatattttactaacttgtataaattgttattttcaagagattttatgtaccgtttctttacaaacaatgctaatgccacatccacaatcttgcagaactttgaatggcaaccagttatctggatctttgcctgatgagattggttaccagatgaactttaacagattagaaataaaatataacaacatatcaggcccatacctaacacttttgccaacttaacaagaattaaacatctgttagtgtcgagtatctttattttctgcccatccctgatgcttctgatttgtaaaattagtaaataattctggttccaattttaccttttagtcacatgaataataactcattacaaatcccatctgagttgtccaacttgccttaactccttcatttgtaagtagacctcaactttttctaatattttctattttgcaagttgcagatgacttgtaagttgacatgtcttgtgctgtgaacttgcagccttgttgataacaataattgatctgggcctcttccaccagaattagtagatacacgtagtcttcttgctatcttgacttcaggctgataataacaacttcagtggaagctccatcctgctgaatacaacaacatacaaacacttctaaagctggcattgcgctgcggggttacatcgccgtcaccttcgacatgcgcgacataggtgggtccacagggcgggtgtcgctcacgtgctccatcaagaacatcgagtgaggtggtgtgctgctgctctaaagaagggaggagaggaagtagcgacaatgtcgccaagaccacctggcgcgatgtctcctaccagatcaccaagatcaacatgtacaaggtgatccagtccgagccctctccctgcatgcttccattgattttttatttcattccaatcgatttgccgtgatatatgcaatgcaggatggtcggcatgtacaagatatgcttaagcatcagaggctccataaagcagctctgctagaattaactgattcactgtcaaggtcaaacatcactatgatattgctgagatggtccaatcagtgacaatgctggtggtattgttgagatggcaggaatgagccacaaaatctgagagaacttatgctcttggtgctgctgacaacacaactgttgctattagaaagggatttgccattggttcaggtgctcttgtgtccctggtgctgtttggtgccttcgttagcagagctggagtgaaggttgtcgatgttctctcctgaaggttttcattggtttgattgttggagacatgtttttgtactggttctctgtcatgaccatgaagagtgttggaagtgtcgccctaaagatggtggaggaggttcgcaggcagttcaacaccattcttgggttgatggagtgaacaagcaagcctgactatgcaacctatgtgaagatttgcactgatgcttcttccatcaaggagatgattccttggggtgctctggtcatgctgactccctcattgatggaacctctttggcatcgagactctctctggcgtttttgctggtgccctggtttttggagtgcaggataacgcaagaagtatattaagaacaaggccatctcagataaaagtagatgtagctttcataggacttaattccagcaaagcaaaggttggcagtgcaccaaacaatagcgtttatacttcattcttatggattggagaagcctatgcaacatgtcaagccagatgacatgcagatgagaaggttctgcatcaatagaaaccagagaaaaatctgtatgtgtctgtatgacatctcagataaagcctgatgatcagcatgatgaaaggtggggagttctatagctggtttaagctggagctagcttctgaagtccggtcaggtgtctgtatgtgttgcccctttttatttcatttcatgagaaaagattgttatttgttccttgaactgtacttggtcgtacttgtgaataaatattttagcatggttgttcgacttctcataatgtttattcgacatcagttcatgatattagtgttacgtgatattttatcatatgaatttt

SEQ ID NO: 213490 - DNA, 2100 bp, Zea Mays
gccgtcgccgcagacgcagccggccacccaccactcgcgcctcccccaccgcgtcgcgtgtgggccacagctacagctgcctcctcgagcaacccacactcctttcttcccctgcctgtcgtctctcttccaccttccaccacaagcgccgtcgcagccggtgcctgctccttcccgatccccgaggcaaagctgcgactccgcaactgccgccatggcgttcgagaagatcaaggtctccaacccaatcatcgagatggacggcgatgagatgaccagggtattctggcagtctatcaaggacaagcttatcttcccatttctggacctggacatcaagtactatgatttggggatactgcacggtgaagcaactgatgacaaggtcacagtggaggctgcagaggctactctcaagtacaatgtggctattaagtgtgcgaccattactccaggtgaaactagaagaacgtatgaagctagacttgttgcaatttatagacatgtaagagaggatggagttgagggacaacctatttctgtttcaacagaacaatttgcaccttgttgataacaataattgatctgggcctcttccaccagaattagtagatacacgtagtcttcttgctatcttgacttcaggctgataataacaacttcagtggaagctccatcctgctgaatacaacaacatacaaacacttctaaagctgtgggtccacagggcgggtgtcgctcacgtgctccatcaagaacatcgagtgaggtggtgtgctgctgctctaaagaagggaggagaggaagtagcgacaatgtcgccaagaccacctggcgcgatgtctcctaccagatcaccaagatcaacatgtacaaggtgatccagtccgagccctctccctgcatgcttccattgattttttatttcattccaatcgatttgccgtgatatatgcaatgcaggatggtcggcatgtacaagatatgcttaaggaatgagccacaaaatctgagagaacttatgctcttggtgctgctgacaacacaactgttgctattagaaagggatttgccattggttcaggtgctcttgtgtccctggtgctgtttggtgccttcgttagcagagctggagtgaaggttgtcgatgttctctcctgaaggttttcattggtttgattgttggagacatgtttttgtactggttctctgtcatgaccatgaagagtgttggaagtgtcgccctaaagatggtggaggaggttcgcaggcagttcaacaccattcttgggttgatggagtgaacaagcaagcctgactatgcaacctatgtgaagatttgcactgatgcttcttccatcaaggagatgattccttggggtgctctggtcatgctgactccctcattgatggaacctctttggcatcgagactctctctggcgtttttgctggtgccctggtttttggagtgcaggtgcgcactttgccttctactctctctgtgcacttcaatgtgtttgcttgttctagggtttatggagatttctgctttggacaaattgccatctctacttccaacactgtgctgcataggataacgcaagaagtatattaagaacaaggccatctcagataaaagtagatgtagctttcataggacttaattccagcaaagcaaaggttggcagtgcaccaaacaatagcgtttatacttcattcttatggattggagaagcctatgcaacatgtcaagccagatgacatgcagatgagaaggttctgcatcaatagaaaccagagaaaaatctgtatgtgtctgtatgacatctcagataaagcctgatgatcagcatgatgaaaggtggggagttctatagctggtttaagctggagctagcttctgaagtccggtcaggtgtctgtatgtgttgcccctttttatttcatttcatgagaaaagattgttatttgttccttgaactgtacttggtcgtacttgtgaataaatattttagcatggttgttcgacttctcataatgtttattcgacatcagttcatgatattagtgttacgtgatattttatcatatgaatttt

SEQ ID NO: 213491 - DNA, 3637 bp, Zea Mays
gccgtcgccgcagacgcagccggccacccaccactcgcgcctcccccaccgcgtcgcgtgtgggccacagctacagctgcctcctcgagcaacccacactcctttcttcccctgcctgtcgtctctcttccaccttccaccacaagcgccgtcgcagccggtgcctgctccttcccgatccccgaggcaaagctgcgactccgcaactgccgccatggcgttcgagaagatcaaggtctccaacccaatcatcgagatggacggcgatgagatgaccagggtattctggcagtctatcaaggacaagcttatcttcccatttctggacctggacatcaagtactatgatttggggatactgcacggtgaagcaactgatgacaaggtcacagtggaggctgcagaggctactctcaagtacaatgtggctattaagtgtgcgaccattactccaggtgaaactagaagaacgtatgaagctagacttgttgcaatttatagacatgtaagagaggatggagttgagggacaacctatttctgtttcaacagaacaatttgcaccttgttgataacaataattgatctgggcctcttccaccagaattagtagatacacgtagtcttcttgctatcttgacttcaggctgataataacaacttcagtggaagctccatcctgctgaatacaacaacatacaaacacttctaaagctgtgagtgtaacaaccttttcgctcatgttctctcttttcagaatttgaggtagatgagggcaaaagaatttaacagctattacaacttctgttattgagaacaatcattaaaagcatgcttattaaaacgacgttaaaacgacgtttaaacgtcgtttaaactataaaacgctgacaggaagtgaaacgacaaaacgttttacgattcgtcgtaaaacgttgtttaacgtcgtttaaacgtcgcgttttgacgtttaaacgcggtatagagtgaaacgccgcgtttaatgcgtctgctgctagtaattggcccagcccaattagaaactcccgcccagcccacccagaccgccgctacaagccgcactttcaccagcccaattagtaactcgcgttctcaccagccgtcgcactccagggcgcgctccagcctccaggccgccgctgctccaaccctcctgcgccgcccgtccggcgccgccaggcccgcctctgcgtgccgctgctccaggccgccgccgctccagtcagctgctctccaggccgtcctccctccaggccgctgctctccaggccgctccaggccgctgctctcaaggccgtcctccagccccgcctcagagcctctgcgtgccaccgctccaggccgccgcgctccaggccgtcctccctcctgcgccgcctgtccggctgccagcccctccagccccgcctctgctgtcccactgcggcaggactacagagtacagagactgactgtcccactgtttggtatttgacttgatataattgcctgaaattatgatatattgaaatttccctatgttgtttaaaactacatttaaactttgtttaaaccgtttaaaagttaaaacttacccatgagcgtttcaacgtttcgtcgttttaataaccttgattaaaagtgtaggcattggtgagtacaaacctaaggttaaaagaagaatattttgaataaaagtgtttgtatttgccaaatggcttatgcttttagttgagataggtagtatatcaaagttcagggcatcacatagataagaacgaatttgctccgtgtgcaacaaaaagctcgtttttacactgactcctcttctattgcagcctatagctgccaaatagttggatgcaactggtccatttatctggaaatatttatatttaaaaaaatatcgaaaaacattacatttaaaattttataggtagtcttctttcattctgtggagatcattttcactgataactgaaacaacaattacttcattatattcattcaaggacaagcaccacacaatcaacatcatgtttaaactcaaatcaagacgtgttgagtaaaccatccttttacatgttaccaggagtctaagaaactatagtttgggttgttccagatttgagtgtcatacctaaatttgggtacttgtaagtccagattaaatgcaatgtttcctttctcggtttttggacatcttacaatcataaattatccttttacattaacttgcagcctttcaaaaacatatgttttcccaatattatttattaaatgcttttagtattgtatcttcattttagagtgagaaatccgctactcaattcacatcaggatattagttgtcaaatattttagtactaatattgagggggatggcggagggcattgcgctgcggggttacatcgccgtcaccttcgacatgcgcgacataggtgggtccacagggcgggtgtcgctcacgtgctccatcaagaacatcgagtgaggtggtgtgctgctgctctaaagaagggaggagaggaagtagcgacaatgtcgccaagaccacctggcgcgatgtctcctaccagatcaccaagatcaacatgtacaaggatggtcggcatgtacaagatatgcttaagcatcagaggctccataaagcagctctgctagaattaactgattcactgtcaaggtcaaacatcactatgatattgctgagatggtccaatcagtgacaatgctggtggtattgttgagatggcaggaatgagccacaaaatctgagagaacttatgctcttggtgctgctgacaacacaactgttgctattagaaagggatttgccattggttcaggtgctcttgtgtccctggtgctgtttggtgccttcgttagcagagctggagtgaagagtgttggaagtgtcgccctaaagatggtggaggaggttcgcaggcagttcaacaccattcttgggttgatggagtgaacaagcaagcctgactatgcaacctatgtgaagatttgcactgatgcttcttccatcaaggagatgattccttggggtgctctggtcatgctgactccctcattgatggaacctctttggcatcgagactctctctggcgtttttgctggtgccctggtttttggagtgcagaacaaggccatctcagataaaagtagatgtagctttcataggacttaattccagcaaagcaaaggttggcagtgcaccaaacaatagcgtttatacttcattcttatggattggagaagcctatgcaacatgtcaagccagatgacatgcagatgagaaggttctgcatcaatagaaaccagagaaaaatctgtatgtgtctgtatgacatctcagataaagcctgatgatcagcatgatgaaaggtggggagttctatagctggtttaagctggagctagcttctgaagtccggtcaggtgtctgtatgtgttgcccctttttatttcatttcatgagaaaagattgttatttgttccttgaactgtacttggtcgtacttgtgaataaatattttagcatggttgttcgacttctcataatgtttattcgacatcagttcatgatattagtgttacgtgatattttatcatatgaatttt

SEQ ID NO: 213492 - DNA, 2286 bp, Zea Mays
cctagctctccctccccctccgcgtcctacagccatcgtcgctctgccttccgcccccgccgtcgccgcagacgcagccggccacccaccactcgcgcctcccccaccgcgtcgcgtgtgggccacagctacagctgcctcctcgagcaacccacactcctttcttcccctgcctgtcgtctctcttccaccttccaccacaagcgccgtcgcagccggtgcctgctccttcccgatccccgaggcaaagctgcgactccgcaactgccgccatggcgttcgagaagatcaaggtctccaacccaatcatcgagatggacggcgatgagatgaccagggtattctggcagtctatcaaggacaagcttatcttcccatttctggacctggacatcaagtactatgatttggggatactgcacggtgaagcaactgatgacaaggtcacagtggaggctgcagaggctactctcaagtacaatgtggctattaagtgtgcgaccattactccaggtgaaactagaagaacgtatgaagctagacttgttgcaatttatagacatgtaagagaggatggagttgagggacaacctatttctgtttcaacagaacaatttgcaccttgttgataacaataattgatctgggcctcttccaccagaattagtagatacacgtagtcttcttgctatcttgacttcaggctgataataacaacttcagtggaagctccatcctgctgaatacaacaacatacaaacacttctaaagctgatattagttgtcaaatattttagtactaatattgagggggatggcggagggcattgcgctgcggggttacatcgccgtcaccttcgacatgcgcgacataggtgggtccacagggcgggtgtcgctcacgtgctccatcaagaacatcgagtgaggtggtgtgctgctgctctaaagaagggaggagaggaagtagcgacaatgtcgccaagaccacctggcgcgatgtctcctaccagatcaccaagatcaacatgtacaaggtgatccagtccgagccctctccctgcatgcttccattgattttttatttcattccaatcgatttgccgtgatatatgcaatgcaggatggtcggcatgtacaagatatgcttaagcatcagaggctccataaagcagctctgctagaattaactgattcactgtcaaggtcaaacatcactatgatattgctgagatggtccaatcagtgacaatgctggtggtattgttgagatggcaggaatgagccacaaaatctgagagaacttatgctcttggtgctgctgacaacacaactgttgctattagaaagggatttgccattggttcaggtgctcttgtgtccctggtgctgtttggtgccttcgttagcagagctggagtgaaggttgtcgatgttctctcctgaaggttttcattggtttgattgttggagacatgtttttgtactggttctctgtcatgaccatgaagagtgttggaagtgtcgccctaaagatggtggaggaggttcgcaggcagttcaacaccattcttgggttgatggagtgaacaagcaagcctgactatgcaacctatgtgaagatttgcactgatgcttcttccatcaaggagatgattccttggggtgctctggtcatgctgactccctcattgatggaacctctttggcatcgagactctctctggcgtttttgctggtgccctggtttttggagtgcagtatcatttactgaacgtcatgctgacgtgttcgttatttccagaacaaggccatctcagataaaagtagatgtagctttcataggacttaattccagcaaagcaaaggttggcagtgcaccaaacaatagcgtttatacttcattcttatggattggagaagcctatgcaacatgtcaagccagatgacatgcagatgagaaggttctgcatcaatagaaaccagagaaaaatctgtatgtgtctgtatgacatctcagataaagcctgatgatcagcatgatgaaaggtggggagttctatagctggtttaagctggagctagcttctgaagtccggtcaggtgtctgtatgtgttgcccctttttatttcatttcatgagaaaagattgttatttgttccttgaactgtacttggtcgtacttgtgaataaatattttagcatggttgttcgacttctcataatgtttattcgacatcagttcatgatattagtgttacgtgatattttatcatatgaatttt

SEQ ID NO: 213493 - DNA, 2592 bp, Zea Mays
cccaagcaaccctagctctccctccccctccgcgtcctacagccatcgtcgctctgccttccgcccccgccgtcgccgcagacgcagccggccacccaccactcgcgcctcccccaccgcgtcgcgtgtgggccacagctacagctgcctcctcgagcaacccacactcctttcttcccctgcctgtcgtctctcttccaccttccaccacaagcgccgtcgcagccggtgcctgctccttcccgatccccgaggcaaagctgcgactccgcaactgccgccatggcgttcgagaagatcaaggtctccaacccaatcatcgagatggacggcgatgagatgaccagggtattctggcagtctatcaaggacaagcttatcttcccatttctggacctggacatcaagtactatgatttggggatactgcacggtgaagcaactgatgacaaggtcacagtggaggctgcagaggctactctcaagtacaatgtggctattaagtgtgcgaccattactccaggtgaaactagaagaacgtatgaagctagacttgttgcaatttatagacatgtaagagaggatggagttgagggacaacctatttctgtttcaacagaacaatttgcagtaagtcaaatcacctcttgtactataatcttgcaattgtttctttctctctcttttctaagaataactattgcattagcatattttactaacttgtataaattgttattttcaagagattttatgtaccgtttctttacaaacaatgctaatgccacatccacaatcttgcagaactttgaatggcaaccagttatctggatctttgcctgatgagattggttaccagatgaactttaacagattagaaataaaatataacaacatatcaggcccatacctaacacttttgccaacttaacaagaattaaacatctgttagtgtcgagtatctttattttctgcccatccctgatgcttctgatttgtaaaattagtaaataattctggttccaattttaccttttagtcacatgaataataactcattacaaatcccatctgagttgtccaacttgccttaactccttcatttccttgttgataacaataattgatctgggcctcttccaccagaattagtagatacacgtagtcttcttgctatcttgacttcaggctgataataacaacttcagtggaagctccatcctgctgaatacaacaacatacaaacacttctaaagctggcattgcgctgcggggttacatcgccgtcaccttcgacatgcgcgacataggtgggtccacagggcgggtgtcgctcacgtgctccatcaagaacatcgagtgaggtggtgtgctgctgctctaaagaagggaggagaggaagtagcgacaatgtcgccaagaccacctggcgcgatgtctcctaccagatcaccaagatcaacatgtacaaggatggtcggcatgtacaagatatgcttaagcatcagaggctccataaagcagctctgctagaattaactgattcactgtcaaggtcaaacatcactatgatattgctgagatggtccaatcagtgacaatgctggtggtattgttgagatggcaggaatgagccacaaaatctgagagaacttatgctcttggtgctgctgacaacacaactgttgctattagaaagggatttgccattggttcaggtgctcttgtgtccctggtgctgtttggtgccttcgttagcagagctggagtgaaggttgtcgatgttctctcctgaaggttttcattggtttgattgttggagacatgtttttgtactggttctctgtcatgaccatgaagagtgttggaagtgtcgccctaaagatggtggaggaggttcgcaggcagttcaacaccattcttgggttgatggagtgaacaagcaagcctgactatgcaacctatgtgaagatttgcactgatgcttcttccatcaaggagatgattccttggggtgctctggtcatgctgactccctcattgatggaacctctttggcatcgagactctctctggcgtttttgctggtgccctggtttttggagtgcagaacaaggccatctcagataaaagtagatgtagctttcataggacttaattccagcaaagcaaaggttggcagtgcaccaaacaatagcgtttatacttcattcttatggattggagaagcctatgcaacatgtcaagccagatgacatgcagatgagaaggttctgcatcaatagaaaccagagaaaaatctgtatgtgtctgtatgacatctcagataaagcctgatgatcagcatgatgaaaggtggggagttctatagctggtttaagctggagctagcttctgaagtccggtcaggtgtctgtatgtgttgcccctttttatttcatttcatgagaaaagattgttatttgttccttgaactgtacttggtcgtacttgtgaataaatattttagcatggttgttcgacttctcataatgtttattcgacatcagttcatgatattagtgttacgtgatattttatcatatgaatttt

SEQ ID NO: 213494 - DNA, 2234 bp, Zea Mays
caacccccaagcaaccctagctctccctccccctccgcgtcctacagccatcgtcgctctgccttccgcccccgccgtcgccgcagacgcagccggccacccaccactcgcgcctcccccaccgcgtcgcgtgtgggccacagctacagctgcctcctcgagcaacccacactcctttcttcccctgcctgtcgtctctcttccaccttccaccacaagcgccgtcgcagccggtgcctgctccttcccgatccccgaggcaaagctgcgactccgcaactgccgccatggcgttcgagaagatcaaggtctccaacccaatcatcgagatggacggcgatgagatgaccagggtattctggcagtctatcaaggacaagcttatcttcccatttctggacctggacatcaagtactatgatttggggatactgcacggtgaagcaactgatgacaaggtcacagtggaggctgcagaggctactctcaagtacaatgtggctattaagtgtgcgaccattactccaggtgaaactagaagaacgtatgaagctagacttgttgcaatttatagacatgtaagagaggatggagttgagggacaacctatttctgtttcaacagaacaatttgcaccttgttgataacaataattgatctgggcctcttccaccagaattagtagatacacgtagtcttcttgctatcttgacttcaggctgataataacaacttcagtggaagctccatcctgctgaatacaacaacatacaaacacttctaaagcttactaatattgagggggatggcggagggcattgcgctgcggggttacatcgccgtcaccttcgacatgcgcgacataggtgggtccacagggcgggtgtcgctcacgtgctccatcaagaacatcgagtgaggtggtgtgctgctgctctaaagaagggaggagaggaagtagcgacaatgtcgccaagaccacctggcgcgatgtctcctaccagatcaccaagatcaacatgtacaaggtgatccagtccgagccctctccctgcatgcttccattgattttttatttcattccaatcgatttgccgtgatatatgcaatgcaggatggtcggcatgtacaagatatgcttaagcatcagaggctccataaagcagctctgctagaattaactgattcactgtcaaggtcaaacatcactatgatattgctgagatggtccaatcagtgacaatgctggtggtattgttgagatggcaggaatgagccacaaaatctgagagaacttatgctcttggtgctgctgacaacacaactgttgctattagaaagggatttgccattggttcaggtgctcttgtgtccctggtgctgtttggtgccttcgttagcagagctggagtgaaggttgtcgatgttctctcctgaaggttttcattggtttgattgttggagacatgtttttgtactggttctctgtcatgaccatgaagagtgttggaagtgtcgccctaaagatggtggaggaggttcgcaggcagttcaacaccattcttgggttgatggagtgaacaagcaagcctgactatgcaacctatgtgaagatttgcactgatgcttcttccatcaaggagatgattccttggggtgctctggtcatgctgactccctcattgatggaacctctttggcatcgagactctctctggcgtttttgctggtgccctggtttttggagtgcagaacaaggccatctcagataaaagtagatgtagctttcataggacttaattccagcaaagcaaaggttggcagtgcaccaaacaatagcgtttatacttcattcttatggattggagaagcctatgcaacatgtcaagccagatgacatgcagatgagaaggttctgcatcaatagaaaccagagaaaaatctgtatgtgtctgtatgacatctcagataaagcctgatgatcagcatgatgaaaggtggggagttctatagctggtttaagctggagctagcttctgaagtccggtcaggtgtctgtatgtgttgcccctttttatttcatttcatgagaaaagattgttatttgttccttgaactgtacttggtcgtacttgtgaataaatattttagcatggttgttcgacttctcataatgtttattcgacatcagttcatgatattagtgttacgtgatattttatcatatgaatttt

SEQ ID NO: 213495 - DNA, 4438 bp, Zea Mays
aatcactccctgccccacaacccccaagcaaccctagctctccctccccctccgcgtcctacagccatcgtcgctctgccttccgcccccgccgtcgccgcagacgcagccggccacccaccactcgcgcctcccccaccgcgtcgcgtgtgggccacagctacagctgcctcctcgagcaacccacactcctttcttcccctgcctgtcgtctctcttccaccttccaccacaagcgccgtcgcagccggtgcctgctccttcccgatccccgaggcaaagctgcgactccgcaactgccgccatggcgttcgagaagatcaaggtctccaacccaatcatcgagatggacggcgatgagatgaccagggtattctggcagtctatcaaggacaagcttatcttcccatttctggacctggacatcaagtactatgatttggggatactgcacggtgaagcaactgatgacaaggtcacagtggaggctgcagaggctactctcaagtacaatgtggctattaagtgtgcgaccattactccaggtacatttgattcttgtgtagatgcaatatgtactcttaatctatactactatattaaggctgtaagggggtagcctgcctcctctggttctgcctcccgttaatctacgtcgtccacgcccgttaatctgcaccgttcgtcatgcgtacgttttcgacgtccgtcgcccgtgtgaatcaccccctgccccacaacccccaagcaaccctagctctccctcccccctccgcgttcgcagtcgtcgtcgctctgcctcctgcccccgccgtcgccgccgcgccacagacgcagccggctacccaccgctcgcgcctcccgcaccgtgtcgcgtgtgggccacagctgcagctgccccccgagcaaccctagctctcgctcctccctccatagttgtcgccccaaacgttgcagcattgatggcagcgagctcgttctccactctccagcatgtcgatccagcgggagcaccttcgacctcaccggtgaaactagaagaacgtatgaagctagacttgttgcaatttatagacatgtaagagaggatggagttgagggacaacctatttctgtttcaacagaacaatttgcaccttgttgataacaataattgatctgggcctcttccaccagaattagtagatacacgtagtcttcttgctatcttgacttcaggctgataataacaacttcagtggaagctccatcctgctgaatacaacaacatacaaacacttctaaagctgtgagtgtaacaaccttttcgctcatgttctctcttttcagaatttgaggtagatgagggcaaaagaatttaacagctattacaacttctgttattgagaacaatcattaaaagcatgcttattaaaacgacgttaaaacgacgtttaaacgtcgtttaaactataaaacgctgacaggaagtgaaacgacaaaacgttttacgattcgtcgtaaaacgttgtttaacgtcgtttaaacgtcgcgttttgacgtttaaacgcggtatagagtgaaacgccgcgtttaatgcgtctgctgctagtaattggcccagcccaattagaaactcccgcccagcccacccagaccgccgctacaagccgcactttcaccagcccaattagtaactcgcgttctcaccagccgtcgcactccagggcgcgctccagcctccaggccgccgctgctccaaccctcctgcgccgcccgtccggcgccgccaggcccgcctctgcgtgccgctgctccaggccgccgccgctccagtcagctgctctccaggccgtcctccctccaggccgctgctctccaggccgctccaggccgctgctctcaaggccgtcctccagccccgcctcagagcctctgcgtgccaccgctccaggccgccgcgctccaggccgtcctccctcctgcgccgcctgtccggctgccagcccctccagccccgcctctgctgtcccactgcggcaggactacagagtacagagactgactgtcccactgtttggtatttgacttgatataattgcctgaaattatgatatattgaaatttccctatgttgtttaaaactacatttaaactttgtttaaaccgtttaaaagttaaaacttacccatgagcgtttcaacgtttcgtcgttttaataaccttgattaaaagtgtaggcattggtgagtacaaacctaaggttaaaagaagaatattttgaataaaagtgtttgtatttgccaaatggcttatgcttttagttgagataggtagtatatcaaagttcagggcatcacatagataagaacgaatttgctccgtgtgcaacaaaaagctcgtttttacactgactcctcttctattgcagcctatagctgccaaatagttggatgcaactggtccatttatctggaaatatttatatttaaaaaaatatcgaaaaacattacatttaaaattttataggtagtcttctttcattctgtggagatcattttcactgataactgaaacaacaattacttcattatattcattcaaggacaagcaccacacaatcaacatcatgtttaaactcaaatcaagacgtgttgagtaaaccatccttttacatgttaccaggagtctaagaaactatagtttgggttgttccagatttgagtgtcatacctaaatttgggtacttgtaagtccagattaaatgcaatgtttcctttctcggtttttggacatcttacaatcataaattatccttttacattaacttgcagcctttcaaaaacatatgttttcccaatattatttattaaatgcttttagtattgtatcttcattttagagtgagaaatccgctactcaattcacatcaggatattagttgtcaaatattttagtactaatattgagggggatggcggagggcattgcgctgcggggttacatcgccgtcaccttcgacatgcgcgacataggtgggtccacagggcgggtgtcgctcacgtgctccatcaagaacatcgagtgaggtggtgtgctgctgctctaaagaagggaggagaggaagtagcgacaatgtcgccaagaccacctggcgcgatgtctcctaccagatcaccaagatcaacatgtacaaggatggtcggcatgtacaagatatgcttaagcatcagaggctccataaagcagctctgctagaattaactgattcactgtcaaggtcaaacatcactatgatattgctgagatggtccaatcagtgacaatgctggtggtattgttgagatggcaggaatgagccacaaaatctgagagaacttatgctcttggtgctgctgacaacacaactgttgctattagaaagggatttgccattggttcaggtgctcttgtgtccctggtgctgtttggtgccttcgttagcagagctggagtgaaggttgtcgatgttctctcctgaaggttttcattggtttgattgttggagacatgtttttgtactggttctctgtcatgaccatgaagagtgttggaagtgtcgccctaaagatggtggaggaggttcgcaggcagttcaacaccattcttgggttgatggagtgaacaagcaagcctgactatgcaacctatgtgaagatttgcactgatgcttcttccatcaaggagatgattccttggggtgctctggtcatgctgactccctcattgatggaacctctttggcatcgagactctctctggcgtttttgctggtgccctggtttttggagtgcaggtgcgcactttgccttctactctctctgtgcacttcaatgtgtttgcttgttctagggtttatggagatttctgctttggacaaattgccatctctacttccaacactgtgctgcataggataacgcaagaagtatattaagaacaaggccatctcagataaaagtagatgtagctttcataggacttaattccagcaaagcaaaggttggcagtgcaccaaacaatagcgtttatacttcattcttatggattggagaagcctatgcaacatgtcaagccagatgacatgcagatgagaaggttctgcatcaatagaaaccagagaaaaatctgtatgtgtctgtatgacatctcagataaagcctgatgatcagcatgatgaaaggtggggagttctatagctggtttaagctggagctagcttctgaagtccggtcaggtgtctgtatgtgttgcccctttttatttcatttcatgagaaaagattgttatttgttccttgaactgtacttggtcgtacttgtgaataaatattttagcatggttgttcgacttctcataatgtttattcgacatcagttcatgatattagtgttacgtgatattttatcatatgaatttt

SEQ ID NO: 213496 - DNA, 3912 bp, Zea Mays
aatcactccctgccccacaacccccaagcaaccctagctctccctccccctccgcgtcctacagccatcgtcgctctgccttccgcccccgccgtcgccgcagacgcagccggccacccaccactcgcgcctcccccaccgcgtcgcgtgtgggccacagctacagctgcctcctcgagcaacccacactcctttcttcccctgcctgtcgtctctcttccaccttccaccacaagcgccgtcgcagccggtgcctgctccttcccgatccccgaggcaaagctgcgactccgcaactgccgccatggcgttcgagaagatcaaggtctccaacccaatcatcgagatggacggcgatgagatgaccagggtattctggcagtctatcaaggacaagcttatcttcccatttctggacctggacatcaagtactatgatttggggatactgcacggtgaagcaactgatgacaaggtcacagtggaggctgcagaggctactctcaagtacaatgtggctattaagtgtgcgaccattactccaggtgaaactagaagaacgtatgaagctagacttgttgcaatttatagacatgtaagagaggatggagttgagggacaacctatttctgtttcaacagaacaatttgcatcacatgaataataactcattacaaatcccatctgagttgtccaacttgccttaactccttcatttccttgttgataacaataattgatctgggcctcttccaccagaattagtagatacacgtagtcttcttgctatcttgacttcaggctgataataacaacttcagtggaagctccatcctgctgaatacaacaacatacaaacacttctaaagctgtgagtgtaacaaccttttcgctcatgttctctcttttcagaatttgaggtagatgagggcaaaagaatttaacagctattacaacttctgttattgagaacaatcattaaaagcatgcttattaaaacgacgttaaaacgacgtttaaacgtcgtttaaactataaaacgctgacaggaagtgaaacgacaaaacgttttacgattcgtcgtaaaacgttgtttaacgtcgtttaaacgtcgcgttttgacgtttaaacgcggtatagagtgaaacgccgcgtttaatgcgtctgctgctagtaattggcccagcccaattagaaactcccgcccagcccacccagaccgccgctacaagccgcactttcaccagcccaattagtaactcgcgttctcaccagccgtcgcactccagggcgcgctccagcctccaggccgccgctgctccaaccctcctgcgccgcccgtccggcgccgccaggcccgcctctgcgtgccgctgctccaggccgccgccgctccagtcagctgctctccaggccgtcctccctccaggccgctgctctccaggccgctccaggccgctgctctcaaggccgtcctccagccccgcctcagagcctctgcgtgccaccgctccaggccgccgcgctccaggccgtcctccctcctgcgccgcctgtccggctgccagcccctccagccccgcctctgctgtcccactgcggcaggactacagagtacagagactgactgtcccactgtttggtatttgacttgatataattgcctgaaattatgatatattgaaatttccctatgttgtttaaaactacatttaaactttgtttaaaccgtttaaaagttaaaacttacccatgagcgtttcaacgtttcgtcgttttaataaccttgattaaaagtgtaggcattggtgagtacaaacctaaggttaaaagaagaatattttgaataaaagtgtttgtatttgccaaatggcttatgcttttagttgagataggtagtatatcaaagttcagggcatcacatagataagaacgaatttgctccgtgtgcaacaaaaagctcgtttttacactgactcctcttctattgcagcctatagctgccaaatagttggatgcaactggtccatttatctggaaatatttatatttaaaaaaatatcgaaaaacattacatttaaaattttataggtagtcttctttcattctgtggagatcattttcactgataactgaaacaacaattacttcattatattcattcaaggacaagcaccacacaatcaacatcatgtttaaactcaaatcaagacgtgttgagtaaaccatccttttacatgttaccaggagtctaagaaactatagtttgggttgttccagatttgagtgtcatacctaaatttgggtacttgtaagtccagattaaatgcaatgtttcctttctcggtttttggacatcttacaatcataaattatccttttacattaacttgcagcctttcaaaaacatatgttttcccaatattatttattaaatgcttttagtattgtatcttcattttagagtgagaaatccgctactcaattcacatcaggatattagttgtcaaatattttagtactaatattgagggggatggcggagggcattgcgctgcggggttacatcgccgtcaccttcgacatgcgcgacataggtgggtccacagggcgggtgtcgctcacgtgctccatcaagaacatcgagtgaggtggtgtgctgctgctctaaagaagggaggagaggaagtagcgacaatgtcgccaagaccacctggcgcgatgtctcctaccagatcaccaagatcaacatgtacaaggtgatccagtccgagccctctccctgcatgcttccattgattttttatttcattccaatcgatttgccgtgatatatgcaatgcaggatggtcggcatgtacaagatatgcttaaggtcaaacatcactatgatattgctgagatggtccaatcagtgacaatgctggtggtattgttgagatggcaggaatgagccacaaaatctgagagaacttatgctcttggtgctgctgacaacacaactgttgctattagaaagggatttgccattggttcaggtgctcttgtgtccctggtgctgtttggtgccttcgttagcagagctggagtgaaggttgtcgatgttctctcctgaaggttttcattggtttgattgttggagacatgtttttgtactggttctctgtcatgaccatgaagagtgttggaagtgtcgccctaaagatggtggaggaggttcgcaggcagttcaacaccattcttgggttgatggagtgaacaagcaagcctgactatgcaacctatgtgaagatttgcactgatgcttcttccatcaaggagatgattccttggggtgctctggtcatgctgactccctcattgatggaacctctttggcatcgagactctctctggcgtttttgctggtgccctggtttttggagtgcagaacaaggccatctcagataaaagtagatgtagctttcataggacttaattccagcaaagcaaaggttggcagtgcaccaaacaatagcgtttatacttcattcttatggattggagaagcctatgcaacatgtcaagccagatgacatgcagatgagaaggttctgcatcaatagaaaccagagaaaaatctgtatgtgtctgtatgacatctcagataaagcctgatgatcagcatgatgaaaggtggggagttctatagctggtttaagctggagctagcttctgaagtccggtcaggtgtctgtatgtgttgcccctttttatttcatttcatgagaaaagattgttatttgttccttgaactgtacttggtcgtacttgtgaataaatattttagcatggttgttcgacttctcataatgtttattcgacatcagttcatgatattagtgttacgtgatattttatcatatgaatttt

SEQ ID NO: 213497 - DNA, 2675 bp, Zea Mays
aatcactccctgccccacaacccccaagcaaccctagctctccctccccctccgcgtcctacagccatcgtcgctctgccttccgcccccgccgtcgccgcagacgcagccggccacccaccactcgcgcctcccccaccgcgtcgcgtgtgggccacagctacagctgcctcctcgagcaacccacactcctttcttcccctgcctgtcgtctctcttccaccttccaccacaagcgccgtcgcagccggtgcctgctccttcccgatccccgaggcaaagctgcgactccgcaactgccgccatggcgttcgagaagatcaaggtctccaacccaatcatcgagatggacggcgatgagatgaccagggtattctggcagtctatcaaggacaagcttatcttcccatttctggacctggacatcaagtactatgatttggggatactgcacggtgaagcaactgatgacaaggtcacagtggaggctgcagaggctactctcaagtacaatgtggctattaagtgtgcgaccattactccaggtgaaactagaagaacgtatgaagctagacttgttgcaatttatagacatgtaagagaggatggagttgagggacaacctatttctgtttcaacagaacaatttgcagtaagtcaaatcacctcttgtactataatcttgcaattgtttctttctctctcttttctaagaataactattgcattagcatattttactaacttgtataaattgttattttcaagagattttatgtaccgtttctttacaaacaatgctaatgccacatccacaatcttgcagaactttgaatggcaaccagttatctggatctttgcctgatgagattggttaccagatgaactttaacagattagaaataaaatataacaacatatcaggcccatacctaacacttttgccaacttaacaagaattaaacatctgttagtgtcgagtatctttattttctgcccatccctgatgcttctgatttgtaaaattagtaaataattctggttccaattttaccttttagtcacatgaataataactcattacaaatcccatctgagttgtccaacttgccttaactccttcatttgtaagtagacctcaactttttctaatattttctattttgcaagttgcagatgacttgtaagttgacatgtcttgtgctgtgaacttgcagccttgttgataacaataattgatctgggcctcttccaccagaattagtagatacacgtagtcttcttgctatcttgacttcaggctgataataacaacttcagtggaagctccatcctgctgaatacaacaacatacaaacacttctaaagctgtgggtccacagggcgggtgtcgctcacgtgctccatcaagaacatcgagtgaggtggtgtgctgctgctctaaagaagggaggagaggaagtagcgacaatgtcgccaagaccacctggcgcgatgtctcctaccagatcaccaagatcaacatgtacaaggatggtcggcatgtacaagatatgcttaagcatcagaggctccataaagcagctctgctagaattaactgattcactgtcaaggtcaaacatcactatgatattgctgagatggtccaatcagtgacaatgctggtggtattgttgagatggcaggaatgagccacaaaatctgagagaacttatgctcttggtgctgctgacaacacaactgttgctattagaaagggatttgccattggttcaggtgctcttgtgtccctggtgctgtttggtgccttcgttagcagagctggagtgaaggttgtcgatgttctctcctgaaggttttcattggtttgattgttggagacatgtttttgtactggttctctgtcatgaccatgaagagtgttggaagtgtcgccctaaagatggtggaggaggttcgcaggcagttcaacaccattcttgggttgatggagtgaacaagcaagcctgactatgcaacctatgtgaagatttgcactgatgcttcttccatcaaggagatgattccttggggtgctctggtcatgctgactccctcattgatggaacctctttggcatcgagactctctctggcgtttttgctggtgccctggtttttggagtgcaggataacgcaagaagtatattaagaacaaggccatctcagataaaagtagatgtagctttcataggacttaattccagcaaagcaaaggttggcagtgcaccaaacaatagcgtttatacttcattcttatggattggagaagcctatgcaacatgtcaagccagatgacatgcagatgagaaggttctgcatcaatagaaaccagagaaaaatctgtatgtgtctgtatgacatctcagataaagcctgatgatcagcatgatgaaaggtggggagttctatagctggtttaagctggagctagcttctgaagtccggtcaggtgtctgtatgtgttgcccctttttatttcatttcatgagaaaagattgttatttgttccttgaactgtacttggtcgtacttgtgaataaatattttagcatggttgttcgacttctcataatgtttattcgacatcagttcatgatattagtgttacgtgatattttatcatatgaatttt

SEQ ID NO: 213498 - DNA, 3956 bp, Zea Mays
gaatcactccctgccccacaacccccaagcaaccctagctctccctccccctccgcgtcctacagccatcgtcgctctgccttccgcccccgccgtcgccgcagacgcagccggccacccaccactcgcgcctcccccaccgcgtcgcgtgtgggccacagctacagctgcctcctcgagcaacccacactcctttcttcccctgcctgtcgtctctcttccaccttccaccacaagcgccgtcgcagccggtgcctgctccttcccgatccccgaggcaaagctgcgactccgcaactgccgccatggcgttcgagaagatcaaggtctccaacccaatcatcgagatggacggcgatgagatgaccagggtattctggcagtctatcaaggacaagcttatcttcccatttctggacctggacatcaagtactatgatttggggatactgcacggtgaagcaactgatgacaaggtcacagtggaggctgcagaggctactctcaagtacaatgtggctattaagtgtgcgaccattactccaggtgaaactagaagaacgtatgaagctagacttgttgcaatttatagacatgtaagagaggatggagttgagggacaacctatttctgtttcaacagaacaatttgcaccttgttgataacaataattgatctgggcctcttccaccagaattagtagatacacgtagtcttcttgctatcttgacttcaggctgataataacaacttcagtggaagctccatcctgctgaatacaacaacatacaaacacttctaaagctgtgagtgtaacaaccttttcgctcatgttctctcttttcagaatttgaggtagatgagggcaaaagaatttaacagctattacaacttctgttattgagaacaatcattaaaagcatgcttattaaaacgacgttaaaacgacgtttaaacgtcgtttaaactataaaacgctgacaggaagtgaaacgacaaaacgttttacgattcgtcgtaaaacgttgtttaacgtcgtttaaacgtcgcgttttgacgtttaaacgcggtatagagtgaaacgccgcgtttaatgcgtctgctgctagtaattggcccagcccaattagaaactcccgcccagcccacccagaccgccgctacaagccgcactttcaccagcccaattagtaactcgcgttctcaccagccgtcgcactccagggcgcgctccagcctccaggccgccgctgctccaaccctcctgcgccgcccgtccggcgccgccaggcccgcctctgcgtgccgctgctccaggccgccgccgctccagtcagctgctctccaggccgtcctccctccaggccgctgctctccaggccgctccaggccgctgctctcaaggccgtcctccagccccgcctcagagcctctgcgtgccaccgctccaggccgccgcgctccaggccgtcctccctcctgcgccgcctgtccggctgccagcccctccagccccgcctctgctgtcccactgcggcaggactacagagtacagagactgactgtcccactgtttggtatttgacttgatataattgcctgaaattatgatatattgaaatttccctatgttgtttaaaactacatttaaactttgtttaaaccgtttaaaagttaaaacttacccatgagcgtttcaacgtttcgtcgttttaataaccttgattaaaagtgtaggcattggtgagtacaaacctaaggttaaaagaagaatattttgaataaaagtgtttgtatttgccaaatggcttatgcttttagttgagataggtagtatatcaaagttcagggcatcacatagataagaacgaatttgctccgtgtgcaacaaaaagctcgtttttacactgactcctcttctattgcagcctatagctgccaaatagttggatgcaactggtccatttatctggaaatatttatatttaaaaaaatatcgaaaaacattacatttaaaattttataggtagtcttctttcattctgtggagatcattttcactgataactgaaacaacaattacttcattatattcattcaaggacaagcaccacacaatcaacatcatgtttaaactcaaatcaagacgtgttgagtaaaccatccttttacatgttaccaggagtctaagaaactatagtttgggttgttccagatttgagtgtcatacctaaatttgggtacttgtaagtccagattaaatgcaatgtttcctttctcggtttttggacatcttacaatcataaattatccttttacattaacttgcagcctttcaaaaacatatgttttcccaatattatttattaaatgcttttagtattgtatcttcattttagagtgagaaatccgctactcaattcacatcaggatattagttgtcaaatattttagtactaatattgagggggatggcggagggcattgcgctgcggggttacatcgccgtcaccttcgacatgcgcgacataggtgggtccacagggcgggtgtcgctcacgtgctccatcaagaacatcgagtgaggtggtgtgctgctgctctaaagaagggaggagaggaagtagcgacaatgtcgccaagaccacctggcgcgatgtctcctaccagatcaccaagatcaacatgtacaaggatggtcggcatgtacaagatatgcttaagcatcagaggctccataaagcagctctgctagaattaactgattcactgtcaaggtcaaacatcactatgatattgctgagatggtccaatcagtgacaatgctggtggtattgttgagatggcaggaatgagccacaaaatctgagagaacttatgctcttggtgctgctgacaacacaactgttgctattagaaagggatttgccattggttcaggtgctcttgtgtccctggtgctgtttggtgccttcgttagcagagctggagtgaaggttgtcgatgttctctcctgaaggttttcattggtttgattgttggagacatgtttttgtactggttctctgtcatgaccatgaagagtgttggaagtgtcgccctaaagatggtggaggaggttcgcaggcagttcaacaccattcttgggttgatggagtgaacaagcaagcctgactatgcaacctatgtgaagatttgcactgatgcttcttccatcaaggagatgattccttggggtgctctggtcatgctgactccctcattgatggaacctctttggcatcgagactctctctggcgtttttgctggtgccctggtttttggagtgcaggtgcgcactttgccttctactctctctgtgcacttcaatgtgtttgcttgttctagggtttatggagatttctgctttggacaaattgccatctctacttccaacactgtgctgcataggataacgcaagaagtatattaagaacaaggccatctcagataaaagtagatgtagctttcataggacttaattccagcaaagcaaaggttggcagtgcaccaaacaatagcgtttatacttcattcttatggattggagaagcctatgcaacatgtcaagccagatgacatgcagatgagaaggttctgcatcaatagaaaccagagaaaaatctgtatgtgtctgtatgacatctcagataaagcctgatgatcagcatgatgaaaggtggggagttctatagctggtttaagctggagctagcttctgaagtccggtcaggtgtctgtatgtgttgcccctttttatttcatttcatgagaaaagattgttatttgttccttgaactgtacttggtcgtacttgtgaataaatattttagcatggttgttcgacttctcataatgtttattcgacatcagttcatgatattagtgttacgtgatattttatcatatgaatttt

SEQ ID NO: 213499 - DNA, 4571 bp, Zea Mays
gaatcactccctgccccacaacccccaagcaaccctagctctccctccccctccgcgtcctacagccatcgtcgctctgccttccgcccccgccgtcgccgcagacgcagccggccacccaccactcgcgcctcccccaccgcgtcgcgtgtgggccacagctacagctgcctcctcgagcaacccacactcctttcttcccctgcctgtcgtctctcttccaccttccaccacaagcgccgtcgcagccggtgcctgctccttcccgatccccgaggcaaagctgcgactccgcaactgccgccatggcgttcgagaagatcaaggtctccaacccaatcatcgagatggacggcgatgagatgaccagggtattctggcagtctatcaaggacaagcttatcttcccatttctggacctggacatcaagtactatgatttggggatactgcacggtgaagcaactgatgacaaggtcacagtggaggctgcagaggctactctcaagtacaatgtggctattaagtgtgcgaccattactccaggtgaaactagaagaacgtatgaagctagacttgttgcaatttatagacatgtaagagaggatggagttgagggacaacctatttctgtttcaacagaacaatttgcagtaagtcaaatcacctcttgtactataatcttgcaattgtttctttctctctcttttctaagaataactattgcattagcatattttactaacttgtataaattgttattttcaagagattttatgtaccgtttctttacaaacaatgctaatgccacatccacaatcttgcagaactttgaatggcaaccagttatctggatctttgcctgatgagattggttaccagatgaactttaacagattagaaataaaatataacaacatatcaggcccatacctaacacttttgccaacttaacaagaattaaacatctgttagtgtcgagtatctttattttctgcccatccctgatgcttctgatttgtaaaattagtaaataattctggttccaattttaccttttagtcacatgaataataactcattacaaatcccatctgagttgtccaacttgccttaactccttcatttgtaagtagacctcaactttttctaatattttctattttgcaagttgcagatgacttgtaagttgacatgtcttgtgctgtgaacttgcagccttgttgataacaataattgatctgggcctcttccaccagaattagtagatacacgtagtcttcttgctatcttgactgctgataataacaacttcagtggaagctccatcctgctgaatacaacaacatacaaacacttctaaagctgtgagtgtaacaaccttttcgctcatgttctctcttttcagaatttgaggtagatgagggcaaaagaatttaacagctattacaacttctgttattgagaacaatcattaaaagcatgcttattaaaacgacgttaaaacgacgtttaaacgtcgtttaaactataaaacgctgacaggaagtgaaacgacaaaacgttttacgattcgtcgtaaaacgttgtttaacgtcgtttaaacgtcgcgttttgacgtttaaacgcggtatagagtgaaacgccgcgtttaatgcgtctgctgctagtaattggcccagcccaattagaaactcccgcccagcccacccagaccgccgctacaagccgcactttcaccagcccaattagtaactcgcgttctcaccagccgtcgcactccagggcgcgctccagcctccaggccgccgctgctccaaccctcctgcgccgcccgtccggcgccgccaggcccgcctctgcgtgccgctgctccaggccgccgccgctccagtcagctgctctccaggccgtcctccctccaggccgctgctctccaggccgctccaggccgctgctctcaaggccgtcctccagccccgcctcagagcctctgcgtgccaccgctccaggccgccgcgctccaggccgtcctccctcctgcgccgcctgtccggctgccagcccctccagccccgcctctgctgtcccactgcggcaggactacagagtacagagactgactgtcccactgtttggtatttgacttgatataattgcctgaaattatgatatattgaaatttccctatgttgtttaaaactacatttaaactttgtttaaaccgtttaaaagttaaaacttacccatgagcgtttcaacgtttcgtcgttttaataaccttgattaaaagtgtaggcattggtgagtacaaacctaaggttaaaagaagaatattttgaataaaagtgtttgtatttgccaaatggcttatgcttttagttgagataggtagtatatcaaagttcagggcatcacatagataagaacgaatttgctccgtgtgcaacaaaaagctcgtttttacactgactcctcttctattgcagcctatagctgccaaatagttggatgcaactggtccatttatctggaaatatttatatttaaaaaaatatcgaaaaacattacatttaaaattttataggtagtcttctttcattctgtggagatcattttcactgataactgaaacaacaattacttcattatattcattcaaggacaagcaccacacaatcaacatcatgtttaaactcaaatcaagacgtgttgagtaaaccatccttttacatgttaccaggagtctaagaaactatagtttgggttgttccagatttgagtgtcatacctaaatttgggtacttgtaagtccagattaaatgcaatgtttcctttctcggtttttggacatcttacaatcataaattatccttttacattaacttgcagcctttcaaaaacatatgttttcccaatattatttattaaatgcttttagtattgtatcttcattttagagtgagaaatccgctactcaattcacatcaggatattagttgtcaaatattttagtactaatattgagggggatggcggagggcattgcgctgcggggttacatcgccgtcaccttcgacatgcgcgacataggtgggtccacagggcgggtgtcgctcacgtgctccatcaagaacatcgagtgaggtggtgtgctgctgctctaaagaagggaggagaggaagtagcgacaatgtcgccaagaccacctggcgcgatgtctcctaccagatcaccaagatcaacatgtacaaggtgatccagtccgagccctctccctgcatgcttccattgattttttatttcattccaatcgatttgccgtgatatatgcaatgcaggatggtcggcatgtacaagatatgcttaaggtgaggttgtaattcaggatgtgcatatatttcttgggcttgaatttgtttaatctaaatagattattttttatccaatccaaatttccaatgacttgccatatcattagcatcagaggctccataaagcagctctgctagaattaactgattcactgtcaaggtcaaacatcactatgatattgctgagatggtccaatcagtgacaatgctggtggtattgttgagatggcaggaatgagccacaaaatctgagagaacttatgctcttggtgctgctgacaacacaactgttgctattagaaagggatttgccattggttcaggtgctcttgtgtccctggtgctgtttggtgccttcgttagcagagctggagtgaaggttgtcgatgttctctcctgaaggttttcattggtttgattgttggagacatgtttttgtactggttctctgtcatgaccatgaagagtgttggaagtgtcgccctaaagatggtggaggaggttcgcaggcagttcaacaccattcttgggttgatggagtgaacaagcaagcctgactatgcaacctatgtgaagatttgcactgatgcttcttccatcaaggagatgattccttggggtgctctggtcatgctgactccctcattgatggaacctctttggcatcgagactctctctggcgtttttgctggtgccctggtttttggagtgcagaacaaggccatctcagataaaagtagatgtagctttcataggacttaattccagcaaagcaaaggttggcagtgcaccaaacaatagcgtttatacttcattcttatggattggagaagcctatgcaacatgtcaagccagatgacatgcagatgagaaggttctgcatcaatagaaaccagagaaaaatctgtatgtgtctgtatgacatctcagataaagcctgatgatcagcatgatgaaaggtggggagttctatagctggtttaagctggagctagcttctgaagtccggtcaggtgtctgtatgtgttgcccctttttatttcatttcatgagaaaagattgttatttgttccttgaactgtacttggtcgtacttgtgaataaatattttagcatggttgttcgacttctcataatgtttattcgacatcagttcatgatattagtgttacgtgatattttatcatatgaatttt

SEQ ID NO: 213500 - DNA, 4340 bp, Zea Mays
gaatcactccctgccccacaacccccaagcaaccctagctctccctccccctccgcgtcctacagccatcgtcgctctgccttccgcccccgccgtcgccgcagacgcagccggccacccaccactcgcgcctcccccaccgcgtcgcgtgtgggccacagctacagctgcctcctcgagcaacccacactcctttcttcccctgcctgtcgtctctcttccaccttccaccacaagcgccgtcgcagccggtgcctgctccttcccgatccccgaggcaaagctgcgactccgcaactgccgccatggcgttcgagaagatcaaggtctccaacccaatcatcgagatggacggcgatgagatgaccagggtattctggcagtctatcaaggacaagcttatcttcccatttctggacctggacatcaagtactatgatttggggatactgcacggtgaagcaactgatgacaaggtcacagtggaggctgcagaggctactctcaagtacaatgtggctattaagtgtgcgaccattactccaggtgaaactagaagaacgtatgaagctagacttgttgcaatttatagacatgtaagagaggatggagttgagggacaacctatttctgtttcaacagaacaatttgcagtaagtcaaatcacctcttgtactataatcttgcaattgtttctttctctctcttttctaagaataactattgcattagcatattttactaacttgtataaattgttattttcaagagattttatgtaccgtttctttacaaacaatgctaatgccacatccacaatcttgcagaactttgaatggcaaccagttatctggatctttgcctgatgagattggttaccagatgaactttaacagattagaaataaaatataacaacatatcaggcccatacctaacacttttgccaacttaacaagaattaaacatctgttagtgtcgagtatctttattttctgcccatccctgatgcttctgatttgtaaaattagtaaataattctggttccaattttaccttttagtcacatgaataataactcattacaaatcccatctgagttgtccaacttgccttaactccttcatttgtaagtagacctcaactttttctaatattttctattttgcaagttgcagatgacttgtaagttgacatgtcttgtgctgtgaacttgcagccttgttgataacaataattgatctgggcctcttccaccagaattagtagatacacgtagtcttcttgctatcttgacttcaggctgataataacaacttcagtggaagctccatcctgctgaatacaacaacatacaaacacttctaaagctgtgagtgtaacaaccttttcgctcatgttctctcttttcagaatttgaggtagatgagggcaaaagaatttaacagctattacaacttctgttattgagaacaatcattaaaagcatgcttattaaaacgacgttaaaacgacgtttaaacgtcgtttaaactataaaacgctgacaggaagtgaaacgacaaaacgttttacgattcgtcgtaaaacgttgtttaacgtcgtttaaacgtcgcgttttgacgtttaaacgcggtatagagtgaaacgccgcgtttaatgcgtctgctgctagtaattggcccagcccaattagaaactcccgcccagcccacccagaccgccgctacaagccgcactttcaccagcccaattagtaactcgcgttctcaccagccgtcgcactccagggcgcgctccagcctccaggccgccgctgctccaaccctcctgcgccgcccgtccggcgccgccaggcccgcctctgcgtgccgctgctccaggccgccgccgctccagtcagctgctctccaggccgtcctccctccaggccgctgctctccaggccgctccaggccgctgctctcaaggccgtcctccagccccgcctcagagcctctgcgtgccaccgctccaggccgccgcgctccaggccgtcctccctcctgcgccgcctgtccggctgccagcccctccagccccgcctctgctgtcccactgcggcaggactacagagtacagagactgactgtcccactgtttggtatttgacttgatataattgcctgaaattatgatatattgaaatttccctatgttgtttaaaactacatttaaactttgtttaaaccgtttaaaagttaaaacttacccatgagcgtttcaacgtttcgtcgttttaataaccttgattaaaagtgtaggcattggtgagtacaaacctaaggttaaaagaagaatattttgaataaaagtgtttgtatttgccaaatggcttatgcttttagttgagataggtagtatatcaaagttcagggcatcacatagataagaacgaatttgctccgtgtgcaacaaaaagctcgtttttacactgactcctcttctattgcagcctatagctgccaaatagttggatgcaactggtccatttatctggaaatatttatatttaaaaaaatatcgaaaaacattacatttaaaattttataggtagtcttctttcattctgtggagatcattttcactgataactgaaacaacaattacttcattatattcattcaaggacaagcaccacacaatcaacatcatgtttaaactcaaatcaagacgtgttgagtaaaccatccttttacatgttaccaggagtctaagaaactatagtttgggttgttccagatttgagtgtcatacctaaatttgggtacttgtaagtccagattaaatgcaatgtttcctttctcggtttttggacatcttacaatcataaattatccttttacattaacttgcagcctttcaaaaacatatgttttcccaatattatttattaaatgcttttagtattgtatcttcattttagagtgagaaatccgctactcaattcacatcaggatattagttgtcaaatattttagtactaatattgagggggatggcggagggcattgcgctgcggggttacatcgccgtcaccttcgacatgcgcgacataggtgggtccacagggcgggtgtcgctcacgtgctccatcaagaacatcgagtgaggtggtgtgctgctgctctaaagaagggaggagaggaagtagcgacaatgtcgccaagaccacctggcgcgatgtctcctaccagatcaccaagatcaacatgtacaaggtgatccagtccgagccctctccctgcatgcttccattgattttttatttcattccaatcgatttgccgtgatatatgcaatgcaggatggtcggcatgtacaagatatgcttaaggaatgagccacaaaatctgagagaacttatgctcttggtgctgctgacaacacaactgttgctattagaaagggatttgccattggttcaggtgctcttgtgtccctggtgctgtttggtgccttcgttagcagagctggagtgaaggttgtcgatgttctctcctgaaggttttcattggtttgattgttggagacatgtttttgtactggttctctgtcatgaccatgaagagtgttggaagtgtcgccctaaagatggtggaggaggttcgcaggcagttcaacaccattcttgggttgatggagtgaacaagcaagcctgactatgcaacctatgtgaagatttgcactgatgcttcttccatcaaggagatgattccttggggtgctctggtcatgctgactccctcattgatggaacctctttggcatcgagactctctctggcgtttttgctggtgccctggtttttggagtgcagaacaaggccatctcagataaaagtagatgtagctttcataggacttaattccagcaaagcaaaggttggcagtgcaccaaacaatagcgtttatacttcattcttatggattggagaagcctatgcaacatgtcaagccagatgacatgcagatgagaaggttctgcatcaatagaaaccagagaaaaatctgtatgtgtctgtatgacatctcagataaagcctgatgatcagcatgatgaaaggtggggagttctatagctggtttaagctggagctagcttctgaagtccggtcaggtgtctgtatgtgttgcccctttttatttcatttcatgagaaaagattgttatttgttccttgaactgtacttggtcgtacttgtgaataaatattttagcatggttgttcgacttctcataatgtttattcgacatcagttcatgatattagtgttacgtgatattttatcatatgaatttt

SEQ ID NO: 213501 - DNA, 2086 bp, Zea Mays
ccgtgaatcactccctgccccacaacccccaagcaaccctagctctccctccccctccgcgtcctacagccatcgtcgctctgccttccgcccccgccgtcgccgcagacgcagccggccacccaccactcgcgcctcccccaccgcgtcgcgtgtgggccacagctacagctgcctcctcgagcaacccacactcctttcttcccctgcctgtcgtctctcttccaccttccaccacaagcgccgtcgcagccggtgcctgctccttcccgatccccgaggcaaagctgcgactccgcaactgccgccatggcgttcgagaagatcaaggtctccaacccaatcatcgagatggacggcgatgagatgaccagggtattctggcagtctatcaaggacaagcttatcttcccatttctggacctggacatcaagtactatgatttggggatactgcacggtgaagcaactgatgacaaggtcacagtggaggctgcagaggctactctcaagtacaatgtggctattaagtgtgcgaccattactccaggtgaaactagaagaacgtatgaagctagacttgttgcaatttatagacatgtaagagaggatggagttgagggacaacctatttctgtttcaacagaacaatttgcaccttgttgataacaataattgatctgggcctcttccaccagaattagtagatacacgtagtcttcttgctatcttgacttcaggctgataataacaacttcagtggaagctccatcctgctgaatacaacaacatacaaacacttctaaagctgtgggtccacagggcgggtgtcgctcacgtgctccatcaagaacatcgagtgaggtggtgtgctgctgctctaaagaagggaggagaggaagtagcgacaatgtcgccaagaccacctggcgcgatgtctcctaccagatcaccaagatcaacatgtacaaggatggtcggcatgtacaagatatgcttaagaggctccataaagcagctctgctagaattaactgattcactgtcaaggtcaaacatcactatgatattgctgagatggtccaatcagtgacaatgctggtggtattgttgagatggcaggaatgagccacaaaatctgagagaacttatgctcttggtgctgctgacaacacaactgttgctattagaaagggatttgccattggttcaggtgctcttgtgtccctggtgctgtttggtgccttcgttagcagagctggagtgaaggttgtcgatgttctctcctgaaggttttcattggtttgattgttggagacatgtttttgtactggttctctgtcatgaccatgaagagtgttggaagtgtcgccctaaagatggtggaggaggttcgcaggcagttcaacaccattcttgggttgatggagtgaacaagcaagcctgactatgcaacctatgtgaagatttgcactgatgcttcttccatcaaggagatgattccttggggtgctctggtcatgctgactccctcattgatggaacctctttggcatcgagactctctctggcgtttttgctggtgccctggtttttggagtgcagaacaaggccatctcagataaaagtagatgtagctttcataggacttaattccagcaaagcaaaggttggcagtgcaccaaacaatagcgtttatacttcattcttatggattggagaagcctatgcaacatgtcaagccagatgacatgcagatgagaaggttctgcatcaatagaaaccagagaaaaatctgtatgtgtctgtatgacatctcagataaagcctgatgatcagcatgatgaaaggtggggagttctatagctggtttaagctggagctagcttctgaagtccggtcaggtgtctgtatgtgttgcccctttttatttcatttcatgagaaaagattgttatttgttccttgaactgtacttggtcgtacttgtgaataaatattttagcatggttgttcgacttctcataatgtttattcgacatcagttcatgatattagtgttacgtgatattttatcatatgaatttt

SEQ ID NO: 213502 - DNA, 3206 bp, Zea Mays
tgcctcctctggttctgcctcccgttaatctacgccgtccacgcgcgttaatctgcaccgtccgtcatgcgtacgttttcgaccgtcgcccccgtgaatcactccctgccccacaacccccaagcaaccctagctctccctccccctccgcgtcctacagccatcgtcgctctgccttccgcccccgccgtcgccgcagacgcagccggccacccaccactcgcgcctcccccaccgcgtcgcgtgtgggccacagctacagctgcctcctcgagcaacccacactcctttcttcccctgcctgtcgtctctcttccaccttccaccacaagcgccgtcgcagccggtgcctgctccttcccgatccccgaggcaaagctgcgactccgcaactgccgccatggcgttcgagaagatcaaggtctccaacccaatcatcgagatggacggcgatgagatgaccagggtattctggcagtctatcaaggacaagcttatcttcccatttctggacctggacatcaagtactatgatttggggatactgcacggtgaagcaactgatgacaaggtcacagtggaggctgcagaggctactctcaagtacaatgtggctattaagtgtgcgaccattactccaggtgaaactagaagaacgtatgaagctagacttgttgcaatttatagacatgtaagagaggatggagttgagggacaacctatttctgtttcaacagaacaatttgcagtaagtcaaatcacctcttgtactataatcttgcaattgtttctttctctctcttttctaagaataactattgcattagcatattttactaacttgtataaattgttattttcaagagattttatgtaccgtttctttacaaacaatgctaatgccacatccacaatcttgcagaactttgaatggcaaccagttatctggatctttgcctgatgagattggttaccagatgaactttaacagattagaaataaaatataacaacatatcaggcccatacctaacacttttgccaacttaacaagaattaaacatctgttagtgtcgagtatctttattttctgcccatccctgatgcttctgatttgtaaaattagtaaataattctggttccaattttaccttttagtcacatgaataataactcattacaaatcccatctgagttgtccaacttgccttaactccttcatttgtaagtagacctcaactttttctaatattttctattttgcaagttgcagatgacttgtaagttgacatgtcttgtgctgtgaacttgcagccttgttgataacaataattgatctgggcctcttccaccagaattagtagatacacgtagtcttcttgctatcttgactgtaagtacatttttctgcagcacaatgttaaggatttgtacttgttcatgatatcttgaggttcctctggctctagatgtttaagaaatttaagtaatatacaccaatttcatgagtacacttcacttgcttatgtaaatctaatggcatgctaaggagataatgatccaggcctttgtctttgattttttttgtttattctgtatagattagacttttttgttatctatgacaaatatttctcatatctatgtatctgtgtacttatagtcaggctgataataacaacttcagtggaagctccatcctgctgaatacaacaacatacaaacacttctaaagctgatattagttgtcaaatattttagtactaatattgagggggatggcggagggcattgcgctgcggggttacatcgccgtcaccttcgacatgcgcgacataggtgggtccacagggcgggtgtcgctcacgtgctccatcaagaacatcgagtgaggtggtgtgctgctgctctaaagaagggaggagaggaagtagcgacaatgtcgccaagaccacctggcgcgatgtctcctaccagatcaccaagatcaacatgtacaaggtgatccagtccgagccctctccctgcatgcttccattgattttttatttcattccaatcgatttgccgtgatatatgcaatgcaggatggtcggcatgtacaagatatgcttaagcatcagaggctccataaagcagctctgctagaattaactgattcactgtcaaggtcaaacatcactatgatattgctgagatggtccaatcagtgacaatgctggtggtattgttgagatggcaggaatgagccacaaaatctgagagaacttatgctcttggtgctgctgacaacacaactgttgctattagaaagggatttgccattggttcaggtgctcttgtgtccctggtgctgtttggtgccttcgttagcagagctggagtgaaggttgtcgatgttctctcctgaaggttttcattggtttgattgttggagacatgtttttgtactggttctctgtcatgaccatgaagagtgttggaagtgtcgccctaaagatggtggaggaggttcgcaggcagttcaacaccattcttgggttgatggagtgaacaagcaagcctgactatgcaacctatgtgaagatttgcactgatgcttcttccatcaaggagatgattccttggggtgctctggtcatgctgactccctcattgatggaacctctttggcatcgagactctctctggcgtttttgctggtgccctggtttttggagtgcagaacaaggccatctcagataaaagtagatgtagctttcataggacttaattccagcaaagcaaaggttggcagtgcaccaaacaatagcgtttatacttcattcttatggattggagaagcctatgcaacatgtcaagccagatgacatgcagatgagaaggttctgcatcaatagaaaccagagaaaaatctgtatgtgtctgtatgacatctcagataaagcctgatgatcagcatgatgaaaggtggggagttctatagctggtttaagctggagctagcttctgaagtccggtcaggtgtctgtatgtgttgcccctttttatttcatttcatgagaaaagattgttatttgttccttgaactgtacttggtcgtacttgtgaataaatattttagcatggttgttcgacttctcataatgtttattcgacatcagttcatgatattagtgttacgtgatattttatcatatgaatttt

SEQ ID NO: 213503 - DNA, 2700 bp, Zea Mays
gacatgtagctatactactatattaaggctctaagggtagcctgcctcctctggttctgcctcccgttaatctacgccgtccacgcgcgttaatctgcaccgtccgtcatgcgtacgttttcgaccgtcgcccccgtgaatcactccctgccccacaacccccaagcaaccctagctctccctccccctccgcgtcctacagccatcgtcgctctgccttccgcccccgccgtcgccgcagacgcagccggccacccaccactcgcgcctcccccaccgcgtcgcgtgtgggccacagctacagctgcctcctcgagcaacccacactcctttcttcccctgcctgtcgtctctcttccaccttccaccacaagcgccgtcgcagccggtgcctgctccttcccgatccccgaggcaaagctgcgactccgcaactgccgccatggcgttcgagaagatcaaggtctccaacccaatcatcgagatggacggcgatgagatgaccagggtattctggcagtctatcaaggacaagcttatcttcccatttctggacctggacatcaagtactatgatttggggatactgcacggtgaagcaactgatgacaaggtcacagtggaggctgcagaggctactctcaagtacaatgtggctattaagtgtgcgaccattactccaggtgaaactagaagaacgtatgaagctagacttgttgcaatttatagacatgtaagagaggatggagttgagggacaacctatttctgtttcaacagaacaatttgcagtaagtcaaatcacctcttgtactataatcttgcaattgtttctttctctctcttttctaagaataactattgcattagcatattttactaacttgtataaattgttattttcaagagattttatgtaccgtttctttacaaacaatgctaatgccacatccacaatcttgcagaactttgaatggcaaccagttatctggatctttgcctgatgagattggttaccagatgaactttaacagattagaaataaaatataacaacatatcaggcccatacctaacacttttgccaacttaacaagaattaaacatctgttagtgtcgagtatctttattttctgcccatccctgatgcttctgatttgtaaaattagtaaataattctggttccaattttaccttttagtcacatgaataataactcattacaaatcccatctgagttgtccaacttgccttaactccttcatttccttgttgataacaataattgatctgggcctcttccaccagaattagtagatacacgtagtcttcttgctatcttgacttcaggctgataataacaacttcagtggaagctccatcctgctgaatacaacaacatacaaacacttctaaagctgtgggtccacagggcgggtgtcgctcacgtgctccatcaagaacatcgagtgaggtggtgtgctgctgctctaaagaagggaggagaggaagtagcgacaatgtcgccaagaccacctggcgcgatgtctcctaccagatcaccaagatcaacatgtacaaggatggtcggcatgtacaagatatgcttaagcatcagaggctccataaagcagctctgctagaattaactgattcactgtcaaggtcaaacatcactatgatattgctgagatggtccaatcagtgacaatgctggtggtattgttgagatggcaggaatgagccacaaaatctgagagaacttatgctcttggtgctgctgacaacacaactgttgctattagaaagggatttgccattggttcaggtgctcttgtgtccctggtgctgtttggtgccttcgttagcagagctggagtgaaggttgtcgatgttctctcctgaaggttttcattggtttgattgttggagacatgtttttgtactggttctctgtcatgaccatgaagagtgttggaagtgtcgccctaaagatggtggaggaggttcgcaggcagttcaacaccattcttgggttgatggagtgaacaagcaagcctgactatgcaacctatgtgaagatttgcactgatgcttcttccatcaaggagatgattccttggggtgctctggtcatgctgactccctcattgatggaacctctttggcatcgagactctctctggcgtttttgctggtgccctggtttttggagtgcagaacaaggccatctcagataaaagtagatgtagctttcataggacttaattccagcaaagcaaaggttggcagtgcaccaaacaatagcgtttatacttcattcttatggattggagaagcctatgcaacatgtcaagccagatgacatgcagatgagaaggttctgcatcaatagaaaccagagaaaaatctgtatgtgtctgtatgacatctcagataaagcctgatgatcagcatgatgaaaggtggggagttctatagctggtttaagctggagctagcttctgaagtccggtcaggtgtctgtatgtgttgcccctttttatttcatttcatgagaaaagattgttatttgttccttgaactgtacttggtcgtacttgtgaataaatattttagcatggttgttcgacttctcataatgtttattcgacatcagttcatgatattagtgttacgtgatattttatcatatgaatttt

SEQ ID NO: 213504 - DNA, 2219 bp, Zea Mays
tacgactctgcctggactctcaagaacgtcagtgcgcatgcagctcggaaaacaggtggccgagcggaccactggttccgtcaaacagggagctcgtgcaggcaccgaatccatggcgatgagatgaccagggtattctggcagtctatcaaggacaagcttatcttcccatttctggacctggacatcaagtactatgatttggggatactgcacggtgaagcaactgatgacaaggtcacagtggaggctgcagaggctactctcaagtacaatgtggctattaagtgtgcgaccattactccaggtgaaactagaagaacgtatgaagctagacttgttgcaatttatagacatgtaagagaggatggagttgagggacaacctatttctgtttcaacagaacaatttgcaatgacttgtaagttgacatgtcttgtgctgtgaacttgcagccttgttgataacaataattgatctgggcctcttccaccagaattagtagatacacgtagtcttcttgctatcttgacttcaggctgataataacaacttcagtggaagctccatcctgctgaatacaacaacatacaaacacttctaaagctagtgagaaatccgctactcaattcacatcaggatattagttgtcaaatattttagtactaatattgagggggatggcggagggcattgcgctgcggggttacatcgccgtcaccttcgacatgcgcgacataggtgggtccacagggcgggtgtcgctcacgtgctccatcaagaacatcgagtgaggtggtgtgctgctgctctaaagaagggaggagaggaagtagcgacaatgtcgccaagaccacctggcgcgatgtctcctaccagatcaccaagatcaacatgtacaaggtgatccagtccgagccctctccctgcatgcttccattgattttttatttcattccaatcgatttgccgtgatatatgcaatgcaggatggtcggcatgtacaagatatgcttaaggtgaggttgtaattcaggatgtgcatatatttcttgggcttgaatttgtttaatctaaatagattattttttatccaatccaaatttccaatgacttgccatatcattagcatcagaggctccataaagcagctctgctagaattaactgattcactgtcaaggtcaaacatcactatgatattgctgagatggtccaatcagtgacaatgctggtggtattgttgagatggcaggaatgagccacaaaatctgagagaacttatgctcttggtgctgctgacaacacaactgttgctattagaaagggatttgccattggttcaggtgctcttgtgtccctggtgctgtttggtgccttcgttagcagagctggagtgaaggttgtcgatgttctctcctgaaggttttcattggtttgattgttggagacatgtttttgtactggttctctgtcatgaccatgaagagtgttggaagtgtcgccctaaagatggtggaggaggttcgcaggcagttcaacaccattcttgggttgatggagtgaacaagcaagcctgactatgcaacctatgtgaagatttgcactgatgcttcttccatcaaggagatgattccttggggtgctctggtcatgctgactccctcattgatggaacctctttggcatcgagactctctctggcgtttttgctggtgccctggtttttggagtgcagaacaaggccatctcagataaaagtagatgtagctttcataggacttaattccagcaaagcaaaggttggcagtgcaccaaacaatagcgtttatacttcattcttatggattggagaagcctatgcaacatgtcaagccagatgacatgcagatgagaaggttctgcatcaatagaaaccagagaaaaatctgtatgtgtctgtatgacatctcagataaagcctgatgatcagcatgatgaaaggtggggagttctatagctggtttaagctggagctagcttctgaagtccggtcaggtgtctgtatgtgttgcccctttttatttcatttcatgagaaaagattgttatttgttccttgaactgtacttggtcgtacttgtgaataaatattttagcatggttgttcgacttctcataatgtttattcgacatcagttcatgatattagtgttacgtgatattttatcatatgaatttt

SEQ ID NO: 213505 - DNA, 1139 bp, Zea Mays
atcggacggctgcggcctcaattgctgatcggatcgcggccgctggaaatctgcgtgactgcgtctatactgcgcaggcacgagcgtttgtgttgcggcgaggttttcgtgcggccgctgcggtgacaagcaggtcctccctcaagctcgcggcggatcagcgaccgatcgacccgtcttcctcggttcctcatccatcccgggcatccggattccggtgagcggaggaaggcgccatgaaagctgcggaggacgccacgcgctgccctcagatcccccggcgttgccaccactgtgccgggccactctccaaggacatgctggacagtacctccgttggttcgagatagcttctccatgattggttcggctcttgggggtatagcaggagcgttttatggtttcaaccatgttatgcctgttgttcgacgtcacattaagggcccaatgtggatgcatttttttgttggtgcaccaccagttattgtgttctcttctgcatgtgctggattagcaggtggtacaataccagccaccgcacagctggtttcatcatcctgtcatgccgtgtcatcgcactcctttgcccgctcttcgcgtgtaccaacacatgcaccctccttcgcccccgctgcatctcatgacgacatgcgcaagacaagaagctcctcaccgttgtaagttatcgggtacaacagttcctctacataactccgcctgccttgagaaactaccctattatttaactatgcaagactcatcccatcctactctatcaaacacgaatgttttatcgctccttgccctgtttaatcagggatgccactgtacatggtaaatttctctctctcgtggacagatgctacacgtgccctgtttataaattttggatatatcttgatgtatagctagcattgggcaatgtttcgtggttcaataaaacttcgtgacgtgaccagtgttacactgagctgatgttcttttgagacattccagccctcgaagatattgttttgctcgatggcattgtgactgcattcagtatttacatgaaaaatgccagctatttgttattggttgataactgtgatctcatcgccttcgttagatttccagtggtgagatgtcagagggttgtt

SEQ ID NO: 213506 - DNA, 874 bp, Zea Mays
ttatccaccccgtcgcagtggttcctttccaaacggccaaaccactcccctcttccccagttccccttgtcctttgcgcaggggaaaaggagcgccgcagaccgagggacggcgacgaggtatccaatggccgaccctgacgtgatcgaagtgaccttcggcaacgacgtgattaacaccaccgtcacatcctccggccaggctgtggagcgctggatcgcggagatcctcgcgttgcaccgccccggcagcaacggctacagcatcatcgtcgggcttgacgttgagtggcgcccaagcttcggcccgcaccagaacccggtggccacactgcagctctgcgtcggacacagctgcctcatcttccagctcctctacgccgactacgtccccggcgcgctggcggagttcctcggcgaccgcgggatccgcttcgtcggcgtcggcgtggaggcggacgcggagcggctcagcgacgaccatgagccgctgggacgcgtcctgcctcagctacgagcagatcaagtacgcctgcatcgacgccttcgtctctttcgaggtcgcccgcaggctgcttggcggcgcgtactgatcgacgcgacaatttgtgctagtgtgctcagacttcagatttggttgttgctgcatttcgggctacaaggttgtaggggtttctgtgatcgaggagaattattcagacagtcatgtactgcgttcctggtttgtcgctgcttttggcgtacagagtcgcattgagcatttgagatcatgcttgtgatttggggcttttgtgtcgatcgaggctggacagccttaaaccttttgctgattactgagttgccttaaaccttgctgaccagttgtttttcatttt

SEQ ID NO: 213507 - DNA, 1845 bp, Zea Mays
aacccccccgcgcgcttgtctccttcccccggccatctccggcaccggatttttcgtcgccgccttgtcctggccccttccgcgaagacccattcccacacaccctttatgccaacttgccgcccccgcggattcgcgcgcaccgcggtcggtgtctaggcttgattggccctggcccaggagcacggcgaaaggcggcgtcttggtgtgaagcggccgcgctggattggttgccgccggtggtgctgatcgttgggcgtgtttgagagcgcgccgaaggctctgccttgtggggagcggtcgacaggttagggataggcggggggagtggggtcgtcgtgaaggaggcagcagcggttcgcgtggatcgaggaagggattttattgcgttgggatttggtaggtggtggcgctgctcttgccgttcttggcatgagcgttggagatggggacggactactacaatgtgctcaaggtgaaccggaacgccacggaggaggacctcaagaagtcgtaccgccggctggccatgaggtggcaccccgacaagaaccctggcgacgtcaagaaggaagccgaggccaaattcaagaagatctccgaggcctacgaggttctgagtgatccgcagaagagggcggcgtacgatcagtacggcgaggaaggcctgaaggcctccgcagacggcggtggtggtggtggtggttccacgtccacgaacggggccgccaaccaacgcttcaaccctcgcaacgccgaagacgtgttcgccgagttctttggcagcaacaagccgttcgagaacatggggcgagccaagtcaatgaggttccagacagaaggcgctggcaccttcggtgggttcggtgggaacgagagcaagttcagaccatacaacaacgattcggccggcaccggctccagtcaggctcggaagccgccgcccgtggagaccaaactgccctgcacgctcgaagagctgtacgcaggctcagcacgcaagatgaagatctccaggaacgttgtgaagccgaatgggcaactagggaccgaatcggagattctaacgatcgatataaagcccggctggaagaaggggaccaagatcacgttcccggacaagggcaacgagcagccgaaccaactccccgccgacctcgtcttcgtcatcgacgagaaaccccatgacctgtacacgagagagggcaacgacctcctggtccaccggaagatcgatctggtggacgcgttggcaggaacgacggtcagcctgaagacgctcgacgggcgtgacctggtgattaggctcacggacgtggtgacacctgggtacgagcttgtggtcgccaaggaggggatgcctatcgtcaaggagaacgggaggagaggcaacctgaggatcaagttcgacgtcggtttccctaagaggttgtcgtcggagcagcggcacaccattcggaaggttcttggaggccagcctcagcagcagtgagcacaggcgttcgaaacaagattgtctgccccttattggctacccatgcaatgcagatttgcagactagttcagatgttcttctctttcttcggctggcttgtactgtatgtttagttgttttttcctttgtggtgttttctgatcttcttctcccttgttggaaaaaatggtggtattgaagaccacaggtgtaatacaagaatgctgtctttgtgtcttcatttacatgtttcagatatcgtttggttcacatatttgtaagtaacagataacattagatcatgtttgtttagctctaatcgtaatgagatgccacactagaaattaataccaacatatttaaacttgtta

SEQ ID NO: 213508 - DNA, 1740 bp, Zea Mays
cagagacccttaaaaagagagagacagagagagagagaggagccagctccgtctctctcgcgctcgctcctggtctcgtggccttgttgttccgtgcccaattccagttccaggggtataggagcaggatctcctctcgcgaacaacccagtaaacaactccgcacagcatgaggccaccgccacctccattgccgtccctgcgctcttccgtcttggtcctcgtcctgctgccgctgctggccgcgtgctcgtccccggccagtgggagggccgtgccgttgtctcctgggaccgcctccgttgctcccgcgccgcctcccgtcgacaccgcgagggggatcatgctggcgccgatcctcagcaagttcaactcgctcaagacgagcaggaagggggttgtggcgatggcgatgatcgagtacccgtcgctggaggcggcgacagggaagttcagcgcgagcaacgtgctcggtgtcggcggcttcggttgcgtctacaaggcagttttcgatggcggtgtcgccgcggcggtcaagaggctggaagcaggcggccctgaatgcgagaaggaattcgagaatgagctggatttgctcggcaggattcggcaccccaacattgtgaccctgctgggcttttgtgttcacgaggggaatcactacattgtttatgagctcatgcacaagggatccctggacacacagctgcatggggcttcacgtggatcagccctgagctggcatgtccggatgaagatcgcactcgacatggccagggggttagagtatctccatgagcactgcagtccaccagtgatccatagggatctgaagtcatctaacatacttttagattctgacttcaatgctaagatttcagattttggtcttgcagtgaccagtgggaatattgacaagggaagcatgaagctttctgggactttaggttacgtggctccagagtacctattagatgggaagctgactgaaaaaagcgatgtatacgcatttggagtggtgcttcttgagctactaatgggaaggaagcctgtcgagaagatgagtcaaactcagtgccaatcaattgtgacatgggccatgccgcagctgactgaaagaacgaaactccccaacatagttgacccagtgatcagggacacgatggacccaaagcatctgtaccaagtggcagcagtggcggttctctgtgtgcaaccagaaccaagttacaggccgctgattactgatgttctccactcccttgtccctttagtgcccgtggagctcggagggacgttgagggttgcagagccaccttccccaaacctaaaacattctgcttgttgagatgtcatggtcggtcgaagatgacagttacgtgctgatgagcttggacgatgcttatcagtaacttatcactctagctgtgtgccagaggatgacggttccaacctgccggtcgctgagaattctggtttgcaaagagttgtctcctatgtctttgcttgtacaaagaagtgaaagaagcaacaccctttcccttagaatttagggtccttctgtacagatcaaagtttctccaacactataacataaagaatttgagaacgacgtgcataaagaatttgagaatgacgtgctttgggttccacaggggtacccgagcacctttgctttgctgcaatattttgcttcctatcgtactctgataaaactgaaaatgttctcatgtttgtgcc

SEQ ID NO: 213509 - DNA, 2687 bp, Zea Mays
ggaacggccacgacacctcacgacgacggggagggcgagtgcatgatgagacagccagacccgcgcccgccatgcatgcgtcacccgagcagcttgcaatcgccagccacccttcttccttcctcctcctcctccctcctccatccgccttgtctccgccctagctcctccgcaatctcctgatcgaggccgccgccgtctccgaggccgccggcgctagctgcagggccgcgcgctcggcagattagttccacatgtcgtccgcagccgtgtcgggcagcggcggcgccgccgccgcggcggacggcggcgtggagggcgcgccggcgctgtcggcgtcggcgtcgcgcacgtcgtcgctgcggcaccgcgcgatgagcgcgtcgtcgaagctgctgcggagctcgctgagccgcaagtcgatggggcggcgcagcagcaaggtgatgtcggtgtcgatcgaggacgtgcgcgacgcggaggatatgaagcaggtggacgcgttccggcagacgctggtgctggaggagctgctgccggcccgccacgacgactaccacatgatgctccggttcctgcgcgcgcgcaagttcgacatcgagaagtcgaagcagatgtggtcggacatgctgcagtggcgcaaggagttcggcgccgacaccatcatcgacgagttcgtgttcgaggagatggaccaggtgctggagcactacccgcagggccaccacggcgtggacaaggacggccggcccgtgtacatggagaagctggggcagatcgacaccaccaagctgctgcaggtcaccagcatggaccgctacgtgcagtaccacgtgagggagttcgagcgcgccttcgccgtcaagttccccgcctgctccatctccgccaagaagcacgtcgaccagagcaccaccatccttgacgtctccggcgtggggtacaagaacttcaacaaggccgcgagggacctcatcggacgcctccagaagatcgacggagacaactaccctgagacgctgtgccggatgttcatcatcaacgcggggcaagggttcaggcttctctggaacaccgtcaagtcgttcctggaccccaagaccacggccaagatccatgtccttggcaacaagtaccagagcaagctcctggaagtgatcgatgccagcgagctgcccgagttcttcggcggcacttgcaactgcgagggcggctgcatgcgctccgacaaagggccatggaaggaccctgagatcctcaagatggtccaatgcggcatggggagatgcgggatgaacagcggggaccctcgcgacgccgacgagaagctcatcaccgaggacgaaatagtgcccgttcccaagaagcaagactccatgcgccgcaacgccgtggattcccccaaggtggcgcgcgagaagatcgagcacccgcagatgtccccgctccacgagatgaagaccgccagcgacccggaccctgccgccaaggacagcttcgacggcggcgggctgttccccggcgtggacaggggcatggacttcaactggagcggcgaggtgagcgaggagaagctgcagatcgcgcgggacatgtacgcgcagctgccggacgcgtacaagcagggggacgcgggagaccggcaggtggtgtcggggttcatggcgctggtgatgggcgtggtggccatgttccgggtgggcaagatcgcgccgaagcgggccatggacgcggccatgggcatcgccaccatggaggccatggccaagaagacgcggcagatgcagatgcagcagcagctgcagctgggcgggcccgacgccgtcgtggtgtcggcggcgcagtaccaggcgctggtcaagcgcgtggacgacctggaggccaaggtggcggcgctggcgtcgggcccgcccgaggtgccgcccgagctggaggagtcgatcaaggccgccgccgcccgcgtcgacgcgctcgagacggagctcgacgccaccaagaagctactcgagacgtcgtccgcccagcaggaggaggtcctggcgtacatcgagaagaagaagaagaagcgagggatgcagaacccgttccgatggtgacgcgccagggggggaagggcgatggcgcggtgcatgatccagtgatcaggcggcccttggacccccaatacatttttttcttatagaaagccaatcttttgttccaaggacattcataggaaatgagatttcaatcctctgtaactacatttcccttccgaacgaagggggcctaagcctctcgttgtcctgctgtaacaagcaaatcaattgtatcttgactgcgctataataacaaccaaatgcagacaagaaacaggggggccaagccgctcgttgtcctgatgtaacaagcaagagtactgtatcttgactggatataataagacctcctaaagttgttaattacttttagtccttaaactgctaaacagtatgactcaataaagccttccaaatagaaattctaggaaaagtttagtacctaaaatttagtaaggacgtgcttgttttcttcagaattatataatccagtttatgaattatataagtacctattgagctgtttatggattatcataatctatgtatctagattacataatccatctaataatctgaattctttatttacctttaaacttatttaag

SEQ ID NO: 213510 - DNA, 2102 bp, Zea Mays
gaaatagctagtggaacggccacgacacctcacgacgacggggagggcgagtgcatgatgagacagccagacccgcgcccgccatgcatgcgtcacccgagcagcttgcaatcgccagccacccttcttccttcctcctcctcctccctcctccatccgccttgtctccgccctagctcctccgcaatctcctgatcgaggccgccgccgtctccgaggccgccggcgctagctgcagggccgcgcgctcggcagattagttccacatgtcgtccgcagccgtgtcgggcagcggcggcgccgccgccgcggcggacggcggcgtggagggcgcgccggcgctgtcggcgtcggcgtcgcgcacgtcgtcgctgcggcaccgcgcgatgagcgcgtcgtcgaagctgctgcggagctcgctgagccgcaagtcgatggggcggcgcagcagcaaggtgatgtcggtgtcgatcgaggacgtgcgcgacgcggaggatatgaagcaggtggacgcgttccggcagacgctggtgctggaggagctgctgccggcccgccacgacgactaccacatgatgctccggttcctgcgcgcgcgcaagttcgacatcgagaagtcgaagcagatgtggtcggacatgctgcagtggcgcaaggagttcggcgccgacaccatcatcgacgagttcgtgttcgaggagatggaccaggtgctggagcactacccgcagggccaccacggcgtggacaaggacggccggcccgtgtacatggagaagctggggcagatcgacaccaccaagctgctgcaggtcaccagcatggaccgctacgtgcagtaccacgtgagggagttcgagcgcgccttcgccgtcaagttccccgcctgctccatctccgccaagaagcacgtcgaccagagcaccaccatccttgacgtctccggcgtggggtacaagaacttcaacaaggccgcgagggacctcatcggacgcctccagaagatcgacggagacaactaccctgagacgctgtgccggatgttcatcatcaacgcggggcaagggttcaggcttctctggaacaccgtcaagtcgttcctggaccccaagaccacggccaagatccatgtccttggcaacaagtaccagagcaagctcctggaagtgatcgatgccagcgagctgcccgagttcttcggcggcacttgcaactgcgagggcggctgcatgcgctccgacaaagggccatggaaggaccctgagatcctcaagatggtccaatgcggcatggggagatgcgggatgaacagcggggaccctcgcgacgccgacgagaagctcatcaccgaggacgaaatagtgcccgttcccaagaagcaagactccatgcgccgcaacgccgtggattcccccaaggtggcgcgcgagaagatcgagcacccgcagatgtccccgctccacgagatgaagaccgccagcgacccggaccctgccgccaaggacagcttcgacggcggcgggctgttccccggcgtggacaggggcatggacttcaactggagcggcgaggtgagcgaggagaagctgcagatcgcgcgggacatgtacgcgcagctgccggacgcgtacaagcagggggacgcgggagaccggcaggtggtgtcggggttcatggcgctggtgatgggcgtggtggccatgttccgggtgggcaagatcgcgccgaagcgggccatggacgcggccatgggcatcgccaccatggaggccatggccaagaagacgcggcagatgcagatgcagcagcagctgcagctgggcgggcccgacgccgtcgtggtgtcggcggcgcagtaccaggcgctggtcaagcgcgtggacgacctggaggccaaggtggcggcgctggcgtcgggcccgcccgaggtgccgcccgagctggaggagtcgatcaaggccgccgccgcccgcgtcgacgcgctcgagacggagctcgacgccaccaagaagctactcgagacgtcgtccgcccagcaggaggaggtcctggcgtacatcgagaagaagaagaagaagcgagggatgttttgcctccaacag

SEQ ID NO: 213511 - DNA, 2491 bp, Zea Mays
gacgcatccataaagatatcccgcaccgaatttcccccaatttccggaggaggacgctgccggctgccccaccccgtcccctaccttcgtagttcctccctctttttctctctctctccttcatcagcttcgccctccacctccatcctcttctttactttaaagttactcccactagccccagcccccgcgccgtcccatcacccccaatcccagccttctcctcctcgacgacaccacacgcccccaaaaaatcccccttcgcctcggattcccacgcggccctcgagtcgccggcgcccgccgacgccacagcgaggtggttccgttcaaggcttgggaggcggaagtagggagcgggaggatccgttcgcgtccagcgcccgttgacgcgcccatgtcgggccacctcgatcgcttcgcgcggccatgttttgaagggcgctcaagtcatgatgaatgcagagaccataagtcagactttgaagtctctgaagacgaaaagaagaccagaatgggctctttgaagaaaaaagcaatagatgcatcaactaagattaggcattcattaaagaagaacaggaggaagagtggtagccgggtcctttctgtgtctattgaggatgtgcgtgatctagaggagctgcaagctgttgaagcatttagacaagcactactcttggatgagctgttgcctgcaagacacgatgactatcatatgatgctgagatttctaaaagcaaggaaatttgatatcgacaaagcaaagcaaatgtggatggatatgcttcattggcggagggagtatggcactgatacgattttggaggacttcgaatacactgagttggacgctgttttgcaatattatcctcatggttatcatggagttgacaaagaggggagacccgtttatattgaaaggcttggaaagcttgctctgttgctgcaaaaaggcacattgattccagcacaacaattctggatgtccagggcgtgggtttgaaaaatttcagcaaaactgcacgtgaattaattcagcgactgcagaaaattgacaatgataactacccagagactctataccaaatgtttattgtcaatgctggtccgggtttccggctactatggaacactgtgaagtcctttcttgatcccaaaactaccgccaagatacatgttcttgggaacaaataccaaagtaagctgcttgaaataattgacgccagtgaattgccggaattccttggtggcacttgtacctgtcctgaatacggaggctgccttaaggctgaaaagggaccatggaaggacccaaacatacttaagatagtccaaagtggtgaggttcattgtgctcgtcaaattgtaactatttccaatggtgaagaaaaaattattacttatgccaaaccgaagcaccattcaatgcgagggagtgacacatcaactgctgagtctggctcagaagctgacgatgctatctcccccaaagctctcagaagttacatacaacatcctaagttgaccccagttcgtgaagaggtcaaaattgtcagggctacgagcttttctactcgtctccctgaatatgatgtacctgttgttgacaaggctgtggatgctacatggagaagagagcagccacgaaagataccattcatgccccaagactcttctgtgaaaactatgtccaggccatctgattcctcctgggataagatcgttgcaactctgatggcttgtcttatggctattgtaatgttggttcgatcagtcaaagatcttgtcacaaggagattgccatataaaggcgggtcagaagaaatccactctacgctgtacccagaccccatccagaaagaggaattccgtcctccttctccgatccctggatttgctgaagccgacctgttcgccgtggtcttgcaaaggctgggagagcttgaagagaaggttcagatgcttcaagaaaagccttccgaaatgccttgcgagaaagaagagttgcttaacgccgctgtgcgtcgtgtcgatgcattggaagccgaactaattgtaacaaagaaggctttgcacgaggctcttatcaggcaagaggaactgcttgcgtacatcgaccgcaaagagattgccaaggctcagagaaagaagaaagcaatgctttgctactaggacaaggagggagatacttctgcttcctcagaggagatgccaaagatggcgcctgagatgtaaccagcgatccccttcattttcctgacacttgtgaatcttctacaagtttccgttgtaaatcgagaatattctgacatgaataaagtgttttttggcatcatgagctttgctgcctccggtcttgcaatctggttgttcgttgcagcataattggttggttggttgggtggccttagccgagccgataatatggccagctgttgactctaagcaggggcatggctcgtgctggaagagcgttggtgtgatggag

SEQ ID NO: 213512 - DNA, 2318 bp, Zea Mays
cccaccccgtcccctaccttcgtagttcctccctctttttctctctctctccttcatcagcttcgccctccacctccatcctcttctttactttaaagttactcccactagccccagcccccgcgccgtcccatcacccccaatcccagccttctcctcctcgacgacaccacacgcccccaaaaaatcccccttcgcctcggattcccacgcggccctcgagtcgccggcgcccgccgacgccacagcgaggttttgaagggcgctcaagtcatgatgaatgcagagaccataagtcagactttgaagtctctgaagacgaaaagaagaccagaatgggctctttgaagaaaaaagcaatagatgcatcaactaagattaggcattcattaaagaagaacaggaggaagagtggtagccgggtcctttctgtgtctattgaggatgtgcgtgatctagaggagctgcaagctgttgaagcatttagacaagcactactcttggatgagctgttgcctgcaagacacgatgactatcatatgatgctgagatttctaaaagcaaggaaatttgatatcgacaaagcaaagcaaatgtggatggatatgcttcattggcggagggagtatggcactgatacgattttggaggacttcgaatacactgagttggacgctgttttgcaatattatcctcatggttatcatggagttgacaaagaggggagacccgtttatattgaaaggcttggaaagcttgctctgttgctgcaaaaaggcacattgattccagcacaacaattctggatgtccagggcgtgggtttgaaaaatttcagcaaaactgcacgtgaattaattcagcgactgcagaaaattgacaatgataactacccagagactctataccaaatgtttattgtcaatgctggtccgggtttccggctactatggaacactgtgaagtcctttcttgatcccaaaactaccgccaagatacatgttcttgggaacaaataccaaagtaagctgcttgaaataattgacgccagtgaattgccggaattccttggtggcacttgtacctgtcctgaatacggaggctgccttaaggctgaaaagggaccatggaaggacccaaacatacttaagatagtccaaagtggtgaggttcattgtgctcgtcaaattgtaactatttccaatggtgaagaaaaaattattacttatgccaaaccgaagcaccattcaatgcgagggagtgacacatcaactgctgagtctggctcagaagctgacgatgctatctcccccaaagctctcagaagttacatacaacatcctaagttgaccccagttcgtgaagaggtcaaaattgtcagggctacgagcttttctactcgtctccctgaatatgatgtacctgttgttgacaaggctgtggatgctacatggagaagagagcagccacgaaagataccattcatgccccaagatgcagactcttctgtgaaaactatgtccaggccatctgattcctcctgggataagatcgttgcaactctgatggcttgtcttatggctattgtaatgttggttcgatcagtcaaagatcttgtcacaaggagattgccatataaaggcgggtcagaagaaatccactctacgctgtacccagaccccatccagaaagaggaattccgtcctccttctccgatccctggatttgctgaagccgacctgttcgccgtggtcttgcaaaggctgggagagcttgaagagaaggttcagatgcttcaagaaaagccttccgaaatgccttgcgagaaagaagagttgcttaacgccgctgtgcgtcgtgtcgatgcattggaagccgaactaattgtaacaaagaaggctttgcacgaggctcttatcaggcaagaggaactgcttgcgtacatcgaccgcaaagagattgccaaggctcagagaaagaagaaagcaatgctttgctactaggacaaggagggagatacttctgcttcctcagaggagatgccaaagatggcgcctgagatgtaaccagcgatccccttcattttcctgacacttgtgaatcttctacaagtttccgttgtaaatcgagaatattctgacatgaataaagtgttttttggcatcatgagctttgctgcctccggtcttgcaatctggttgttcgttgcagcataattggttggttggttgggtggccttagccgagccgataatatggccagctgttgactctaagcaggggcatggctcgtgctggaagagcgttggtgtgatggag

SEQ ID NO: 213513 - DNA, 2417 bp, Zea Mays
ctaccttcgtagttcctccctctttttctctctctctccttcatcagcttcgccctccacctccatcctcttctttactttaaagttactcccactagccccagcccccgcgccgtcccatcacccccaatcccagccttctcctcctcgacgacaccacacgcccccaaaaaatcccccttcgcctcggattcccacgcggccctcgagtcgccggcgcccgccgacgccacagcgaggtggttccgttcaaggcttgggaggcggaagtagggagcgggaggatccgttcgcgtccagcgcccgttgacgcgcccatgtcgggccacctcgatcgcttcgcgcggccatgttttgaagggcgctcaagtcatgatgaatgcagagaccataagtcagactttgaagtctctgaagacgaaaagaagaccagaatgggctctttgaagaaaaaagcaatagatgcatcaactaagattaggcattcattaaagaagaacaggaggaagagtggtagccgggtcctttctgtgtctattgaggatgtgcgtgatctagaggagctgcaagctgttgaagcatttagacaagcactactcttggatgagctgttgcctgcaagacacgatgactatcatatgatgctgagatttctaaaagcaaggaaatttgatatcgacaaagcaaagcaaatgtggatggatatgcttcattggcggagggagtatggcactgatacgattttggaggacttcgaatacactgagttggacgctgttttgcaatattatcctcatggttatcatggagttgacaaagaggggagacccgtttatattgaaaggcttggaaagcttgctctgttgctgcaaaaaggcacattgattccagcacaacaattctggatgtccagggcgtgggtttgaaaaatttcagcaaaactgcacgtgaattaattcagcgactgcagaaaattgacaatgataactacccagagactctataccaaatgtttattgtcaatgctggtccgggtttccggctactatggaacactgtgaagtcctttcttgatcccaaaactaccgccaagatacatgttcttgggaacaaataccaaagtaagctgcttgaaataattgacgccagtgaattgccggaattccttggtggcacttgtacctgtcctgaatacggaggctgccttaaggctgaaaagggaccatggaaggacccaaacatacttaagatagtccaaagtggtgaggttcattgtgctcgtcaaattgtaactatttccaatggtgaagaaaaaattattacttatgccaaaccgaagcaccattcaatgcgagggagtgacacatcaactgctgagtctggctcagaagctgacgatgctatctcccccaaagctctcagaagttacatacaacatcctaagttgaccccagttcgtgaagaggtcaaaattgtcagggctacgagcttttctactcgtctccctgaatatgatgtacctgttgttgacaaggctgtggatgctacatggagaagagagcagccacgaaagataccattcatgccccaagatgcagactcttctgtgaaaactatgtccaggccatctgattcctcctgggataagatcgttgcaactctgatggcttgtcttatggctattgtaatgttggttcgatcagtcaaagatcttgtcacaaggagattgccatataaaggcgggtcagaagaaatccactctacgctgtacccagaccccatccagaaagaggaattccgtcctccttctccgatccctggatttgctgaagccgacctgttcgccgtggtcttgcaaaggctgggagagcttgaagagaaggttcagatgcttcaagaaaagccttccgaaatgccttgcgagaaagaagagttgcttaacgccgctgtgcgtcgtgtcgatgcattggaagccgaactaattgtaacaaagaaggctttgcacgaggctcttatcaggcaagaggaactgcttgcgtacatcgaccgcaaagagattgccaaggctcagagaaagaagaaagcaatgctttgctactaggacaaggagggagatacttctgcttcctcagaggagatgccaaagatggcgcctgagatgtaaccagcgatccccttcattttcctgacacttgtgaatcttctacaagtttccgttgtaaatcgagaatattctgacatgaataaagtgttttttggcatcatgagctttgctgcctccggtcttgcaatctggttgttcgttgcagcataattggttggttggttgggtggccttagccgagccgataatatggccagctgttgactctaagcaggggcatggctcgtgctggaagagcgttggtgtgatggag

SEQ ID NO: 213514 - DNA, 617 bp, Zea Mays
catgtgcgagcctccagcagtgggcttgtattcagcatttgtgttccagaagcctgatccagaggcaataccaccgattgtaactcccgacttgcctgatcctgataaaggtcacgaagaggtctggtctatttcttctgtgctcagtagctagttgtatgtttttattttctgtttcattggaaatgttgttggtctaacactttgactgaacagcaggagtggctccagccacagcaggcgtcagtggaagatgggagacgctcgcatgcggatgtgcttcccatagaccctgagaaaggcatcctgggtcctggacctgcagacatgaggctttagttgctggacattcaaatgcagctgagcctgggtagtgatttttttttccaccgtgggcattctcccatagtcccatgtggccatgtctcctttatgagtccacgaaaatagcgaacaacactacaaggctcatgaatcctgcacggacgcatgggctttcttgtaaaacaaatgctcgatacgtatgaccttgtacggtctttgatgtgtatatttgactgctcatactcagtaccattttttaattgcctaaattgtctagctgcaagacaacgaaa

SEQ ID NO: 213515 - DNA, 1446 bp, Zea Mays
atttggcccaaggttcaccgctttgcctcgttcccgttctcctcctcgcaactctctcgtccatacgtcgtagccgccgcctgtctctcaccgccgacatcccgacagctctcagcccagatcgagcttcccccttcccaaatcgggttctgcttgggctcccgccaccgccgccctacaccaggtgccaaggccttcgccgacctcttcgccggcgaagagcgcccagcaggtctgtgacctgtattgcgacggtggaatggatacagacaagtggtgtgatgcccaggttggccactacataggcatcgatgcctctgcatcgggtgtcaactatgcccgtgagctatgggagaacaggaggaaacctttcactgctgaattcatcgagttggatccttctgatgatggttttgaagctcaagtgcaggaaaagggcatccaagcagatatggtttgctgtatgcagcacttgcagttatgctttgagaatgaagaacaggcaaagaagcttctgaacaatgtatcatcacttctcaaacctggaggctacttctttggcataactccagattcatctacaatatggacaaaatatcaaaagaatgttgaggcttcacataataagggtttgaagactgttccaaatagcattcgctcagagaactataccattacctttgaagtcgaggaagagaagtttcccttttttggaaagaagtatcaactcaaattcgcgagtgacgcggtgtttgagaatcagtgcctggtccactttcccacccttatgagattatcaagggaagctggacttgaatatgtggagatccagaatttaaccgagttttatgatgataacagaacacaattcgctccaatgcttggtggttacggtgcaagttttttggatgctcgagggaagcttgttgctcgttcctacgacattttaggcttgtattcagcatttgtgttccagaagcctgatccagaggcaataccaccgattgtaactcccgacttgcctgatcctgataaaggtcacgaagaggagtggctccagccacagcaggcgtcagtggaagatgggagacgctcgcatgcggatgtgcttcccatagaccctgagaaaggcatcctgggtcctggacctgcagacatgaggctttagttgctggacattcaaatgcagctgagcctgggtagtgatttttttttccaccgtgggcattctcccatagtcccatgtggccatgtctcctttatgagtccacgaaaatagcgaacaacactacaaggctcatgaatcctgcacggacgcatgggctttcttgtaaaacaaatgctcgatacgtatgaccttgtacggtctttgatgtgtatatttgactgctcatactcagtaccattttttaattgcctaaattgtctagctgcaagacaacgaaa

SEQ ID NO: 213516 - DNA, 1548 bp, Zea Mays
atttggcccaaggttcaccgctttgcctcgttcccgttctcctcctcgcaactctctcgtccatacgtcgtagccgccgcctgtctctcaccgccgacatcccgacagctctcagcccagatcgagcttcccccttcccaaatcgggttctgcttgggctcccgccaccgccgccctacaccaggtgccaaggccttcgccgacctcttcgccggcgaagagcgcccagcagagatgaatgtagcggtgccaccacaatctccacatcttcgtctatatgactttgccaagagtgccatcatcaaaatttttgcctttccttatgctacggtctgtgacctgtattgcgacggtggaatggatacagacaagtggtgtgatgcccaggttggccactacataggcatcgatgcctctgcatcgggtgtcaactatgcccgtgagctatgggagaacaggaggaaacctttcactgctgaattcatcgagttggatccttctgatgatggttttgaagctcaagtgcaggaaaagggcatccaagcagatatggtttgctgtatgcagcacttgcagatagttatgctttgagaatgaagaacaggcaaagaagcttctgaacaatgtatcatcacttctcaaacctggaggctacttctttggcataactccagattcatctacaatatggacaaaatatcaaaagaatgttgaggcttcacataataagggtttgaagactgttccaaatagcattcgctcagagaactataccattacctttgaagtcgaggaagagaagtttcccttttttggaaagaagtatcaactcaaattcgcgagtgacgcggtgtttgagaatcagtgcctggtccactttcccacccttatgagattatcaagggaagctggacttgaatatgtggagatccagaatttaaccgagttttatgatgataacagaacacaattcgctccaatgcttggtggttacggtgcaagttttttggatgctcgagggaagcttgttgctcgttcctacgacattttaggcttgtattcagcatttgtgttccagaagcctgatccagaggcaataccaccgattgtaactcccgacttgcctgatcctgataaaggtcacgaagaggagtggctccagccacagcaggcgtcagtggaagatgggagacgctcgcatgcggatgtgcttcccatagaccctgagaaaggcatcctgggtcctggacctgcagacatgaggctttagttgctggacattcaaatgcagctgagcctgggtagtgatttttttttccaccgtgggcattctcccatagtcccatgtggccatgtctcctttatgagtccacgaaaatagcgaacaacactacaaggctcatgaatcctgcacggacgcatgggctttcttgtaaaacaaatgctcgatacgtatgaccttgtacggtctttgatgtgtatatttgactgctcatactcagtaccattttttaattgcctaaattgtctagctgcaagacaacgaaa

SEQ ID NO: 213517 - DNA, 1748 bp, Zea Mays
atttggcccaaggttcaccgctttgcctcgttcccgttctcctcctcgcaactctctcgtccatacgtcgtagccgccgcctgtctctcaccgccgacatcccgacagctctcagcccagatcgagcttcccccttcccaaatcgggttctgcttgggctcccgccaccgccgccctacaccaggtgccaaggccttcgccgacctcttcgccggcgaagagcgcccagcaggtattcccaatctcaccccccttctcttccctgttagctgtgcgaaaccgagttcgcaaactacctcaagctatctggctattcgattcctagtaactttttgcaaaagccattggtgtgcatgtacacccgtccctctactaatccgcccgtgttctgtctcgacctcgccgctggttatctgcttacatgtaattgcagagatgaatgtagcggtgccaccacaatctccacatcttcgtctatatgactttgccaagagtgccatcatcaaaatttttgcctttccttatgctacggtctgtgacctgtattgcgacggtggaatggatacagacaagtggtgtgatgcccaggttggccactacataggcatcgatgcctctgcatcgggtgtcaactatgcccgtgagctatgggagaacaggaggaaacctttcactgctgaattcatcgagttggatccttctgatgatggttttgaagctcaagtgcaggaaaagggcatccaagcagatatggtttgctgtatgcagcacttgcagttatgctttgagaatgaagaacaggcaaagaagcttctgaacaatgtatcatcacttctcaaacctggaggctacttctttggcataactccagattcatctacaatatggacaaaatatcaaaagaatgttgaggcttcacataataagggtttgaagactgttccaaatagcattcgctcagagaactataccattacctttgaagtcgaggaagagaagtttcccttttttggaaagaagtatcaactcaaattcgcgagtgacgcggtgtttgagaatcagtgcctggtccactttcccacccttatgagattatcaagggaagctggacttgaatatgtggagatccagaatttaaccgagttttatgatgataacagaacacaattcgctccaatgcttggtggttacggtgcaagttttttggatgctcgagggaagcttgttgctcgttcctacgacattttaggcttgtattcagcatttgtgttccagaagcctgatccagaggcaataccaccgattgtaactcccgacttgcctgatcctgataaaggtcacgaagagcaggagtggctccagccacagcaggcgtcagtggaagatgggagacgctcgcatgcggatgtgcttcccatagaccctgagaaaggcatcctgggtcctggacctgcagacatgaggctttagttgctggacattcaaatgcagctgagcctgggtagtgatttttttttccaccgtgggcattctcccatagtcccatgtggccatgtctcctttatgagtccacgaaaatagcgaacaacactacaaggctcatgaatcctgcacggacgcatgggctttcttgtaaaacaaatgctcgatacgtatgaccttgtacggtctttgatgtgtatatttgactgctcatactcagtaccattttttaattgcctaaattgtctagctgcaagacaacgaaa

SEQ ID NO: 213518 - DNA, 1545 bp, Zea Mays
agcaagtataaattttcatgtatatttggcccaaggttcaccgctttgcctcgttcccgttctcctcctcgcaactctctcgtccatacgtcgtagccgccgcctgtctctcaccgccgacatcccgacagctctcagcccagatcgagcttcccccttcccaaatcgggttctgcttgggctcccgccaccgccgccctacaccaggtgccaaggccttcgccgacctcttcgccggcgaagagcgcccagcagttcattccaaattagcgagaaactccggaggaatcctgaaagtaattttacatttattggttgccaaatgcctaaggtctgtgacctgtattgcgacggtggaatggatacagacaagtggtgtgatgcccaggttggccactacataggcatcgatgcctctgcatcgggtgtcaactatgcccgtgagctatgggagaacaggaggaaacctttcactgctgaattcatcgagttggatccttctgatgatggttttgaagctcaagtgcaggaaaagggcatccaagcagatatggtttgctgtatgcagcacttgcagttatgctttgagaatgaagaacaggcaaagaagcttctgaacaatgtatcatcacttctcaaacctggaggctacttctttggcataactccagattcatctacaatatggacaaaatatcaaaagaatgttgaggcttcacataataagggtttgaagactgttccaaatagcattcgctcagagaactataccattacctttgaagtcgaggaagagaagtttcccttttttggaaagaagtatcaactcaaattcgcgagtgacgcggtgtttgagaatcagtgcctggtccactttcccacccttatgagattatcaagggaagctggacttgaatatgtggagatccagaatttaaccgagttttatgatgataacagaacacaattcgctccaatgcttggtggttacggtgcaagttttttggatgctcgagggaagcttgttgctcgttcctacgacattttaggcttgtattcagcatttgtgttccagaagcctgatccagaggcaataccaccgattgtaactcccgacttgcctgatcctgataaaggtcacgaagaggagtggctccagccacagcaggcgtcagtggaagatgggagacgctcgcatgcggatgtgcttcccatagaccctgagaaaggcatcctgggtcctggacctgcagacatgaggctttagttgctggacattcaaatgcagctgagcctgggtagtgatttttttttccaccgtgggcattctcccatagtcccatgtggccatgtctcctttatgagtccacgaaaatagcgaacaacactacaaggctcatgaatcctgcacggacgcatgggctttcttgtaaaacaaatgctcgatacgtatgaccttgtacggtctttgatgtgtatatttgactgctcatactcagtaccattttttaattgcctaaattgtctagctgcaagacaacgaaa

SEQ ID NO: 213519 - DNA, 2036 bp, Zea Mays
gtcatgaattctactggtaatattttttataatattattagttttctaaattcaccaaaatatgtcaaaaaatatgcaaagtctataaaaccagcgtttcaggttttgtacataaacttagcttttctaattaaaactattatttatttgagtttcatgctgctatgctaccgcctaccgctatggtggagctgctatgctgccactttatgcgtgtgtaacacagaagctgccgaaatgggtagaaacatgtaacattataattttttaatgatagatagttaagatcagacctttaaactgtatactttgaatatgcaatcttttaacgttatgtagccaattttctctggaatttggttccacaatctccttttagtgtggataggtagagatagaagagtagagaagtgagaagagaagaaagaagagactacagagaaaagacagtggcagcaagtataaattttcatgtatatttggcccaaggttcaccgctttgcctcgttcccgttctcctcctcgcaactctctcgtccatacgtcgtagccgccgcctgtctctcaccgccgacatcccgacagctctcagcccagatcgagcttcccccttcccaaatcgggttctgcttgggctcccgccaccgccgccctacaccaggtgccaaggccttcgccgacctcttcgccggcgaagagcgcccagcagagatgaatgtagcggtgccaccacaatctccacatcttcgtctatatgactttgccaagagtgccatcatcaaaatttttgcctttccttatgctacggtctgtgacctgtattgcgacggtggaatggatacagacaagtggtgtgatgcccaggttggccactacataggcatcgatgcctctgcatcgggtgtcaactatgcccgtgagctatgggagaacaggaggaaacctttcactgctgaattcatcgagttggatccttctgatgatggttttgaagctcaagtgcaggaaaagggcatccaagcagatatggtttgctgtatgcagcacttgcagttatgctttgagaatgaagaacaggcaaagaagcttctgaacaatgtatcatcacttctcaaacctggaggctacttctttggcataactccagattcatctacaatatggacaaaatatcaaaagaatgttgaggcttcacataataagggtttgaagactgttccaaatagcattcgctcagagaactataccattacctttgaagtcgaggaagagaagtttcccttttttggaaagaagtatcaactcaaattcgcgagtgacgcggtgtttgagaatcagtgcctggtccactttcccacccttatgaggttgtgttgaaacagattatcaagggaagctggacttgaatatgtggagatccagaatttaaccgagttttatgatgataacagaacacaattcgctccaatgcttggtggttacggtgcaagttttttggatgctcgagggaagcttgttgctcgttcctacgacattttaggcttgtattcagcatttgtgttccagaagcctgatccagaggcaataccaccgattgtaactcccgacttgcctgatcctgataaaggtcacgaagaggagtggctccagccacagcaggcgtcagtggaagatgggagacgctcgcatgcggatgtgcttcccatagaccctgagaaaggcatcctgggtcctggacctgcagacatgaggctttagttgctggacattcaaatgcagctgagcctgggtagtgatttttttttccaccgtgggcattctcccatagtcccatgtggccatgtctcctttatgagtccacgaaaatagcgaacaacactacaaggctcatgaatcctgcacggacgcatgggctttcttgtaaaacaaatgctcgatacgtatgaccttgtacggtctttgatgtgtatatttgactgctcatactcagtaccattttttaattgcctaaattgtctagctgcaagacaacgaaa

SEQ ID NO: 213520 - DNA, 1704 bp, Zea Mays
ccgtgctcatcttctcctcatcttcggattgttcgttgagagtgtcgtcatgaattctactgtgtggataggtagagatagaagagtagagaagtgagaagagaagaaagaagagactacagagaaaagacagtggcagcaagtataaattttcatgtatatttggcccaaggttcaccgctttgcctcgttcccgttctcctcctcgcaactctctcgtccatacgtcgtagccgccgcctgtctctcaccgccgacatcccgacagctctcagcccagatcgagcttcccccttcccaaatcgggttctgcttgggctcccgccaccgccgccctacaccaggtgccaaggccttcgccgacctcttcgccggcgaagagcgcccagcagagatgaatgtagcggtgccaccacaatctccacatcttcgtctatatgactttgccaagagtgccatcatcaaaatttttgcctttccttatgctacggtctgtgacctgtattgcgacggtggaatggatacagacaagtggtgtgatgcccaggttggccactacataggcatcgatgcctctgcatcgggtgtcaactatgcccgtgagctatgggagaacaggaggaaacctttcactgctgaattcatcgagttggatccttctgatgatggttttgaagctcaagtgcaggaaaagggcatccaagcagatatggtttgctgtatgcagcacttgcagttatgctttgagaatgaagaacaggcaaagaagcttctgaacaatgtatcatcacttctcaaacctggaggctacttctttggcataactccagattcatctacaatatggacaaaatatcaaaagaatgttgaggcttcacataataagggtttgaagactgttccaaatagcattcgctcagagaactataccattacctttgaagtcgaggaagagaagtttcccttttttggaaagaagtatcaactcaaattcgcgagtgacgcggtgtttgagaatcagtgcctggtccactttcccacccttatgagattatcaagggaagctggacttgaatatgtggagatccagaatttaaccgagttttatgatgataacagaacacaattcgctccaatgcttggtggttacggtgcaagttttttggatgctcgagggaagcttgttgctcgttcctacgacattttaggcttgtattcagcatttgtgttccagaagcctgatccagaggcaataccaccgattgtaactcccgacttgcctgatcctgataaaggtcacgaagaggagtggctccagccacagcaggcgtcagtggaagatgggagacgctcgcatgcggatgtgcttcccatagaccctgagaaaggcatcctgggtcctggacctgcagacatgaggctttagttgctggacattcaaatgcagctgagcctgggtagtgatttttttttccaccgtgggcattctcccatagtcccatgtggccatgtctcctttatgagtccacgaaaatagcgaacaacactacaaggctcatgaatcctgcacggacgcatgggctttcttgtaaaacaaatgctcgatacgtatgaccttgtacggtctttgatgtgtatatttgactgctcatactcagtaccattttttaattgcctaaattgtctagctgcaagacaacgaaa

SEQ ID NO: 213521 - DNA, 1722 bp, Zea Mays
ttatctcgtcgtgcgggagccaaccaatcgcgaccacttggtccaccccactctgctcaccacatgcgcggaacacgccaccgcttgtggtttcacgcgagcgcacccaggccagcagtgcgccccgctgattcctctccggccgtcccgacgttatccaactcctgaacacctctctctcgccacctcacctgaacacctgctcgccccacccattccctccgcatggccggcctccgccctcgcgccgccgtagcttcgaattgcctccgaccggcaattcggcgaggcgcccgtcacgcatcgggggcagcgtttggatactacacctgctggcagctacagggaaatattttgaattggagatctatatccgcaactaaaaagctctggagtacagtagctagtgcaaagcctgatgattctaaatttgaaagtgtggatgcaccacttgagccccaaacatgtgaaggcagcttcttgtgtggtctgttgaagaacctgccacacatttttctagctgcagcagcaaagcagttgcaagaactgtcttaccaaagagaagagagcttaaaacgctgggagcatagtattggttctaaagaggattgccttcacaggaggattgctgaactcaaggaacacgagtgtcagagagctattgaggacgtcatgtacatgttgattgtttataagttttttaagattgaagttccaatggttcccaatctatcgaaactcataagcaacagaaggttacagttatggccaccaagggagacagatcttgaatccattcatggacctgaggtgctagagctaattagggaacacttgaccagcattatcagatgggtgcacagaaatggtcccaagatcaatcgttcaacacttcgcattaaaagactgcaatttgttcggatatattctgcttcaataatgtacggatacttcctgaaatctgtcagcatcaggcatcgattggagctgaccctcactcgctcagaaggagtgcctccgattcaatttctgaatgctcaactcacaaataaacaagagcaggaaggggccattggaggctctagtgaagcttcgtcttctttgagaccaagttctgtggtcaacccacacgacttgaggggctacataatgggattcgatccaaagaccttgcagctttgcgcgaagctgcgctcatcggaagcttctaatctcatcgagaggcacagctgggctctttttgggggcgacatggaactctcccaggagaatgatgaagcggttatacttgatccttcatccctgaaaagactactgcttgaagccatcgcattcggttccttcctctgggacgtcgaggattatgtggacgagatcttcaagttatcggatagctgaagaaactgctacagaaagctcctacagcctttgtggttgtggatagatgaagccagctgaaaagaggagctgcagttcttttctctagatttgtatcactgctgggcagttattctaccacaagggatgcagcagcagccatgacagcactgcatgtctccagcagcagtttacctgtttcttatctcatcttttattttaaactttattatatgaataatacatatatcttatctcaattttttattttaaactttattatgtgaacaatatggttgtagtgaaaacaatattttgcacaactatagtatttctatttcaaac

SEQ ID NO: 213522 - DNA, 1737 bp, Zea Mays
cgcttgtggtttcacgcgagcgcacccaggccagcagtgcgccccgctgattcctctccggccgtcccgacgttatccaactcctgaacacctctctctcgccacctcacctgaacacctgctcgccccacccattccctccgcatggccggcctccgccctcgcgccgccgtagcttcgaattgcctccgaccggcaattcggcgaggcgcccgtcacgcatcgggggcagcgtttggatactacacctgctggcagctacagggaaatattttgaattggagatctatatccgcaactaaaaagctctggagtacagtagctagtgcaaagcctgatgattctaaatttgaaagtgtggatgcaccacttgagccccaaacatgtgaaggcagcttcttgtgtggtctgttgaagaacctgccacacatttttctagctgcagcagcaaagcagttgcaagaactgtcttaccaaagagaagagagcttaaaacgctgggagcatagtattggttctaaagaggattgccttcacaggttggaggattgctgaactcaaggaacacgagtgtcagagagctattgaggacgtcatgtacatgttgattgtttataagttttttaagattgaagttccaatggttcccaatctatcgaaactcataagcaacagaaggttacagttatggccaccaagggagacagatcttgaatccattcatggacctgaggtgctagagctaattagggaacacttgaccagcattatcagatgggtgcacagaaatggtcccaagatcaatcgttcaacacttcgcattaaaagactgcaatttgttcggatatattctgcttcaataatgtacggatacttcctgaaatctgtcagcatcaggcatcgattggagctgaccctcactcgctcagaaggagtgcctccgattcaatttctgaatgctcaactcacaaataaacaagagcaggaaggggccattggaggctctagtgaagcttcgtcttctttgagaccaagttctgtggtcaacccacacgacttgaggggctacataatgggattcgatccaaagaccttgcagctttgcgcgaagctgcgctcatcggaagcttctaatctcatcgagaggcacagctgggctctttttgggggcgacatggaactctcccaggagaatgatgaagcggttatacttgatccttcatccctgaaaagactactgcttgaagccatcgcattcggttccttcctctgggacgtcgaggattatgtggacgagatcttcaagttatcggatagctgaagaaactgctacagaaagctcctacagcctttgtggttgtggatagatgaagccagctgaaaagaggagctgcagttcttttctctagatttgtatatatggctggctgttatgtacatgcatatacatcttcatctcaagtttgctttttggagggaagcttggacgtgccctacaagtttttttttcactgctgggcagttattctaccacaagggatgcagcagcagccatgacagcactgcatgtctccagcagcagtttacctgtttcttatctcatcttttattttaaactttattatatgaataatacatatatcttatctcaattttttattttaaactttattatgtgaacaatatggttgtagtgaaaacaatattttgcacaactatagtatttctatttcaaac

SEQ ID NO: 213523 - DNA, 1757 bp, Zea Mays
cgcttgtggtttcacgcgagcgcacccaggccagcagtgcgccccgctgattcctctccggccgtcccgacgttatccaactcctgaacacctctctctcgccacctcacctgaacacctgctcgccccacccattccctccgcatggccggcctccgccctcgcgccgccgtagcttcgaattgcctccgaccggcaattcggcgaggcgcccgtcacgcatcgggggcagcgtttggatactacacctgctggcagctacagttccttgtcaacatcaaaacgcagggaaatattttgaattggagatctatatccgcaactaaaaagctctggagtacagtagctagtgcaaagcctgatgattctaaatttgaaagtgtggatgcaccacttgagccccaaacatgtgaaggcagcttcttgtgtggtctgttgaagaacctgccacacatttttctagctgcagcagcaaagcagttgcaagaactgtcttaccaaagagaagagagcttaaaacgctgggagcatagtattggttctaaagaggattgccttcacaggaggattgctgaactcaaggaacacgagtgtcagagagctattgaggacgtcatgtacatgttgattgtttataagttttttaagattgaagttccaatggttcccaatctatcgaaactcataagcaacagaaggttacagttatggccaccaagggagacagatcttgaatccattcatggacctgaggtgctagagctaattagggaacacttgaccagcattatcagatgggtgcacagaaatggtcccaagatcaatcgttcaacacttcgcattaaaagactgcaatttgttcggatatattctgcttcaataatgtacggatacttcctgaaatctgtcagcatcaggcatcgattggagctgaccctcactcgctcagaaggagtgcctccgattcaatttctgaatgctcaactcacaaataaacaagagcaggaaggggccattggaggctctagtgaagcttcgtcttctttgagaccaagttctgtggtcaacccacacgacttgaggggctacataatgggattcgatccaaagaccttgcagctttgcgcgaagctgcgctcatcggaagcttctaatctcatcgagaggcacagctgggctctttttgggggcgacatggaactctcccaggagaatgatgaagcggttatacttgatccttcatccctgaaaagactactgcttgaagccatcgcattcggttccttcctctgggacgtcgaggattatgtggacgagatcttcaagttatcggatagctgaagaaactgctacagaaagctcctacagcctttgtggttgtggatagatgaagccagctgaaaagaggagctgcagttcttttctctagatttgtatatatggctggctgttatgtacatgcatatacatcttcatctcaagtttgctttttggagggaagcttggacgtgccctacaagtttttttttcactgctgggcagttattctaccacaagggatgcagcagcagccatgacagcactgcatgtctccagcagcagtttacctgtttcttatctcatcttttattttaaactttattatatgaataatacatatatcttatctcaattttttattttaaactttattatgtgaacaatatggttgtagtgaaaacaatattttgcacaactatagtatttctatttcaaac

SEQ ID NO: 213524 - DNA, 1525 bp, Zea Mays
ggaggctggagggttccactctgttggacccgccctgggagatctacatccgaggtggaaaggggagttttgagatgtcccatcaacaagccttagcacaacaccagctttgatcacagcacagcatgccaattcttctgccaatgtggcatcagcacaggagaaaccagctctgccgtcacatgcaggtaatagcaacattgaatcaaatgaggtttcacaaggactcaaaacttctgcacccacttttgataaacctgctgacgatggatacaactggcggaagtatggccagaaggcagttaagggtggcgagtatccaaggagttactacaaatgtacccacacgagttgtccagttaagaaaaaagtggagcgctcagcagaaggacacatcactcaaataatttatagaggtcagcacaaccaccagcgtccaccaaaaaggaggtccaaagatggtggtggtccactaaatgaagcagatgttcttcatgagaatgaagacatttcaactagatcagaacctggctctcaagaacactctggaaaacatgaagggtcaaatgatggcatattagggccttctgtgtcaagaaggggaggaggagatgagcaattgtcaggctcaagtgatagtgatgaggaacaagatgatgaacaaagggctggcgacgaagaccctggctatgcaaatgcaaacaaaagacatgtgccaactccagctcaaaggataattgtgcaaacaaacagcgaagttgatcttctggatgatggctatcggtggcgcaagtatggacagaaagtggtaaaagggaatccctacccgagaacccacaagttatggaactataacagccttccatgaatccacccacagttttagcaacaaatcaaatcattcgatacccatgtaaatcccaaacatggacatcagacacatcactgctctatggtgcagctcttagggtctggcacaatgtcacatcaatcctttatatcttttgaaagttactccataacccattaaagtcctggcgatgttgcagttgctgagaaaaactgacactttctctgatattcactacattcaccttcagttcatttctttggtgttcagttagaacctttcagattcctttttctttgggaccagaaaggatctttcagaaattgataagctttagtatctctgatccaagatatgtaattttagtacctgtgttatcaaacaattttaactttggccatcagtaaaaactacttttcacgatatatcattggtttatttaaaatgctttgtggactttgtggcgtatttttgagttcatttatactttatagcatatttttttagtacttttatttggtgaggtttgtgcatgttcaccaaatggggctttgtgaatggtagacactagctggaaagcctggacatctttaatactctcgtggaccccaaatataattccatttggccttttccctaaattcagcacataaagtcaaataactccaattcatc

SEQ ID NO: 213525 - DNA, 1808 bp, Zea Mays
gggagatctacatccgaggtggaaaggggagttttgagatgtcccatcaacaagccttagcacaagtaacagcacaagcagttcattctcagtacaatatgataaatcacacagattacagtattcctttttcgtcgacaacagcaccagctttgatcacagcacagcatgccaattcttctgccaatgtggcatcagcacaggagaaaccagctctgccgtcacatgcaggtaatagcaacattgaatcaaatgaggtttcacaaggactcaaaacttctgcacccacttttgataaacctgctgacgatggatacaactggcggaagtatggccagaaggcagttaagggtggcgagtatccaaggagttactacaaatgtacccacacgagttgtccagttaagaaaaaagtggagcgctcagcagaaggacacatcactcaaataatttatagaggtcagcacaaccaccagcgtccaccaaaaaggaggtccaaagatggtggtggtccactaaatgaagcagatgttcttcatgagaatgaagacatttcaactagatcagaacctggctctcaagaacactctggaaaacatgaagggtcaaatgatggcatattagggccttctgtgtcaagaaggggaggaggagatgagcaattgtcaggctcaagtgatagtgatgaggaacaagatgatgaacaaagggctggcgacgaagaccctggctatgcaaatgcaaacaaaagacatgtgccaactccagctcaaaggataattgtgcaaacaaacagcgaagttgatcttctggatgatggctatcggtggcgcaagtatggacagaaagtggtaaaagggaatccctacccgaggagctactatagatgcacgtaccaaggatgcgatgtgaagaagcatatcgaaagatcatcccaagacccaaaggccgtcataacgacttacgaagggaagcacagccatgatgttccagcagtcaggaacggtagccatgctgctgccaacgccaatgggtcatcttccaccagcttaccagtaccacacagggtccacagttcagcatccagtagtcgcagagcggcagaattacaaagcgcatcctcagcttcttctatgctactaaaagaggaaaacgaaataacataggagttttggagtgtgtagccagggtaaattatatctgttctctgatccatttcctcctaggtgtgctgcttcacgctctgcgccgcagcaaaaattgggcactgcaagcccccaccattggttttagtcaagagcgagctctttcgtttgtgcccttccaaaagctgcacaccctgtttggctgcgcggtgtatgttatgttgtcattaccatttacgcccattggttgtaaatgccatcagtcgttcccccggagaactatatggatgacagcattcatcggcccaagtgtatatactcgatttaaaaaccttttttttaactgagatatggtttgttgtagatacacggcttccttcctggtctttgtaaagtgttatttcgacaggatatataaagctatagtagctgatggctgatttgccgttggcctctgaggctgtgagctcacctccagttttccaggtctactactaccatgggttagttgaagccattgagcagcatgtaatgttagaattgttcctttttatgatgtactctatgttctcgaatatttgttgtccattagttcatttttaaactaaaccgtaataaataaaaaagaacgaagtgagtataattctcagctaggaattaaac

SEQ ID NO: 213526 - DNA, 1574 bp, Zea Mays
ctaataactcgtgtcatcctcgtggttgtgctcagtgctctgctcactacggaatgctgtgcactactgttcctgatgggagttttgagatgtcccatcaacaagccttagcacaagtaacagcacaagcagttcattctcagtacaatatgataaatcacacagattacagtattcctttttcgtcgacaacagcaccagctttgatcacagcacagcatgccaattcttctgccaatgtggcatcagcacaggagaaaccagctctgccgtcacatgcaggtaatagcaacattgaatcaaatgaggtttcacaaggactcaaaacttctgcacccacttttgataaacctgctgacgatggatacaactggcggaagtatggccagaaggcagttaagggtggcgagtatccaaggagttactacaaatgtacccacacgagttgtccagttaagaaaaaagtggagcgctcagcagaaggacacatcactcaaataatttatagaggtcagcacaaccaccagcgtccaccaaaaaggaggtccaaagatggtggtggtccactaaatgaagcagatgttcttcatgagaatgaagacatttcaactagatcagaacctggctctcaagaacactctggaaaacatgaagggtcaaatgatggcatattagggccttctgtgtcaagaaggggaggaggagatgagcaattgtcaggctcaagtgatagtgatgaggaacaagatgatgaacaaagggctggcgacgaagaccctggctatgcaaatgcaaacaaaagcgaagttgatcttctggatgatggctatcggtggcgcaagtatggacagaaagtggtaaaagggaatccctacccgagaacccacaagttatggaactataacagccttccatgaatccacccacagttttagcaacaaatcaaatcattcgatacccatgtaaatcccaaacatggacatcagacacatcactgctctatggtgcagctcttagggtctggcacaatgtcacatcaatcctttatatcttttgaaagttactccataacccattaaagtcctggcgatgttgcagttgctgagaaaaactgacactttctctgatattcactacattcaccttcagttcatttctttggtgttcagttagaacctttcagattcctttttctttgggaccagaaaggatctttcagaaattgataagctttagtatctctgatccaagatatgtaattttagtacctgtgttatcaaacaattttaactttggccatcagtaaaaactacttttcacgatatatcattggtttatttaaaatgctttgtggactttgtggcgtatttttgagttcatttatactttatagcatatttttttagtacttttatttggtgaggtttgtgcatgttcaccaaatggggctttgtgaatggtagacactagctggaaagcctggacatctttaatactctcgtggaccccaaatataattccatttggccttttccctaaattcagcacataaagtcaaataactccaattcatc

SEQ ID NO: 213527 - DNA, 794 bp, Zea Mays
ctaaagtggccaggggaaaagaatctgctgaaacgcgcggcacgcgtgagttgtgaaagttgagacgcctcagaaaaacgcaacccttttttgggctttggcttttgctgcaaacaaaaggcgacgcggctgggatctagcacgctagcgagcgagagagacgcacatctatctgtcaagcgacgccgcggcctcgatcagagtcggaggcgaacacccccatggcggcggctggcggcggcgcaggagggaaggttcagcgtgcccgaggcggcgccctttaccgcggtgctcaagtacgccgcggaggagttcaaggtcccgccccagaccagcgccatcatcaccaacgatggaattggcatcaacccccagcaaagtgcaggcaacgtgtttctgaaacatggttcggagctgcgtctcatccctcgcgatagagttggagctgtagtcatgtcttccggttagaggatatatacagtccaatgcataatgagcaaaacttgagagaaataaagctttgatgttggccttgcttggctgtaggatgttgttacaaggataataagcgaaccttaccgtacatgtctcaagttgtatgctctctgtttgtatgtggagagatttctgaaagtgaatccagtatctgaatcgactcaattagccgctttctgtctgcacagagcgatatgatcctgcttcgcgctctgtcagttcaaaagtatagaaatgaggtgttcttccctaaattgccaaagatattgcgaaggatatggctataagggttagtttgg

SEQ ID NO: 213528 - DNA, 832 bp, Zea Mays
ggggaaaagaatctgctgaaacgcgcggcacgcgtgagttgtgaaagttgagacgcctcagaaaaacgcaacccttttttgggctttggcttttgctgcaaacaaaaggcgacgcggctgggatctagcacgctagcgagcgagagagacgcacatctatctgtcaagcgacgccgcggcctcgatcagagtcggaggcgaacacccccatggcggcggctggcggcggcgcaggagggaaggtatccttcaagatcatcctcacctccgaccccaagctccctttcaaagtgttcagcgtgcccgaggcggcgccctttaccgcggtgctcaagtacgccgcggaggagttcaaggtcccgccccagaccagcgccatcatcaccaacgatggaattggcatcaacccccagcaaagtgcaggcaacgtgtttctgaaacatggttcggagctgcgtctcatccctcgcgatagagttggagctgtagtcatgtcttccggttagaggatatatacagtccaatgcataatgagcaaaacttgagagaaataaagctttgatgttggccttgcttggctgtaggatgttgttacaaggataataagcgaaccttaccgtacatgtctcaagttgtatgctctctgtttgtatgtggagagatttctgaaagtgaatccagtatctgaatcgactcaattagccgctttctgtctgcacagagcgatatgatcctgcttcgcgctctgtcagttcaaaagtatagaaatgaggtgttcttccctaaattgccaaagatattgcgaaggatatggctataagggttagtttgg

SEQ ID NO: 213529 - DNA, 1859 bp, Zea Mays
gaactcacggacagtattcaggagaactcacgtttctcttggtcagccagtgacatcaccaacttgttgacggtagggagagcaagttcttcggcgatttgagaagaaacgaggagcgagagagcgtgggtgcgtggggggtgggggctgcgcccggggcccccggatcacggaatcctacccttaccaaccctagcctccattggtcgccgtctcgggccatggcagggccggcgccggatcgggccgccctgactgtgggtccgggcatggacatgccgatcatgcacgacagcgaccggtacgagctcgtgcgcgacatcggctccggcaacttcggcgttgcccgcctcatgcgcgaccgccgcaccaccgaactcgtcgccgtcaagtacatcgagcgtggcgagaagatagatgagaatgtccagcgcgaaataattaaccatagatcattgaaacaccctaacattattaggtttaaagaggttattttaacaccgacccatcttgctattgtcatggaatatgcctctggcggtgagctttttgagagaatatgtaagaacgtgcgattcagtgaagatgaggctcgctacttcttccaacaactcatttcaggacaagtatgccaccgtgatttgaagctggagaacacacttctagatgggagtgatgctcctcgcttgaagatatgtgacttcggttattccaagtcatctgttcttcattcccaaccgaagtcaactgttggaacacctgcttatattgcacctgaagttctgttgaaaaaagaatatgatggcaagattgctgatgtttggtcatgtggtgtaaccctctatgtaatggctgttggtgcatatccttttgaagacccagaagagcctaagaacttccgcaagacaattcagcgcatcttgaacgttcagtacgccattccagactacgtgaacatatctccagagtgcaggcatctaatttcgaggatttttgttggtgatcctgctatggcaagtccttgtagttataatcgtgctttgatcctgatacagtaggttcagaagatacgttgtttcaggtttggtcatatttatccgattttgttgtatttatgtgttatataaaatatgcagcgaataacaatcactgaaatccggaatcatagttggttcctgaagaaccttcctgctgatcttatggatgatgatagcatgagcaaccaatatgaggagcctgatcagccaatgcagaccatggatcagatcatgcagattttaacagaggccaccataccacctgcctgttctcgcagtataaatgttctagctgatggactggacatggacgacgacatggatgatcttgactccgattcggatcttgatgttgacagcagcggtgagattgtatacgcaatgtgagtaacatctcagtaaccatctcagtatctcaccagtcaaccaaagaaccaatcaggcatgggacaccctgatgttgtacactctgccaaagacctagcatccttttgtaaaatatctccctgtagttttctcaaagaagcgcaagcccaacctgttctggggaacacggatgctgtagtcaaactggggttattcagattgtaaaactggcctcttgcttcctgcttactctcaggcttcgacttgtgtgttgctgttgaatatgtacttacaagaaacttctacggagtactcatgttgatctgttcgaagctaacatcggaaagagcatttaaaaattctgttggtggctttcattggaacttgtgcctgctaatgggttgggttgcaaggctgtctagaacaggtcacataaaatagggatttgtactgtag

SEQ ID NO: 213530 - DNA, 1879 bp, Zea Mays
gaactcacggacagtattcaggagaactcacgtttctcttggtcagccagtgacatcaccaacttgttgacggtagggagagcaagttcttcggcgatttgagaagaaacgaggagcgagagagcgtgggtgcgtggggggtgggggctgcgcccggggcccccggatcacggaatcctacccttaccaaccctagcctccattggtcgccgtctcgggccatggcagggccggcgccggatcgggccgccctgactgtgggtccgggcatggacatgccgatcatgcacgacagcgaccggtacgagctcgtgcgcgacatcggctccggcaacttcggcgttgcccgcctcatgcgcgaccgccgcaccaccgaactcgtcgccgtcaagtacatcgagcgtggcgagaagatagatgagaatgtccagcgcgaaataattaaccatagatcattgaaacaccctaacattattaggtttaaagaggttattttaacaccgacccatcttgctattgtcatggaatatgcctctggcggtgagctttttgagagaatatgtaagaacgtgcgattcagtgaagatgaggctcgctacttcttccaacaactcatttcaggagtaagctactgccattcaatgcaagtatgccaccgtgatttgaagctggagaacacacttctagatgggagtgatgctcctcgcttgaagatatgtgacttcggttattccaagtcatctgttcttcattcccaaccgaagtcaactgttggaacacctgcttatattgcacctgaagttctgttgaaaaaagaatatgatggcaagattgctgatgtttggtcatgtggtgtaaccctctatgtaatggctgttggtgcatatccttttgaagacccagaagagcctaagaacttccgcaagacaattcaggcatcttgaacgttcagtacgccattccagactacgtgaacatatctccagagtgcaggcatctaatttcgaggatttttgttggtgatcctgctatggcaagtccttgtagttataatcgtgctttgatcctgatacagtaggttcagaagatacgttgtttcaggtttggtcatatttatccgattttgttgtatttatgtgttatataaaatatgcagcgaataacaatcactgaaatccggaatcatagttggttcctgaagaaccttcctgctgatcttatggatgatgatagcatgagcaaccaatatgaggagcctgatcagccaatgcagaccatggatcagatcatgcagattttaacagaggccaccataccacctgcctgttctcgcagtataaatgttctagctgatggactggacatggacgacgacatggatgatcttgactccgattcggatcttgatgttgacagcagcggtgagattgtatacgcaatgtgagtaacatctcagtaaccatctcagtatctcaccagtcaaccaaagaaccaatcaggcatgggacaccctgatgttgtacactctgccaaagacctagcatccttttgtaaaatatctccctgtagttttctcaaagaagcgcaagcccaacctgttctggggaacacggatgctgtagtcaaactggggttattcagattgtaaaactggcctcttgcttcctgcttactctcaggcttcgacttgtgtgttgctgttgaatatgtacttacaagaaacttctacggagtactcatgttgatctgttcgaagctaacatcggaaagagcatttaaaaattctgttggtggctttcattggaacttgtgcctgctaatgggttgggttgcaaggctgtctagaacaggtcacataaaatagggatttgtactgtag

SEQ ID NO: 213531 - DNA, 1798 bp, Zea Mays
gaactcacggacagtattcaggagaactcacgtttctcttggtcagccagtgacatcaccaacttgttgacggtagggagagcaagttcttcggcgatttgagaagaaacgaggagcgagagagcgtgggtgcgtggggggtgggggctgcgcccggggcccccggatcacggaatcctacccttaccaaccctagcctccattggtcgccgtctcgggccatggcagggccggcgccggatcgggccgccctgactgtgggtccgggcatggacatgccgatcatgcacgacagcgaccggtacgagctcgtgcgcgacatcggctccggcaacttcggcgttgcccgcctcatgcgcgaccgccgcaccaccgaactcgtcgccgtcaagtacatcgagcgtggcgagaagatagatgagaatgtccagcgcgaaataattaaccatagatcattgaaacaccctaacattattaggtttaaagaggttattttaacaccgacccatcttgctattgtcatggaatatgcctctggcggtgagctttttgagagaatatgtaagaacgtgcgattcagtgaagatgaggctcgctacttcttccaacaactcatttcaggagtaagctactgccattcaatgcaagtatgccaccgtgatttgaagctggagaacacacttctagatgggagtgatgctcctcgcttgaagatatgtgacttcggttattccaagtcatctgttcttcattcccaaccgaagtcaactgttggaacacctgcttatattgcacctgaagttctgttgaaaaaagaatatgatggcaagattgctgatgtttggtcatgtggtgtaaccctctatgtaatggctgttggtgcatatccttttgaagacccagaagagcctaagaacttccgcaagacaattcagcgcatcttgaacgttcagtacgccattccagactacgtgaacatatctccagagtgcaggcatctaatttcgaggatttttgttggtgatcctgctatggcaagtccttgtagttataatcgtgctttgatcctgatacacgaataacaatcactgaaatccggaatcatagttggttcctgaagaaccttcctgctgatcttatggatgatgatagcatgagcaaccaatatgaggagcctgatcagccaatgcagaccatggatcagatcatgcagattttaacagaggccaccataccacctgcctgttctcgcagtataaatgttctagctgatggactggacatggacgacgacatggatgatcttgactccgattcggatcttgatgttgacagcagcggtgagattgtatacgcaatgtgagtaacatctcagtaaccatctcagtatctcaccagtcaaccaaagaaccaatcaggcatgggacaccctgatgttgtacactctgccaaagacctagcatccttttgtaaaatatctccctgtagttttctcaaagaagcgcaagcccaacctgttctggggaacacggatgctgtagtcaaactggggttattcagattgtaaaactggcctcttgcttcctgcttactctcaggcttcgacttgtgtgttgctgttgaatatgtacttacaagaaacttctacggagtactcatgttgatctgttcgaagctaacatcggaaagagcatttaaaaattctgttggtggctttcattggaacttgtgcctgctaatgggttgggttgcaaggctgtctagaacaggtcacataaaatagggatttgtactgtag

SEQ ID NO: 213532 - DNA, 1035 bp, Zea Mays
gttttgtggatatagtccagtccgtcatctgttcttcattcccaaccgaagtcaactgttggaacacctgcttatattgcacctgaagttctgttgaaaaaagaatatgatggcaagattgctgatgtttggtcatgtggtgtaaccctctatgtaatggctgttggtgcatatccttttgaagacccagaagagcctaagaacttccgcaagacaattcagcgcatcttgaacgttcagtacgccattccagactacgtgaacatatctccagagtgcaggcatctaatttcgaggatttttgttggtgatcctgctatggcaagtccttgtagttataatcgtgctttgatcctgatacagtaggttcagaagatacgttgtttcagcatgagcaaccaatatgaggagcctgatcagccaatgcagaccatggatcagatcatgcagattttaacagaggccaccataccacctgcctgttctcgcagtataaatgttctagctgatggactggacatggacgacgacatggatgatcttgactccgattcggatcttgatgttgacagcagcggtgagattgtatacgcaatgtgagtaacatctcagtaaccatctcagtatctcaccagtcaaccaaagaaccaatcaggcatgggacaccctgatgttgtacactctgccaaagacctagcatccttttgtaaaatatctccctgtagttttctcaaagaagcgcaagcccaacctgttctggggaacacggatgctgtagtcaaactggggttattcagattgtaaaactggcctcttgcttcctgcttactctcaggcttcgacttgtgtgttgctgttgaatatgtacttacaagaaacttctacggagtactcatgttgatctgttcgaagctaacatcggaaagagcatttaaaaattctgttggtggctttcattggaacttgtgcctgctaatgggttgggttgcaaggctgtctagaacaggtcacataaaatagggatttgtactgtag

SEQ ID NO: 213533 - DNA, 503 bp, Zea Mays
acatttgaggaatccgcctttgatataaagaagacgctcccgaatccgtctccgcctcctgtcgctcgctctccctgtctcccgcacgccgacccgcagccgccgccgttcgccatgggtttcctcgacgcgctctaccgtgtggtgatgcgccgcaacgccgtctacgttaccttcgtcgtcgccggcgctttcgcgggcgagcgggcggtggactacggcgttcacaagatctgggagatgaacaacctcgggaaaaggtacgaagacatatcggttttggggcagaggccagctgaggaatgataaattttggtcaccagtttgcttcggtttgaccgtttcattttggcacagtaataaacgatgagggctttgtctatctttgttggtccttcgactacatgaatccatttgatgcttcgaagatgttaaagcttcaactttcagcacaacgagttcacgttatggttattgccttatcttttgatttttagacaaca

SEQ ID NO: 213534 - DNA, 392 bp, Zea Mays
acatttgaggaatccgcctttgatataaagaagacgctcccgaatccgtctccgcctcctgtcgctcgctctccctgtctcccgcacgccgacccgcagccgccgccgttcgccatgggtttcctcgacgcgctctaccgtgtggtgatgcgccgcaacgccgtctacgttaccttcgtcgtcgccggcgctttcgcgggcgagcgggcggtggactacggcgttcacaagatctgggagatgaacaacctcgggaaaaggtacgaagacatatcggttttggggcagaggccagctgaggaatgataaattttggtcaccagtttgcttcggtttgaccgtttcattttggcacagtaataaacgatgctcaaatcaattcaccggcagct

SEQ ID NO: 213535 - DNA, 2559 bp, Zea Mays
ctcggctctacacctacgcgtgcgcggcctcgcctcttccctcgcacgactcgccgcgaggagtttccccttcctccgcgtgcatccccgcgagagctcgaaaacctagccgccaaatccatggctcgccgcgaccacgacgacgacgacgaggaagaggtcgaggaggaggcatacgacttggacgaggaggaggatgacgaggatgaggaagacgactacgaggaggaggcgaggcgcgggaaggcctcccgcggcggtggcaagggtggcggcgggcggaagcggtcacgcgaagacaacttcatcgacgactcggccatcgaggacgaggacgaggacgacgacgacgacggcgggggccggccgaggaagaagggcggcggcggggtgcgagggttcttcgacgaggaggcccaggtcgacgaggatgaggaagaagaggacgaaggcgagggagaggacgattttattaatgatgctggggccgaccttcctgatgaggatgttgttaggggctcaagacgtcattctattcctatgagagatgaggaagaggatattgatgagattgagagacaagtgcgggagagatacgcacgatccactcatattgagtacggtgaggaagctgcagaagtggaacagcaagctctgctgccgtccgtgaaggatcccaaactatggatggtcaaatgtgcgattggacatgagagagaaactgctatttgtctgatgcaaaagttcatcgatcggtcagaccttcagataaagtcagtcgtggcattggatcatcttaaaaattatatttatgttgaagctgaaaaggaggcccatgtcaaagaggcttgcaaaggtctaagaaacatttatgcttcagcaaaaataacattagtgccgataaaagaaatggcagatgtcctctccgttgagagcaaatctgttgatctttcaagggattcttgggttcgaatgaaattgggcatatataaaggcgaccttgctaaggttgttgatgttgataatgtacgtcaaagagtagacgtgaagctgatccctagaatagatctacaagctttggctagtaaacttgaaggggagtctgtaaagaagaaagcatttgtcccaccaccacgattcttcaatatcgatgagggagatgcatattcgtgtggaacggaggcgagataaagaatctggggagtactttgagtgggttgataatttgaagttcaaagatggtttcttgtacaaatctgtctccactaaatcgatccacacaaacaatattcaaccgaattttgacgaacttgagaagtttaagaagcctggtgatgacatgaatggcgacatggctagcttgtccactctgtttgcaaacaggaaaaaaggacactttatgaagggtgatgccgtcattgttattaaaggcgatttgaaaaatctggagggttgggttgagaaagtagaggatgaaaccgttcacatcaggccaaaaatatctgatctcccgaaaacattggccttcaatgaaaaagagctttgcaaatatttcaagcctggtgaccatgtcaaggtgatctcaggagttcaagaaggcgctactggcatggttgttaaagtggaagggcatgtcttgatcattttgtctgacacaactaaagaacatatccgtgtgtttgctgatcatgtcgttgaaagctctgaaattaccacaggaatcaccagaatcgggataattgggaagatggaaatcctgctacttggggtagcagtccagcttaccagccaggaaccccacaagctcggccatacgaagcccccacacctggatcagggtgggcaaacactccaggagttagtttcaatgatgctcctactcccagggataactatgcaaatgccccaagtccatacgtgccttccacgcctgttggccaaccaatgacgccaaactcagcctcatatcttccaggcacacctggtggtcaaccaatgaccccaggcaatgctggaatggatatgatgtcgccgataataggtggtgagggtgaagctacatggctgctgccggatgttttggtcaatgtgttgagcggaggtgatgacggtcctggtgtggttagggaggtactcggggatggatcttgccgagttgcacttgggtcttcgggcaacggtgacatggtgacggttcttccgaacgaggtcgaggtcatcaggccgaagaagagtgacaagatcaagatactgaatggtagtttccgtgggcacacaggaaaacttataggtatagatggttctgacggaatagtgaggcttgacgacacatacgaagttaagatattagatatggtgattttggccaaactggcgacttgaaatggatgtatattttgttttgtaacgtgtccaccatagaacatattttgtaacaatgccctcgtttgcaataaagctttttgttgcttacgactacaatagttttgcacacttgtgcttttgcccaagggccgctcgtttttagaccttcagttgctgactggtcgtatatatcat

SEQ ID NO: 213536 - DNA, 2568 bp, Zea Mays
cgaggcggctcggctctacacctacgcgtgcgcggcctcgcctcttccctcgcacgactcgccgcgaggagtttccccttcctccgcgtgcatccccgcgagagctcgaaaacctagccgccaaatccatggctcgccgcgaccacgacgacgacgacgaggaagaggtcgaggaggaggcatacgacttggacgaggaggaggatgacgaggatgaggaagacgactacgaggaggaggcgaggcgcgggaaggcctcccgcggcggtggcaagggtggcggcgggcggaagcggtcacgcgaagacaacttcatcgacgactcggccatcgaggacgaggacgaggacgacgacgacgacggcgggggccggccgaggaagaagggcggcggcggggtgcgagggttcttcgacgaggaggcccaggtcgacgaggatgaggaagaagaggacgaaggcgagggagaggacgattttattaatgatgctggggccgaccttcctgatgaggatgttgttaggggctcaagacgtcattctattcctatgagagatgaggaagaggatattgatgagattgagagacaagtgcgggagagatacgcacgatccactcatattgagtacggtgaggaagctgcagaagtggaacagcaagctctgctgccgtccgtgaaggatcccaaactatggatggtcaaatgtgcgattggacatgagagagaaactgctatttgtctgatgcaaaagttcatcgatcggtcagaccttcagataaagtcagtcgtggcattggatcatcttaaaaattatatttatgttgaagctgaaaaggaggcccatgtcaaagaggcttgcaaaggtctaagaaacatttatgcttcagcaaaaataacattagtgccgataaaagaaatggcagatgtcctctccgttgagagcaaatctgttgatctttcaagggattcttgggttcgaatgaaattgggcatatataaaggcgaccttgctaaggttgttgatgttgataatgtacgtcaaagagtagacgtgaagctgatccctagaatagatctacaagctttggctagtaaacttgaaggggagtctgtaaagaagaaagcatttgtcccaccaccacgattcttcaatatcgatgaggcgagggagatgcatattcgtgtggaacggaggcgagataaagaatctggggagtactttgagtgggttgataatttgaagttcaaagatggtttcttgtacaaatctgtctccactaaatcgatccacacaaacaatattcaaccgaattttgacgaacttgagaagtttaagaagcctggtgatgacatgaatggcgacatggctagcttgtccactctgtttgcaaacaggaaaaaaggacactttatgaagggtgatgccgtcattgttattaaaggcgatttgaaaaatctggagggttgggttgagaaagtagaggatgaaaccgttcacatcaggccaaaaatatctgatctcccgaaaacattggccttcaatgaaaaagagctttgcaaatatttcaagcctggtgaccatgtcaaggtgatctcaggagttcaagaaggcgctactggcatggttgttaaagtggaagggcatgtcttgatcattttgtctgacacaactaaagaacatatccgtgtgtttgctgatcatgtcgttgaaagctctgaaattaccacaggaatcaccagaatcgggataattgggaagatggaaatcctgctacttggggtagcagtccagcttaccaggaaccccacaagctcggccatacgaagcccccacacctggatcagggtgggcaaacactccaggagttagtttcaatgatgctcctactcccagggataactatgcaaatgccccaagtccatacgtgccttccacgcctgttggccaaccaatgacgccaaactcagcctcatatcttccaggcacacctggtggtcaaccaatgaccccaggcaatgctggaatggatatgatgtcgccgataataggtggtgagggtgaagctacatggctgctgccggatgttttggtcaatgtgttgagcggaggtgatgacggtcctggtgtggttagggaggtactcggggatggatcttgccgagttgcacttgggtcttcgggcaacggtgacatggtgacggttcttccgaacgaggtcgaggtcatcaggccgaagaagagtgacaagatcaagatactgaatggtagtttccgtgggcacacaggaaaacttataggtatagatggttctgacggaatagtgaggcttgacgacacatacgaagttaagatattagatatggtgattttggccaaactggcgacttgaaatggatgtatattttgttttgtaacgtgtccaccatagaacatattttgtaacaatgccctcgtttgcaataaagctttttgttgcttacgactacaatagttttgcacacttgtgcttttgcccaagggccgctcgtttttagaccttcagttgctgactggtcgtatatatcat

SEQ ID NO: 213537 - DNA, 1790 bp, Zea Mays
ggcagttgtcgccgcgcataatcatactagtgacacaatcacagctagccacctccccgtccccagcatcgccaaaggtcacatcggtcggccacgggcgcggggcaagaaggaccaggtgacggacgagcaggagggaggaataatggcgggcgcgggcgcgggcgggtggaagaagcgggtgggccgctacgaggtgggccggaccatcggccggggcaccttcgccaaggttaagttcgccgtcgacgccgacaccggcgcggctttcgccattaaggtgctcgacaaggagaccatcttcacccaccgcatgctccaccaggtgttggccggcaggacaaagatatacatagtcttggaacttgtcactggaggtgaactgtttgatagaatagtccgccatgggaagctacgtgagaatgaagctaggaagtatttccagcagctttattgatgccattgattattgccacagcaaaaggagtttatcatagagatttgaagcctcaaaacttgcttcttgactctcgtggaaacttgaaactttctgattttggacttagcacattgtctcaaaatggagtaggccttgtacacacgacatgtggaacaccaaattatgttgcacctgaggtgctaagtagcaatggatatgacggatctgcagcagacatttggtcgtgtggtgtcattctctatgttttaatggctggttaccttccctttgaggagaacgaccttccacatttgtatgaaaagataactgcagctcagtactcatgcccatattggttctctccaggagccaagtcattgatccagagaatacttgatccaaatccaagaactcgtatcactattgaagaaataagagaagacccatggtttaagaagaactacgtaactattagatgtggtgaagatgaaaatgtcagcctagacgatgttcaagctatttttgacaatattgaggacaagtatgtatcagacgaagtaacgcacaaggatggtggtcctcttatgatgaatgcctttgagatgattgcactatctcaaggtttggatctctcagcattgtttgataggcaacaggagtttgtcaagcgccaaacacgtttcgtctcaagaaagccagccaagactgtagtagctacaattgaggttgttgctgagtcaatgggtctcaaggtccactcccggaactacaaggtgaggcttgaaggtccagcgtcaaacagagcgagccaatttgctgttgttctagaggtctttgaagttgctccttctctgttcatggtcgatgttcgaaaggttgccggtgacactccggaataccacaggttttacgagaacctatgcagcaaactttgcagcataatctggaggccaaccgaagtttctgccaaatctacgccgctgaggacgaccacctgctagccgcctagcccagcactgagctactgtagtggcatcaccaagagacgtgattcgtagccgtcagaaagggagagcttctgttgaatctagcattgctcgtggagctgggattcatgttgaccaccaggtgtttgtatattgtagtaacgctattgtagatagtctgtatagctccatttgtgcagttgtacgtagcaggaatatgttaaaaaacaacttttaatgtcaggtataatcggtttgcatccaggaagcatctccaacagtgtcttaaatcagtactctatttttaaatatagggttcaacttataaaaacagttttaacaatgccctattttatatttttttg

SEQ ID NO: 213538 - DNA, 1540 bp, Zea Mays
gaaacctgtgagggtcagtactataaatatccgatctcgtcggaaccctacccttttgagaactccccttctccgccactaccgaagcccttgtacccctcaccgccgccgctgctgctagggagcttccatccgcgcgcgcctacaacgagagctagcagcggtagcggccgttatcttgtcgctccggctccgttcgtgtacccaagtcccagcctagatgccgcagatggaggggtccactgatcagatcgccgccggctggttcgctaaggagccggcttccgagcggcccgtgggcttgccgaggaccggctcttccagtcgcctcaacgcgcaggcgccggagttcgtgccgcgggggccgccgccaccggcgccggcggttgtgctgccgcctccgccgcaggtgatccgcatgttcgccgcgcctcccccgccgccgcgtgggggcttcttctccgcgccgcagccccggccgttcgagtactatgcgcctatcggtgaacgcagcggatttgctgccaaggagcaacaggcgccggagctggaagcggagatgctcccgcccgccgcggtgaagacggagccggtggtggatgggctcgacgacgaggtggtgcacaagatcaccaagcaggtggaatactattttagtgacatcaaccttgctactacagaacatctgatgagattcattaccaaggattctgagggatttgtgccaatatcggtaattgctggctttaagaaagtaaaaacttctgtgcgcaataatgtgatgcttgctgcggctctccgaacctcatcaaaacttgttgtaagcgatgacggtaagagagtcaaaaggcagcagccatttacagaatctgatttgcaggagctccagtcccggattgttgtagcagaaaatcttcctggtgatccctcctaccagaatcttaagaagatattttcagctgttggaagactccaaatggcactggtcctgcaactaatagatcttccaagttagatatgctttttgctaacaagctgcatgctttcgtggagtacgaaactcctgaggatgctgcgaaggctattttggagctcaatgatgagaaaaactggagaaatgggcttagagttcggttgctgaatacttgcacggtgaagggggcaggcaaaggaaaaaacggaatgaatgaaactgatggaaatagtgaggaggatgtctccactttgaaccattctaacgagaaacagtttgaacaatcctctcaactgttagatgtactgccggaacacttggtaagatactgttgtgggccttctttttctaaacccaaaaaatagactagagcaaaaaggacctataatttatttagtgccttgacattttgtgaagaaccatttgggtgacgatccattaccacccctacatagaatacgagtgcatttatactcgtgttagataccatctgatttcaaatgtaggtcatttaggacagtaacatggccttctatatgacaaaggacttttaacatttgttaaaat

SEQ ID NO: 213539 - DNA, 1246 bp, Zea Mays
gaaacctgtgagggtcagtactataaatatccgatctcgtcggaaccctacccttttgagaactccccttctccgccactaccgaagcccttgtacccctcaccgccgccgctgctgctagggagcttccatccgcgcgcgcctacaacgagagctagcagcggtagcggccgttatcttgtcgctccggctccgttcgtgtacccaagtcccagcctagatgccgcagatggaggggtccactgatcagatcgccgccggctggttcgctaaggagccggcttccgagcggcccgtgggcttgccgaggaccggctcttccagtcgcctcaacgcgcaggcgccggagttcgtgccgcgggggccgccgccaccggcgccggcggttgtgctgccgcctccgccgcaggtgatccgcatgttcgccgcgcctcccccgccgccgcgtgggggcttcttctccgcgccgcagccccggccgttcgagtactatgcgcctatcggtgaacgcagcggatttgctgccaaggagcaacaggcgccggagctggaagcggagatgctcccgcccgccgcggtgaagacggagccggtggtggatgggctcgacgacgaggtggtgcacaagatcaccaagcaggtggaatactattttagtgacatcaaccttgctactacagaacatctgatgagattcattaccaaggattctgagggatttgtgccaatatcggtaattgctggctttaagaaagtaaaaacttctgtgcgcaataatgtgatgcttgctgcggctctccgaacctcatcaaaacttgttgtaagcgatgacggtaagagagtcaaaaggcagcagccatttacagaatctgatttgcaggagctccagtcccggattgttgtagcagaaaatcttcctggtgatccctcctaccagaatcttaagaagatattttcagctgttggaagtttgatttcaatccgaacttgctatcctcagactccaaatggcactggtcctgcaactaatagatcttccaagttagatatgctttttgctaacaagctgcatgctttcgtggagtacgaaactcctgaggatgctgcgaaggctattttggagctcaatgatgagaaaaactggagaaatgggcttagagttcggttgctgaatacttgcacggtgaagggggcaggcaaaggaaaaaacggaatgaatgaaactgatggaaatagtgaggaagca

SEQ ID NO: 213540 - DNA, 2132 bp, Zea Mays
ttcctcccgccagcacggtcagagagcatactatgacagcctcaaatctgtaacatgggggggggggcaaagtaattttttggaggtggggtgattcacttttcacgccgaagacaagacacagaccttagaggagaaatatggttgcggtttaaggcgcccaacgaatccaaaaatctggcaaaaacgtaggaagacgaagtggctacagatagacaagacggagggagtaaggacgaagaggagcgtggcagaaagaataatgagaggcgattacagtggaagactactggtcgaccgatgcaagctgcagaggatcgacggagggagtgaggagaaagagagacagaacaaaacgagcgagggtgggtgggaagtgaggaggaagagagacggagcaaaacgagggtgggtgggaagtgaggaggaagagagacggagcaaaacgagcgagacgaggctgacgctagcgtcacttggaagtctctagaggcgataagtacgaggggcgtatgagagagcaaggaagatggactaatgatccatcatcgaacggctacaaagttttctgacgacgtgaatgagctagtaggcgccgtccgttaataataaggaaatatgttgttaatatagatgtttaatgtataaaggaaaaaatgagatatcgaaaaaaaaatattttacgcgaggacggataggacattcggcgttcctaggtaccccgctgcttccgtgctcacctcgcctgcagggccgcagccgctggaagaacacgaagacgacgggagtgcggggtggcgtcgccgctggagcaccagctgtagccgccggctaggcctccgcgccgctctccgtggccaacgcgccgtcatgcttgcggcgtcggcgcggcggctgtccgccgccgcctcgttttcctcttcttccatgcgctccagccagctcgccgccgtactgaaccaacagaggtggatgcacgacaggaacaagaaggcgatggagctggtggccaagggatggagtgcgctccaggaggtcgaccgcgtcatcgactacgccgatctcaacgacaagcgcctcatcccgcttctaaggggcgctaaggaaaactttgagctggctttggagattgacaatggtaatacacatgcgaggtattggctgggaaaaatgcatttcaagtatcatgttcctggtgcttgcaaggcagttggtgctgctttgttggttgaagctgcaaatatgggtgatccagatgcacagtatgaacttggatgtcgactaagaattgagaatgactatgttcagtcggatcaacaggctttccattacattgagcaagctgttgatcagctgcaccctggtgctttatatcttctcggtgctgtatatctaactggggactgtgttaagagagatatggcttccgcgttgtggtgttttcatagagcttcagaaaagctatcgcatatggatccttgcttcttaaaggtgctgaaatacctgaagttattacaaggttcaactcaggcaagagtccatcaactgggaaaatgcggaaaaggacccaacagcaggatccagtaaagctagcgaaagaacagtttcaaattgcagctgaggcaggctgtgatctcggtctgcggtggttgaagaggcttgaagcttatgaaaaccaagaagaaaagctaaagcaggttcagcaatgatatccactgaaagaatcccattgcatttgtcgcatacaagtatggtatatggcagcatggttgctgcacataggtataccaataatttcctttcctgccttcattatgttggaggctattcgatcctcggatgttcgggtcaactttgcaggaagatatactgaaatttggatatttagactaacttcttggattataggcgattggatgttcactttgtacgatgtattagcgttgacattactggaagccctaattgtgagaagtagaaacatatcatgtgtgttgctacgggcattatggatgatttagaataaaattagactatataactacttatacgaaggaataaattgtggcatatgatgatgtggataacaaaatgttctgtggcttcctgacatcataattgcatgcgttagg

SEQ ID NO: 213541 - DNA, 2185 bp, Zea Mays
ttcctcccgccagcacggtcagagagcatactatgacagcctcaaatccttagaggagaaatatggttgcggtttaaggcgcccaacgaatccaaaaatctaagatgcgaatcgtaagaagcgactaacagatccaataaatgtgaagcagaaggaactagatctgctagaaggacaaagtatcgggaaaaaagaaaacatgcctttttctaacctggcaaaaacgtaggaagacgaagtggctacagatagacaagacggagggagtaaggacgaagaggagcgtggcagaaagaataatgagaggcgattacagtggaagactactggtcgaccgatgcaagctgcagaggatcgacggagggagtgaggagaaagagagacagaacaaaacgagcgagggtgggtgggaagtgaggaggaagagagacggagcaaaacgagggtgggtgggaagtgaggaggaagagagacggagcaaaacgagcgagacgaggctgacgctagcgtcacttggaagtctctagaggcgataagtacgaggggcgtatgagagagcaaggaagatggactaatgatccatcatcgaacggctacaaagttttctgacgacgtgaatgagctagtaggcgccgtccgttaataataaggaaatatgttgttaatatagatgtttaatgtataaaggaaaaaatgagatatcgaaaaaaaaatattttacgcgaggacggataggacattcggcgttcctaggtaccccgctgcttccgtgctcacctcgcctgcagggccgcagccgctggaagaacacgaagacgacgggagtgcggggtggcgtcgccgctggagcaccagctgtagccgccggctaggcctccgcgccgctctccgtggccaacgcgccgtcatgcttgcggcgtcggcgcggcggctgtccgccgccgcctcgttttcctcttcttccatgcgctccagccagctcgccgccgtactgaaccaacagaggtggatgcacgacaggaacaagaaggcgatggagctggtggccaagggatggagtgcgctccaggaggtcgaccgcgtcatcgactacgccgatctcaacgacaagcgcctcatcccgcttctaaggggcgctaaggaaaactttgagctggctttggagattgacaatggtaatacacatgcgaggtattggctgggaaaaatgcatttcaagtatcatgttcctggtgcttgcaaggcagttggtgctgctttgttggttgaagctgcaaatatgggtgatccagatgcacagtatgaacttggatgtcgactaagaattgagaatgactatgttcagtcggatcaacaggctttccattacattgagcaagctgttgatcagctgcaccctggtgctttatatcttctcggtgctgtatatctaactggggactgtgttaagagagatatggcttccgcgttgtggtgttttcatagagcttcagaaaagggacatgctggtgcagctatcgcatatggatccttgcttcttaaaggtgctgaaatacctgaagttattacaaggttcaactcaggcaagagtccatcaactgggaaaatgcggaaaaggacccaacagcaggatccagtaaagctagcgaaagaacagtttcaaattgcagctgaggcaggctgtgatctcggtctgcggtggttgaagaggcttgaagcttatgaaaaccaagaagaaaagctaaagcaggttcagcaatgatatccactgaaagaatcccattgcatttgtcgcatacaagtatggtatatggcagcatggttgctgcacataggtataccaataatttcctttcctgccttcattatgttggaggctattcgatcctcggatgttcgggtcaactttgcaggaagatatactgaaatttggatatttagactaacttcttggattataggcgattggatgttcactttgtacgatgtattagcgttgacattactggaagccctaattgtgagaagtagaaacatatcatgtgtgttgctacgggcattatggatgatttagaataaaattagactatataactacttatacgaaggaataaattgtggcatatgatgatgtggataacaaaatgttctgtggcttcctgacatcataattgcatgcgttagg

SEQ ID NO: 213542 - DNA, 966 bp, Zea Mays
ctgggatgccatcttggagaaactccaagtggtgctgctttgttggttgaagctgcaaatatgggtgatccagatgcacagtatgaacttggatgtcgactaagaattgagaatgactatgttcagtcggatcaacaggctttccattacattgagcaagctgttgatcagctgcaccctggtgctttatatcttctcggtgctgtatatctaactggggactgtgttaagagagatatggcttccgcgttgtggtgttttcatagagcttcagaaaagggacatgctggtgcagctatcgcatatggatccttgcttcttaaaggtgctgaaatacctgaagttattacaaggttcaactcaggcaagagtccatcaactgggaaaatgcggaaaaggacccaacagcaggatccagtaaagctagcgaaagaacagtttcaaattgcagctgaggcaggctgtgatctcggtctgcggtggttgaagaggcttgaagcttatgaaaaccaagaagaaaagctaaagcaggttcagcaatgatatccactgaaagaatcccattgcatttgtcgcatacaagtatggtatatggcagcatggttgctgcacataggtataccaataatttcctttcctgccttcattatgttggaggctattcgatcctcggatgttcgggtcaactttgcaggaagatatactgaaatttggatatttagactaacttcttggattataggcgattggatgttcactttgtacgatgtattagcgttgacattactggaagccctaattgtgagaagtagaaacatatcatgtgtgttgctacgggcattatggatgatttagaataaaattagactatataactacttatacgaaggaataaattgtggcatatgatgatgtggataacaaaatgttctgtggcttcctgacatcataattgcatgcgttagg

SEQ ID NO: 213543 - DNA, 882 bp, Zea Mays
ttcatacgggtcccttctgctcattggaatgactatgttcagtcggatcaacaggctttccattacattgagcaagctgttgatcagctgcaccctggtgctttatatcttctcggtgctgtatatctaactggggactgtgttaagagagatatggcttccgcgttgtggtgttttcatagagcttcagaaaagggacatgctggtgcagctatcgcatatggatccttgcttcttaaaggtgctgaaatacctgaagttattacaaggttcaactcaggcaagagtccatcaactgggaaaatgcggaaaaggacccaacagcaggatccagtaaagctagcgaaagaacagtttcaaattgcagctgaggcaggctgtgatctcggtctgcggtggttgaagaggcttgaagcttatgaaaaccaagaagaaaagctaaagcaggttcagcaatgatatccactgaaagaatcccattgcatttgtcgcatacaagtatggtatatggcagcatggttgctgcacataggtataccaataatttcctttcctgccttcattatgttggaggctattcgatcctcggatgttcgggtcaactttgcaggaagatatactgaaatttggatatttagactaacttcttggattataggcgattggatgttcactttgtacgatgtattagcgttgacattactggaagccctaattgtgagaagtagaaacatatcatgtgtgttgctacgggcattatggatgatttagaataaaattagactatataactacttatacgaaggaataaattgtggcatatgatgatgtggataacaaaatgttctgtggcttcctgacatcataattgcatgcgttagg

SEQ ID NO: 213544 - DNA, 726 bp, Zea Mays
ttaaataattgatagtatgatatggattacatgctcaaaggacatgctggtgcagctatcgcatatggatccttgcttcttaaaggtgctgaaatacctgaagttattacaaggttcaactcaggcaagagtccatcaactgggaaaatgcggaaaaggacccaacagcaggatccagtaaagctagcgaaagaacagtttcaaattgcagctgaggcaggctgtgatctcggtctgcggtggttgaagaggcttgaagcttatgaaaaccaagaagaaaagctaaagcaggttcagcaatgatatccactgaaagaatcccattgcatttgtcgcatacaagtatggtatatggcagcatggttgctgcacataggtataccaataatttcctttcctgccttcattatgttggaggctattcgatcctcggatgttcgggtcaactttgcaggaagatatactgaaatttggatatttagactaacttcttggattataggcgattggatgttcactttgtacgatgtattagcgttgacattactggaagccctaattgtgagaagtagaaacatatcatgtgtgttgctacgggcattatggatgatttagaataaaattagactatataactacttatacgaaggaataaattgtggcatatgatgatgtggataacaaaatgttctgtggcttcctgacatcataattgcatgcgttagg

SEQ ID NO: 213545 - DNA, 1312 bp, Zea Mays
ctgattcttttgttagcaactggcaggcactcagaatcttgcgataacatatacaaagtccggtcctttgacgcagcaggagcggtgtgtgcctacgcattcttcctgatcagtgttgatggtcttagactatctccaaccgagtagccaatacaatacgcatacacaaattgcctgaccttgtagcactgtagcgcttgggaaatacttccaacgggctatgcaaactaaatacgcatctacggcgctggacccctcggcacctaaaactgagtcctctccacccacgactcaaaccctggcaaaccaactgtcgggaggggaggccgaagagagcagcgagttggtggcgcagacgaccacccgcgacgggcgcacacccccaccggcgacggcgcgcgcggtcaccggcaaccgacgcggacgaccacatctgagatggtaatgagcaagcccaggatttgtttgggcaagaccagtgggctaatggttttactgctgcacttcaagactttgatgatgctcaacctacccagtacaacatggccagcttcgaccaatctagccagatgtacgaacatgactcggacagtaatatagatatggagaatgtggatgccccatcaaagaaatctcagaagggcacaaagaaatctcagaagggcggaaaacaaaaggttgtgtcgaggagaggaggttcttttaccaaagaggaggatattgtgatttgctcggcattcctcaatgttagcaaagaccctattacaggtgtcaatcaaaattcgggtgggtattacaaacgcatgcatgaatacttcaacaagcgcaaaccagaaggttccaaccgtagccagatctcaattcaacataggtggggagccatacagaaggcagtgaataagttttgtgccctcaaatcatcagtagataggcgcaatgagagcggtaaaagcgagcaggatcgaattgatgatgctgttttcatgtatgagaagggtgaaccctttgtcttcatgcattgctggaagctacttcgcaacgaggcgaaatggaacaataggttcctagagaccatcagtaagccaccatcttctcaagtgccacccgaggcagctgtcgatgtgctgcaaggcggtcacgcctgtacgtcctgtggcctgggactgaccctccccatcgtcgtttgcgtccaagttcctggatgaccactgcagcagcagcagcaacaaggtcatcgtcgtcattggatgaagccgcagctgccccgagcatcgaagttttcagatacctccaagccatgcaaacaacagcg

SEQ ID NO: 213546 - DNA, 2489 bp, Zea Mays
aacctctccccccaccacctgctgcaatcgctagcgtgcgcataaattaacaaatcccacctccactaatcgcaccacccggtaattgcaaacatcgcaagtccacggcccgcccccaatcggccaatcctcaccccgcatcttaaggttcctgtcgcctcagcggctgcctccagtcctccgccctcccgctccagcggggctcgccattgatggagtacgagcgcatccacgggccgctcccgcgccatcagctaagctgcgagcaatgcttcgcgggatagagaaacgccagcgcaacaacggcgaggactcgtctccggaggccaacgactccggcgagctcgacgaccggaggagcttggaatgctccacctccaccgagatgtcgagcaacagcggccacaggtcaagaaaccgtgccccggacgacgacagcttcgactcggagagcagctcgtcggggccgccgacggtgaagaggtcggccgcggtggccgcgttgctgccgcccttctctcggccaacgccgtccaagtgggacgacgccgagaagtggatctccagcccgacgtcaaaccgtactggccgtacggggcctaccgctggagctgtgccgaagaagtctgcattggccttccctgactatggaggccgcccgccagccgttgctaaggtggtagcggatgtgcctaccaacgctggaccagatggtctcgcccatcctgatttacttaagcctggacacaatgcttcagtagttgttgacggaacagcacctgcagttaggtctgtctgtatgagagacatgggaacagaaatgactccaattgcgagccaagagccttctcggaccgcgactcctataatcgcatctagtccaacctcctctcggacaccaaccccgcaacgcaccgcagaattcagtgtgagtaatatagatcctaaaaagatcgagatgcctgaagaggaggaggtacagatgagtacgagacaggaaattatggatcttggtgaaaggttagggaagaccactatagccgcatgggcaagcaaggaagagaaatctgccgcacgtttcacggataccacagcctacaaggctgccgatatcggtagggagaatcgagccgcagattggcaggagacggagaaggcgaagtatcttgcaaggtttcagagggaggaagcaaagatccaagcttgggaaaatctgcagaaagcgaaaattgaagctgagatgaaagggatagaggccaagatagagcggaaacgggcgcgcgagcaggacaggctcgccagcaagctggcagccgtaagccaccgagcggaggcgaagagggagaccgcggaggcgaggcggaaccaggaagccgcgaggacggaggagcaggcggcccggatccgatacaccgggcatacgccttcgtccttctcctgctggtgctggtgcccgtgacacccagcatggacagtggtagaaaaattccaacggttctatctttccccatgcatgaacatggagaaggaaaccttcccgttatcgcgtcgtcgtcactcacgcggttgcatggagtggactggggtagtagggtggcgccacctgtcctcgtccaccttccacccctctcgcccggggctataaatggttacgagatccggatagcgcgaacccacttggatccaaaccctgacgacggacggctcccccctcgcccccacgacaaattcctcccgttccgttcttcgtcgcagatacaccggccggcagcaaccaccctatggagtcgtcggcggcgatgacgatggaccaccaccgcgcggcgccgtcgctgtcgacggaagagaaacggcggatcgagcgggtggcccggtgcgtggcgcgggaccgggacggcggggacctcacggagaagctgctgctgcggctgctcggcctcacgcgcaacgcccgccgctggggcttcctcgcgccggaccacccgctccacccctactacctccagcacaaggtctccgagcgctgccggatcctccgcccgcgccacgccgccgccgaccggcggtgatcccatgcatatgcatgcggacgtgcagcggatcgaccattgataggactcgatcggccattaaaaaaaaactatgcgcgcaccacctggtctccttctcttttatgacatgagtaattggtaatccaacaatcatgcaacggattcggaaatacattgatgtgcctaattgcagcgtcaattatatgatagcagttggccattgatatttttcagatttgagatcgaaatgtttatgtgccgatctctttctctctatgcataaataggaggcaactagtagaaaggaaaatatattatcatctatagctgattgcaatctcacattcttttatttcttaggctcatagatggtgggatccgatagacaggatatatgatattagtgtgtttacatcttaattcttttgcactagattt

SEQ ID NO: 213547 - DNA, 1650 bp, Zea Mays
ctgattcagtagatttggcattggggcgctgaatctggttgtctgcggactggttgctttatgtggatctgaagttctgcaatgagagaaagccttaaaaatgcaaagagggattttaccaagactgaagacgacttgaaatctctgcagagcgtggggcaaataattggagaggttctccgacctcttgataatgaacgctttattgtgaaggccagcagtggtccccgatatgtggtcggttgccgaagtaaagtagacaaggagaagttgacatctggaactcgtgttgtacttgacatgacgaccttgacaataatgcgcactcttccacgggaggtggatccagtggtatataacatgcttcatgaagatccaggaaatgtcagttactctgctgtaggcggtttgtctgatcagattagggagctcagggagtccattgagttaccacttatgaaccctgaactctttcttcgggtgggaattaagcctcctaagggtgttctactctacggtcctccgggaactgggaagaccctattggcaagggctatcgccagtaacatcgatgccaactttttgaagattgtttcaagcgctattattgacaaatacattggagaaagtgctcgtttgattagagaaatgtttggctatgcacgtgatcaccaaccatgcatcatcttcatggatgaaattgatgccattggtgggcgaagattcagtgagggaactagtgctgatcgtgagatccagcggacgttgatggaactccttaatcaattagacggttttgatgagctcggaaaggtaaagatgatcatggccacgaatcgacctgatgttctggaccctgcgctcctgcgtcctggacgtttagacaggaagattgaaattccgctacccaacgagcaatcaagaatggaagttctaaaaatccatgcagctggtattgccaagcatggggaaattgattatgaagcagtcgtgaaactagctgaaggtttcaatggtgctgatcttcggaacgtgtgcactgaagctggtatggctgcaattcgtgcagagagagattatgtagtccacgaagacttcatgaaggctgtgcggaagctaaatgatgcgaaaaagctggaatcaagtgcgcattacagcgcagattttggcaaagagtaatgtatgatgctggacagatgcataaggcgtgtatcatcagggagctctgtcagatgcgatgcaaaagcgaaagaaaccagctatttatgttcaggctccaggcagctccactttttcctgatattcacaattttagtgaggaggattgtcaagctgaccagtgggggaaatcagtcgagaatttagtagttctgcgccagatggcctttgcttctgtaaatcgtacgtaatctgcttccgtgcgtcttagtctggtaataactctggttggacctgttctgtttccatgtacttttggacagtgtgcctgactccgcggtaacagaggaaaaaagaacattttgtattcatcctgaactacaattccccctcatttgtactattcacactcccattactgcgtcagggagtcgatcagacatgtgattaatttcggttatacgtttcgtcaaccaaaggcacgggtccata

SEQ ID NO: 213548 - DNA, 986 bp, Zea Mays
ctcacttttgctggtctgaggttggaaacagcggggcagctggatccgaggcaacatctgccatgatgcagaggttctgggattcagcaatgtccattggacctattgatgatgacgatgactcgagaagtgaagggtcgactagagtggtatctgaggcaacagatataggaagaccagccttctttccagcttctggcttatcaaacacttttgggttcaagattcaggataagcaagggaggatgcacagatttaactgtgaaacaagcggcctggcagagctgataaccagcattcttcagagggtcggcgacgacattgacagaaaacacctgccgcaaattttgtacgaagacgaggaccgtgataaggtcgtgctttcgtcggacagtgaccttatagccgctgtggaccatgcgagaaagatcggttggaagagcataaggttgcatctggattacgccggcgttggccggcggaagggagggggtggaccttcggacttggagtacgctggcaaggacgcagcatgggcttctgcgtacagcgccgtcgcggcaggggcggctctggttgctgggctcggtgtgatggcctacttgaaacggtcggggtaaaagcttggaggcggagagcacgacggcagagggagcacacgcttctcatcggatctgtgtgatacaaatgatactgcgtcggaacgagcagaatggctgtgtaagtaattcttgtgaaaaagagagagagagagggagattttaataatactagtgtcaaggcagtgaatggccgcctgcatacgagggagtacacggaactggtcgagcctttttggtgggttcagagtctccacgactaatttaccacggctgttagcgtcgtcacgattgtatttgtatcataaatcacacgatcattatacaagaagagtcttgttgagcctcaccctgtctcgtagagcctgactgactggctggttacgc

SEQ ID NO: 213549 - DNA, 2216 bp, Zea Mays
acgggacgggggcatccgaacaccaccacccagcacccaccagctcggcgaaaaaaaagaaggaaaattttagataccctgccgcacgccgcgaccttcggccccgtctccggtctccgccttcccccacctattggggagcgctcctgattcgcgggagccagcgggcgagacaaagagaatcccccgctcctgcgccgccgcggatcagcgccgtcgccgatcggaggctctcgcttcccccggcgggcggcgcgcgccgggagatggacggcggcgcgggcgcgggcgccggccggaggaacgtctcatcgtcctccggatccaggaggagggtcctgcccgccgagaacgggcacggccatgacgccccgccgccctccaggcggtcctccgtctccctctcccgcggccactccacgtcactgaccggcgagaggaccgtgaaaaggctgaggctgtccaaggcgctgacgataccggatcacacaaccgtgcacgaggcttgtcggaggatggcgtcacgcagggttgacgccgtgctgctgactgactccaacgctttgctctgtgggatcctcaccgacaaggacataaccacaagggtgattgctcgtgagttgaagatggaagagacaccggtctccaaggtaagttcaggcatctgcctgtcgtggagaatggcgaggtcattgcaattctggacatagccaagtgcctatatgatgctattgcacggatggaaagggcggcggagaaaggaaaagcaattgccgctgccgtcgagggcgttgaaaagcattggggagcagctgtgcctggtcctaacaattttattgagacgcttcgagaacggatgtttaggccatcgctgtctactattatctctgagaatccaaagtagagttgtcactgttgcaccatcagacatggtgttgacagcatcaaagaagatgctggaattaaaagtgagttcagcagttgtagcaattgaaaacaaacctggaggaattctgacatctagagatatattgatgcgtgttatcgcccaaaatcttcctcctgagtccaccacggtcgagaaggtcatgactcagagtcctgaatgtgccacagtggacaccccaattcttgatgctcttcacacaatgcatgatgggaaatttttacatttgcctgtcctggacagggatggaaatgttgtgactgttgttgatgttcttcacataactcatgctgcaattgctacggttggaaacagcggggcagctggatccgaggcaacatctgccatgatgcagaggttctgggattcagcaatgtccattggacctattgatgatgacgatgactcgagaagtgaagggtcgactagagtggtatctgaggcaacagatataggaagaccagccttctttccagcttctggcttatcaaacacttttgggttcaagattcaggataagcaagggaggatgcacagatttaactgtgaaacaagcggcctggcagagctgataaccagcattcttcagagggtcggcgacgacattgacagaaaacacctgccgcaaattttgtacgaagacgaggaccgtgataaggtcgtgctttcgtcggacagtgaccttatagccgctgtggaccatgcgagaaagatcggttggaagagcataaggttgcatctggattacgccggcgttggccggcggaagggagggggtggaccttcggacttggagtacgctggcaaggacgcagcatgggcttctgcgtacagcgccgtcgcggcaggggcggctctggttgctgggctcggtgtgatggcctacttgaaacggtcggggtaaaagcttggaggcggagagcacgacggcagagggagcacacgcttctcatcggatctgtgtgatacaaatgatactgcgtcggaacgagcagaatggctgtgtaagtaattcttgtgaaaaagagagagagagagggagattttaataatactagtgtcaaggcagtgaatggccgcctgcatacgagggagtacacggaactggtcgagcctttttggtgggttcagagtctccacgactaatttaccacggctgttagcgtcgtcacgattgtatttgtatcataaatcacacgatcattatacaagaagagtcttgttgagcctcaccctgtctcgtagagcctgactgactggctggttacgc

SEQ ID NO: 213550 - DNA, 2542 bp, Zea Mays
ccatgcgtctaaacagtcgtgtcgacgcgggattgcgcgggtcggccgcccgacgggtggcgtgggccgcgtcgacacggttggatttcgatcggaggcccggagctgctctctctgcagtctgctatggtccccacatccgcatcgcacgcctcgcggcattatccagccccagccgtcagccactcagccgcctctcgtcgacacgaatgcgcaaagcaaacaccacgcgggccaggccaggcgcgcacgcacgggacgggggcatccgaacaccaccacccagcacccaccagctcggcgaaaaaaaagaaggaaaattttagataccctgccgcacgccgcgaccttcggccccgtctccggtctccgccttcccccacctattggggagcgctcctgattcgcgggagccagcgggcgagacaaagagaatcccccgctcctgcgccgccgcggatcagcgccgtcgccgatcggaggctctcgcttcccccggcgggcggcgcgcgccgggagatggacggcggcgcgggcgcgggcgccggccggaggaacgtctcatcgtcctccggatccaggaggagggtcctgcccgccgagaacgggcacggccatgacgccccgccgccctccaggcggtcctccgtctccctctcccgcggccactccacgtcactgaccggcgagaggaccgtgaaaaggctgaggctgtccaaggcgctgacgataccggatcacacaaccgtgcacgaggcttgtcggaggatggcgtcacgcagggttgacgccgtgctgctgactgactccaacgctttgctctgtgggatcctcaccgacaaggacataaccacaagggtgattgctcgtgagttgaagatggaagagacaccggtctccaaggtcatgacccgaaaccctgtatttgttctcgcggacacgcttgcagtcgaggcgttgcaaaagatggtgcaaggtaagttcaggcatctgcctgtcgtggagaatggcgaggtcattgcaattctggacatagccaagtgcctatatgatgctattgcacggatggaaagggcggcggagaaaggaaaagcaattgccgctgccgtcgagggcgttgaaaagcattggggagcagctgtgcctggtcctaacaattttattgagacgcttcgagaacggatgtttaggccatcgctgtctactattatctctgagaatccaaagtagagttgtcactgttgcaccatcagacatggtgttgacagcatcaaagaagatgctggaattaaaagtgagttcagcagttgtagcaattgaaaacaaacctggaggaattctgacatctagagatatattgatgcgtgttatcgcccaaaatcttcctcctgagtccaccacggtcgagaaggtcatgactcagagtcctgaatgtgccacagtggacaccccaattcttgatgctcttcacacaatgcatgatgggaaatttttacatttgcctgtcctggacagggatggaaatgttgtgactgttgttgatgttcttcacataactcatgctgcaattgctacggttggaaacagcggggcagctggatccgaggcaacatctgccatgatgcagaggttctgggattcagcaatgtccattggacctattgatgatgacgatgactcgagaagtgaagggtcgactagagtggtatctgaggcaacagatataggaagaccagccttctttccagcttctggcttatcaaacacttttgggttcaagattcaggataagcaagggaggatgcacagatttaactgtgaaacaagcggcctggcagagctgataaccagcattcttcagagggtcggcgacgacattgacagaaaacacctgccgcaaattttgtacgaagacgaggaccgtgataaggtcgtgctttcgtcggacagtgaccttatagccgctgtggaccatgcgagaaagatcggttggaagagcataaggttgcatctggattacgccggcgttggccggcggaagggagggggtggaccttcggacttggagtacgctggcaaggacgcagcatgggcttctgcgtacagcgccgtcgcggcaggggcggctctggttgctgggctcggtgtgatggcctacttgaaacggtcggggtaaaagcttggaggcggagagcacgacggcagagggagcacacgcttctcatcggatctgtgtgatacaaatgatactgcgtcggaacgagcagaatggctgtgtaagtaattcttgtgaaaaagagagagagagagggagattttaataatactagtgtcaaggcagtgaatggccgcctgcatacgagggagtacacggaactggtcgagcctttttggtgggttcagagtctccacgactaatttaccacggctgttagcgtcgtcacgattgtatttgtatcataaatcacacgatcattatacaagaagagtcttgttgagcctcaccctgtctcgtagagcctgactgactggctggttacgc

SEQ ID NO: 213551 - DNA, 3051 bp, Zea Mays
gcagagcgacgagcgacgagctaaaccccgaccgagtcgctgcttgggtgcccaagatagccctaccgcctcgcctctctcgttccccctcatcgccacgccagtcgcctccactcccagtcatctcccatcaccgacgacgtgtcgaggcgagagaagagggcgagtccaagtctagggttcccgccgcatcgacacgggcatcgcaccgcaccgcgaggggcgggcacggaggaagatggcaccgcgcgggcgcgtggagctgcggcggatcgaggacaaggcgagccggcaggtgcgcttctccaagcgccgcgcggggctgttcaagaaggccttcgagctggccctgctctgcgacgccgaggtcgcgctcctcgtcttttcccccggcggcaagctctatgagtactcctcctccaggtagtttgatgtgaagttcaaagcattgctctttaattgaatcaaagaatctcttgaaacaaagacatagaagatacatatgaccgctatcatcaatttgcgggagcaggaagaaaagtgaacggacataacaacgataaccgggatgtagctgcttcagatttacagtcgagacttaaggagatcgcaacatggtctaaacaaaacaacgctgaggagtcggatgccaatgaacttgagaaacttgaggaactcctgacaaatgctttgaggaatacgaaagccaaaaagatgttggcaaaagaaaacaatggtggtgccggtgcaagtacaagcagccagatgttgctttactcggcagagcgtgcaaccgacaaatgaaactgtgccgctccttgccgaacttaagccccgttacgttgtcgcacaaagtttatttcctagcactgtgcttgctgcttatgtttgtttggatgtgccaacctgcagtgaccctcgtggagcctgggtctcacgctcctcttacctagtgtgatgtgcagaaaaagtgtgatgctgtaaaattatgtgattgcctagcagatgtcaaattttcaatcagtagctaactccttttaatggtacaggcttgcatgatttcatctgcaaaaaagagagggcgggttgggtgtcaaatctagccggatgttttcgcaagtttgtgataaaaattgtgctgtacacttgtgtttatgcagttgccctaggcgtcagtgggctgaaaggtcactgaccggcgagaggaccgtgaaaaggctgaggctgtccaaggcgctgacgataccggatcacacaaccgtgcacgaggcttgtcggaggatggcgtcacgcagggttgacgccgtgctgctgactgactccaacgctttgctctgtgggatcctcaccgacaaggacataaccacaagggtgattgctcgtgagttgaagatggaagagacaccggtctccaaggtcatgacccgaaaccctgtatttgttctcgcggacacgcttgcagtcgaggcgttgcaaaagatggtgcaaggtaagttcaggcatctgcctgtcgtggagaatggcgaggtcattgcaattctggacatagccaagtgcctatatgatgctattgcacggatggaaagggcggcggagaaaggaaaagcaattgccgctgccgtcgagggcgttgaaaagcattggggagcagctgtgcctggtcctaacaattttattgagacgcttcgagaacggatgtttaggccatcgctgtctactattatctctgagaatccaaaagttgtcactgttgcaccatcagacatggtgttgacagcatcaaagaagatgctggaattaaaagtgagttcagcagttgtagcaattgaaaacaaacctggaggaattctgacatctagagatatattgatgcgtgttatcgcccaaaatcttcctcctgagtccaccacggtcgagaaggtcatgactcagagtcctgaatgtgccacagtggacaccccaattcttgatgctcttcacacaatgcatgatgggaaatttttacatttgcctgtcctggacagggatggaaatgttgtgactgttgttgatgttcttcacataactcatgctgcaattgctacggttggaaacagcggggcagctggatccgaggcaacatctgccatgatgcagaggttctgggattcagcaatgtccattggacctattgatgatgacgatgactcgagaagtgaagggtcgactagagtggtatctgaggcaacagatataggaagaccagccttctttccagcttctggcttatcaaacacttttgggttcaagattcaggataagcaagggaggatgcacagatttaactgtgaaacaagcggcctggcagagctgataaccagcattcttcagagggtcggcgacgacattgacagaaaacacctgccgcaaattttgtacgaagacgaggaccgtgataaggtcgtgctttcgtcggacagtgaccttatagccgctgtggaccatgcgagaaagatcggttggaagagcataaggttgcatctggattacgccggcgttggccggcggaagggagggggtggaccttcggacttggagtacgctggcaaggacgcagcatgggcttctgcgtacagcgccgtcgcggcaggggcggctctggttgctgggctcggtgtgatggcctacttgaaacggtcggggtaaaagcttggaggcggagagcacgacggcagagggagcacacgcttctcatcggatctgtgtgatacaaatgatactgcgtcggaacgagcagaatggctgtgtaagtaattcttgtgaaaaagagagagagagagggagattttaataatactagtgtcaaggcagtgaatggccgcctgcatacgagggagtacacggaactggtcgagcctttttggtgggttcagagtctccacgactaatttaccacggctgttagcgtcgtcacgattgtatttgtatcataaatcacacgatcattatacaagaagagtcttgttgagcctcaccctgtctcgtagagcctgactgactggctggttacgc

SEQ ID NO: 213552 - DNA, 3073 bp, Zea Mays
gctagcgtcagcctcgtctcgctcgttttgctccgtctctcttcctcctcacttcccacccaccctcgttttgctccgtctctcttcctcctcacttcccacccaccctcgctcgttttgttctgtctctctttctcctcactccctccgtcgatcctctgcagcttgcatcggtcgaccagtagtcttccactgatttgaggctgtcatagtatgctctctgaccgtgctggcgggaggaaggagatgatttaagttctctgcgtttataaccagaaagaggaggataatccaatcatgtgaaatttatatttgcctgttcccaccatactgtaatatgaatacaaggatggcttgatctggcaagtgctcgccattctatgggcccatcatgcttttcgagtacactgtttgatcacaaggagcggtctgctgccactaaacttcaagttgttgatcatgatggcctgaaaaattatcggggatatgctcatatgccttggccttaatttaaactacttgtatgagatggagaaatgtcacaaaacacaggatgaagacgactccaggaatccacccatgcctctcagtgactcagtggcacaaacgacagcctagtcagacaaccatcttgctcgtcatgttggtgtggtgggggtcaaaagcgtcttgctgctgaaattgatggtataccgtacaagcatttacctttgatttttgctgacgttaatatgttgcttcactaaaggactaggagacgtcttcacatcacggagtagaccactcagcaacaacagtgcaacggtgttcggacttttgttcacatatgggagtgtttaagctcctgcacctagatttagaaacaccaccatgtaaaatagacaagacagtgcttttgcaaacatgatgctaccacgagacccgaactcatccttcagcgatggaggcctccacagaagctactaggatggcctccagcttatgacctctcactgccgaccgcaccttcctcagaatatgttgcttcatcaccgccctctcagcagactggagtttcttgcacatgttcaatccctggatgtacctcgacaccgcgccgccgaaaggatcaccggctttctcaagggccacgagcttctcgacgatctgagaagcgagcattctctcgatacagggtttggttccaacctccgtgatgtccaccagaaattgcatggctagatccttggtcttcaaagacttgcggtccagcaagttcaccagtttctctatggttcttagttgcagaaatctttgcaagacaagggatccacccttcgcaaagacgatctgatggagagcgtagtacgctgaatcctggagctcatcgatgttgcactgcagcatgtcaatgagctcgtgaacaatattaagctccaggaacctatgcacgtatggctctcctccagtgcaggccaatttcatcaccaaaaaggcggtctgggacctcacctggttcttttcaacctctctgcgttgtagcagccaagccaacctatcaaacagatggcttcccagaaggaggatattatgaagaatcacctcaaatgattgttgaggctttggtgattgcggcacatttctgtcagataaaacaaatctttccaaactgatccgagcatgccagggcaaatgaagcagcactgcaggccctatgcacccttgaagtggagcaccaagttcacagaatgtttttagcgtgataatcgcgtggtgctgtgagatctcagaaccattgcccagaagcacaagaagtttattgtcaattcctgattcaatcattgtctcaacagccttcagctttccaacctttgtcagagatgcaagtgttgtaaacacaatttcatgccactgctcattttctgcagtcaagagatctgcaattcgaaccatgggaattcttgacaaaatttcatccgcaattgtggcatcaacatgctcagatatcttggtcagaacagaagagaggttggctagagttgaagtatcttcacaggcaccaagaagatcaattaatttatctatggaacctgctatttcaagagagtgagcaagatttatgtagtctgatggggaaaatataactgtaattgcggcagtgactgcaaaaataagatctagtgaccctatagaaattatctctgctattcgagggccaagtattttgctgaacccaattctatttgtctcaagttcagacagggatctgcatgccatgagagcttgagttgtgtttaccaataaaatctcgatgtccatgaattctagcagagaaaagaatgatcccatcttctgttcggctggccgtttcatacactctttgccaaaaacaaaaagccaaggagctactaatgccacattatatgaaatggaatcagataaaagagcacgagtggcatcatttgttttgttctccaggtaaagtgagaccatgtcatgcatatgatacaacggctggtcctccagtttgataataagtgatccttcgactagttttgaaaccacgagagagaacagtccgcactgctcaagcgctgaccaaatggattccagacaagcctcaggaacaggttcttcccaagagatagctgcaagagccatgaaaaaaattcttgaattttctggcattgcttctaagctgaactcaaaagatccaaatatggtcaacgtagtctccacatctttctcattgacgtatgaaactggaccaggtgcacatgtggcatatgttgagaggttggatatagctttctcccatttttccactctagtttccttcctcagagccttgcccatgacagcaactgtaaggggatggtgaccacatcgatccaacaagacttctgcgacaggctgtgaagtatagagaagttaaacattcaaaaaccatggtgtttggaatttttagttattctattttttcatgatgtatcttcttctaaaatatcttactttgcaagtttggcacaactactaattgaaaataaatatgtatataaaaaatactgaacatatttgtaaagctaaacacgat

SEQ ID NO: 213553 - DNA, 3412 bp, Zea Mays
gctagcgtcagcctcgtctcgctcgttttgctccgtctctcttcctcctcacttcccacccaccctcgttttgctccgtctctcttcctcctcacttcccacccaccctcgctcgttttgttctgtctctctttctcctcactccctccgtcgatcctctgcagcttgcatcggtcgaccagtagtcttccactgtaatcgcctctcattattctttctgccacgctcctcttcgtccttactccctccgtcttgtctatctgtagccacttcgtcttcctacgtttttgccaggatttgaggctgtcatagtatgctctctgaccgtgctggcgggaggaaggagatgatttaagttctctgcgtttataaccagaaagaggaggataatccaatcatggtaactaaatattttggtgtacttttgctgcatgtgtctcccagagttgcagatttgcagtgctcgccattctatgggcccatcatgcttttcgagtacactgtttgatcacaaggagcggtctgctgccactaaacttcaagttgttgatcatgatggcctgaaaaattatcggggatatgctcatatgccttggccttaatttaaactacttgtatgagatggagaaatgtcacaaaacacaggatgaagacgactccaggaatccacccatgcctctcagtgactcagtggcacaaacgacagcctagtcaggtaacacaataacatatcagccatatgctatacatgcatatactatgttatggaaataactccgaagagtatatcacattctaactagttatgtatgcaaacactaatgcaagacaaccatcttgctcgtcatgttggtgtggtgggggtcaaaagcgtcttgctgctgaaattgatggtataccgtacaagcatttacctttgatttttgctgacgttaatatgttgcttcactaaaggactaggagacgtcttcacatcacggagtagaccactcagcaacaacagtgcaacggtgttcggacttttgttcacatatgggagtgtttaagctcctgcacctagatttagaaacaccaccatgtaaaatagacaagacagtgcttttgcaaacatgatgctaccacgagacccgaactcatgtatggccaaacatgttaacatattttgtatgtcaccaaaacgcttatttacatcaatgagcgattatctgaactgttgaatgctcaccaaaatgcttatttctatttcctactgctacttgctcctttgaagccttcagcgatggaggcctccacagaagctactaggatggcctccagcttatgacctctcactgccgaccgcaccttcctcagaatatgttgcttcatcaccgccctctcagcagactggagtttcttgcacatgttcaatccctggatgtacctcgacaccgcgccgccgaaaggatcaccggctttctcaagggccacgagcttctcgacgatctgagaagcgagcattctctcgatacagggtttggttccaacctccgtgatgtccaccagaaattgcatggctagatccttggtcttcaaagacttgcggtccagcaagttcaccagtttctctatggttcttagttgcagaaatctttgcaagacaagggatccacccttcgcaaagacgatctgatggagagcgtagtacgctgaatcctggagctcatcgatgttgcactgcagcatgtcaatgagctcgtgaacaatattaagctccaggaacctatgcacgtatggctctcctccagtgcaggccaatttcatcaccaaaaaggcggtctgggacctcacctggttcttttcaacctctctgcgttgtagcagccaagccaacctatcaaacagatggcttcccagaaggaggatattatgaagaatcacctcaaatgattgttgaggctttggtgattgcggcacatttctgtcagataaaacaaatctttccaaactgatccgagcatgccagggcaaatgaagcagcactgcaggccctatgcacccttgaagtggagcaccaagttcacagaatgtttttagcgtgataatcgcgtggtgctgtgagatctcagaaccattgcccagaagcacaagaagtttattgtcaattcctgattcaatcattgtctcaacagccttcagctttccaacctttgtcagagatgcaagtgttgtaaacacaatttcatgccactgctcattttctgcagtcaagagatctgcaattcgaaccatgggaattcttgacaaaatttcatccgcaattgtggcatcaacatgctcagatatcttggtcagaacagaagagaggttggctagagttgaagtatcttcacaggcaccaagaagatcaattaatttatctatggaacctgctatttcaagagagtgagcaagatttatgtagtctgatggggaaaatataactgtaattgcggcagtgactgcaaaaataagatctagtgaccctatagaaattatctctgctattcgagggccaagtattttgctgaacccaattctatttgtctcaagttcagacagggatctgcatgccatgagagcttgagttgtgtttaccaataaaatctcgatgtccatgaattctagcagagaaaagaatgatcccatcttctgttcggctggccgtttcatacactctttgccaaaaacaaaaagccaaggagctactaatgccacattatatgaaatggaatcagataaaagagcacgagtggcatcatttgttttgttctccaggtaaagtgagaccatgtcatgcatatgatacaacggctggtcctccagtttgataataagtgatccttcgactagttttgaaaccacgagagagaacagtccgcactgctcaagcgctgaccaaatggattccagacaagcctcaggaacaggttcttcccaagagatagctgcaagagccatgaaaaaaattcttgaattttctggcattgcttctaagctgaactcaaaagatccaaatatggtcaacgtagtctccacatctttctcattgacgtatgaaactggaccaggtgcacatgtggcatatgttgagaggttggatatagctttctcccatttttccactctagtttccttcctcagagccttgcccatgacagcaactgtaaggggatggtgaccacatcgatccaacaagacttctgcgacaggctgtgaagtatagagaagttaaacattcaaaaaccatggtgtttggaatttttagttattctattttttcatgatgtatcttcttctaaaatatcttactttgcaagtttggcacaactactaattgaaaataaatatgtatataaaaaatactgaacatatttgtaaagctaaacacgat

SEQ ID NO: 213554 - DNA, 3454 bp, Zea Mays
gctagcgtcagcctcgtctcgctcgttttgctccgtctctcttcctcctcacttcccacccaccctcgttttgctccgtctctcttcctcctcacttcccacccaccctcgctcgttttgttctgtctctctttctcctcactccctccgtcgatcctctgcagcttgcatcggtcgaccagtagtcttccactgatttgaggctgtcatagtatgctctctgaccgtgctggcgggaggaaggagatgatttaagttctctgcgtttataaccagaaagaggaggataatccaatcatggtaactaaatagtaggtagtaatgtttcacggtaaatcacagtgctcgaatgcgatatgatctttgactcggagtattgaagactaatttagtttgagtttgagattagttgtttttgtcattaataaactcacattggcatctggttacgagctcactactagattttagatctccagttttggtgtacttttgctgcatgtgtctcccagagttgcagatttgcaggtagcacctgattcttttttatttttggattgagatacagtgaaatttatatttgcctgttcccaccatactgtaatatgaatacaaggatggcttgatctggcaagtgctcgccattctatgggcccatcatgcttttcgagtacactgtttgatcacaaggagcggtctgctgccactaaacttcaagttgttgatcatgatggcctgaaaaattatcggggatatgctcatatgccttggccttaatttaaactacttgtatgagatggagaaatgtcacaaaacacaggatgaagacgactccaggaatccacccatgcctctcagtgactcagtggcacaaacgacagcctagtcaggtaacacaataacatatcagccatatgctatacatgcatatactatgttatggaaataactccgaagagtatatcacattctaactagttatgtatgcaaacactaatgcaagacaaccatcttgctcgtcatgttggtgtggtgggggtcaaaagcgtcttgctgctgaaattgatggtataccgtacaagcatttacctttgatttttgctgacgttaatatgttgcttcactaaaggactaggagacgtcttcacatcacggagtagaccactcagcaacaacagtgcaacggtgttcggacttttgttcacatatgggagtgtttaagctcctgcacctagatttagaaacaccaccatgtaaaatagacaagacagtgcttttgcaaacatgatgctaccacgagacccgaactcatccttcagcgatggaggcctccacagaagctactaggatggcctccagcttatgacctctcactgccgaccgcaccttcctcagaatatgttgcttcatcaccgccctctcagcagactggagtttcttgcacatgttcaatccctggatgtacctcgacaccgcgccgccgaaaggatcaccggctttctcaagggccacgagcttctcgacgatctgagaagcgagcattctctcgatacagggtttggttccaacctccgtgatgtccaccagaaattgcatggctagatccttggtcttcaaagacttgcggtccagcaagttcaccagtttctctatggttcttagttgcagaaatctttgcaagacaagggatccacccttcgcaaagacgatctgatggagagcgtagtacgctgaatcctggagctcatcgatgttgcactgcagcatgtcaatgagctcgtgaacaatattaagctccaggaacctatgcacgtatggctctcctccagtgcaggccaatttcatcaccaaaaaggcggtctgggacctcacctggttcttttcaacctctctgcgttgtagcagccaagccaacctatcaaacagatggcttcccagaaggaggatattatgaagaatcacctcaaatgattgttgaggctttggtgattgcggcacatttctgtcagataaaacaaatctttccaaactgatccgagcatgccagggcaaatgaagcagcactgcaggccctatgcacccttgaagtggagcaccaagttcacagaatgtttttagcgtgataatcgcgtggtgctgtgagatctcagaaccattgcccagaagcacaagaagtttattgtcaattcctgattcaatcattgtctcaacagccttcagctttccaacctttgtcagagatgcaagtgttgtaaacacaatttcatgccactgctcattttctgcagtcaagagatctgcaattcgaaccatgggaattcttgacaaaatttcatccgcaattgtggcatcaacatgctcagatatcttggtcagaacagaagagaggttggctagagttgaagtatcttcacaggcaccaagaagatcaattaatttatctatggaacctgctatttcaagagagtgagcaagatttatgtagtctgatggggaaaatataactgtaattgcggcagtgactgcaaaaataagatctagtgaccctatagaaattatctctgctattcgagggccaagtattttgctgaacccaattctatttgtctcaagttcagacagggatctgcatgccatgagagcttgagttgtgtttaccaataaaatctcgatgtccatgaattctagcagagaaaagaatgatcccatcttctgttcggctggccgtttcatacactctttgccaaaaacaaaaagccaaggagctactaatgccacattatatgaaatggaatcagataaaagagcacgagtggcatcatttgttttgttctccaggtaaagtgagaccatgtcatgcatatgatacaacggctggtcctccagtttgataataagtgatccttcgactagttttgaaaccacgagagagaacagtccgcactgctcaagcgctgaccaaatggattccagacaagcctcaggaacaggttcttcccaagagatagctgcaagagccatgaaaaaaattcttgaattttctggcattgcttctaagctgaactcaaaagatccaaatatggtcaacgtagtctccacatctttctcattgacgtatgaaactggaccaggtgcacatgtggcatatgttgagaggttggatatagctttctcccatttttccactctagtttccttcctcagagccttgcccatgacagcaactgtaaggggatggtgaccacatcgatccaacaagacttctgcgacaggctgtgaagtatagagaagttaaacattcaaaaaccatggtgtttggaatttttagttattctattttttcatgatgtatcttcttctaaaatatcttactttgcaagtttggcacaactactaattgaaaataaatatgtatataaaaaatactgaacatatttgtaaagctaaacacgat

SEQ ID NO: 213555 - DNA, 2749 bp, Zea Mays
cagcggctgcggccctgcaggcgaggatttgaggctgtcatagtatgctctctgaccgtgctggcgggaggaaggaggtgtgtatatagttttcttgcattattttcctgtgactattctcatccctcctatatgttctttcagatgatttaagttctctgcgtttataaccagaaagaggaggataatccaatcatgtgaaatttatatttgcctgttcccaccatactgtaatatgaatacaaggatggcttgatctggcaagtgctcgccattctatgggcccatcatgcttttcgagtacactgtttgatcacaaggagcggtctgctgccactaaacttcaagttgttgatcatgatggcctgaaaaattatcggggatatgctcatatgccttggccttaatttaaactacttgtatgagatggagaaatgtcacaaaacacaggatgaagacgactccaggaatccacccatgcctctcagtgactcagtggcacaaacgacagcctagtcagccttcagcgatggaggcctccacagaagctactaggatggcctccagcttatgacctctcactgccgaccgcaccttcctcagaatatgttgcttcatcaccgccctctcagcagactggagtttcttgcacatgttcaatccctggatgtacctcgacaccgcgccgccgaaaggatcaccggctttctcaagggccacgagcttctcgacgatctgagaagcgagcattctctcgatacagggtttggttccaacctccgtgatgtccaccagaaattgcatggctagatccttggtcttcaaagacttgcggtccagcaagttcaccagtttctctatggttcttagttgcagaaatctttgcaagacaagggatccacccttcgcaaagacgatctgatggagagcgtagtacgctgaatcctggagctcatcgatgttgcactgcagcatgtcaatgagctcgtgaacaatattaagctccaggaacctatgcacgtatggctctcctccagtgcaggccaatttcatcaccaaaaaggcggtctgggacctcacctggttcttttcaacctctctgcgttgtagcagccaagccaacctatcaaacagatggcttcccagaaggaggtcctgcacccttgtatcatttgccgtttcagcaagagataataaaccttggatgcctttaatgatatttttgttgtctctctgaaggatattatgaagaatcacctcaaatgattgttgaggctttggtgattgcggcacatttctgtcagataaaacaaatctttccaaactgatccgagcatgccagggcaaatgaagcagcactgcaggccctatgcacccttgaagtggagcaccaagttcacagaatgtttttagcgtgataatcgcgtggtgctgtgagatctcagaaccattgcccagaagcacaagaagtttattgtcaattcctgattcaatcattgtctcaacagccttcagctttccaacctttgtcagagatgcaagtgttgtaaacacaatttcatgccactgctcattttctgcagtcaagagatctgcaattcgaaccatgggaattcttgacaaaatttcatccgcaattgtggcatcaacatgctcagatatcttggtcagaacagaagagaggttggctagagttgaagtatcttcacaggcaccaagaagatcaattaatttatctatggaacctgctatttcaagagagtgagcaagatttatgtagtctgatggggaaaatataactgtaattgcggcagtgactgcaaaaataagatctagtgaccctatagaaattatctctgctattcgagggccaagtattttgctgaacccaattctatttgtctcaagttcagacagggatctgcatgccatgagagcttgagttgtgtttaccaataaaatctcgatgtccatgaattctagcagagaaaagaatgatcccatcttctgttcggctggccgtttcatacactctttgccaaaaacaaaaagccaaggagctactaatgccacattatatgaaatggaatcagataaaagagcacgagtggcatcatttgttttgttctccaggtaaagtgagaccatgtcatgcatatgatacaacggctggtcctccagtttgataataagtgatccttcgactagttttgaaaccacgagagagaacagtccgcactgctcaagcgctgaccaaatggattccagacaagcctcaggaacaggttcttcccaagagatagctgcaagagccatgaaaaaaattcttgaattttctggcattgcttctaagctgaactcaaaagatccaaatatggtcaacgtagtctccacatctttctcattgacgtatgaaactggaccaggtgcacatgtggcatatgttgagaggttggatatagctttctcccatttttccactctagtttccttcctcagagccttgcccatgacagcaactgtaaggggatggtgaccacatcgatccaacaagacttctgcgacaggctgtgaagtatagagaagttaaacattcaaaaaccatggtgtttggaatttttagttattctattttttcatgatgtatcttcttctaaaatatcttactttgcaagtttggcacaactactaattgaaaataaatatgtatataaaaaatactgaacatatttgtaaagctaaacacgat

SEQ ID NO: 213556 - DNA, 1214 bp, Zea Mays
gcagagcgacgagcgacgagctaaaccccgaccgagtcgctgcttgggtgcccaagatagccctaccgcctcgcctctctcgttccccctcatcgccacgccagtcgcctccactcccagtcatctcccatcaccgacgacgtgtcgaggcgagagaagagggcgagtccaagtctagggttcccgccgcatcgacacgggcatcgcaccgcaccgcgaggggcgggcacggaggaagatggcaccgcgcgggcgcgtggagctgcggcggatcgaggacaaggcgagccggcaggtgcgcttctccaagcgccgcgcggggctgttcaagaaggccttcgagctggccctgctctgcgacgccgaggtcgcgctcctcgtcttttcccccggcggcaagctctatgagtactcctcctccagaaccgggatgtagctgcttcagatttacagtcgagacttaaggagatcgcaacatggtctaaacaaaacaacgctgaggagtcggatgccaatgaacttgagaaacttgaggaactcctgacaaatgctttgaggaatacgaaagccaaaaagatgttggcaaaagaaaacaatggtggtgccggtgcaagtacaagcagccagatgttgctttactcggcagagcgtgcaaccgacaaatgaaactgtgccgctccttgccgaacttaagccccgttacgttgtcgcacaaagtttatttcctagcactgtgcttgctgcttatgtttgtttggatgtgccaacctgcagtgaccctcgtggagcctgggtctcacgctcctcttacctagtgtgatgtgcagaaaaagtgtgatgctgtaaaattatgtgattgcctagcagatgtcaaattttcaatcagtagctaactccttttaatggtacaggcttgcatgatttcatctgcaaaaaagagagggcgggttgggtgtcaaatctagccggatgttttcgcaagtttgtgataaaaattgtgctgtacacttgtgtttatgcagttgccctaggcgtcagtgggctgaaaggtaatatctgtgaattatatactgtgtgctgaaagcagttgtcataataatgatacgaaaacaaaatcttatgtcgttaacctatataattttttttaaaaaaaattgccgatcaaatcgaaatatttgatataataaaacataatactactagatggaggaaag

SEQ ID NO: 213557 - DNA, 1287 bp, Zea Mays
gcagagcgacgagcgacgagctaaaccccgaccgagtcgctgcttgggtgcccaagatagccctaccgcctcgcctctctcgttccccctcatcgccacgccagtcgcctccactcccagtcatctcccatcaccgacgacgtgtcgaggcgagagaagagggcgagtccaagtctagggttcccgccgcatcgacacgggcatcgcaccgcaccgcgaggggcgggcacggaggaagatggcaccgcgcgggcgcgtggagctgcggcggatcgaggacaaggcgagccggcaggtgcgcttctccaagcgccgcgcggggctgttcaagaaggccttcgagctggccctgctctgcgacgccgaggtcgcgctcctcgtcttttcccccggcggcaagctctatgagtactcctcctccagcatagaagatacatatgaccgctatcatcaatttgcgggagcaggaagaaaagtgaacggacataacaacgataaccgggatgtagctgcttcagatttacagtcgagacttaaggagatcgcaacatggtctaaacaaaacaacgctgaggagtcggatgccaatgaacttgagaaacttgaggaactcctgacaaatgctttgaggaatacgaaagccaaaaagatgttggcaaaagaaaacaatggtggtgccggtgcaagtacaagcagccagatgttgctttactcggcagagcgtgcaaccgacaaatgaaactgtgccgctccttgccgaacttaagccccgttacgttgtcgcacaaagtttatttcctagcactgtgcttgctgcttatgtttgtttggatgtgccaacctgcagtgaccctcgtggagcctgggtctcacgctcctcttacctagtgtgatgtgcagaaaaagtgtgatgctgtaaaattatgtgattgcctagcagatgtcaaattttcaatcagtagctaactccttttaatggtacaggcttgcatgatttcatctgcaaaaaagagagggcgggttgggtgtcaaatctagccggatgttttcgcaagtttgtgataaaaattgtgctgtacacttgtgtttatgcagttgccctaggcgtcagtgggctgaaaggtaatatctgtgaattatatactgtgtgctgaaagcagttgtcataataatgatacgaaaacaaaatcttatgtcgttaacctatataattttttttaaaaaaaattgccgatcaaatcgaaatatttgatataataaaacataatactactagatggaggaaag

SEQ ID NO: 213558 - DNA, 1799 bp, Zea Mays
gtttaattgccggctaggttatctcgccgagaagaacatttcgcaaacggttatttcaatgagagcacaatgctctgggcagaagggaggaaggaatggatgccactctcgtccatctctgagctacactccgcagtcgcagcgaaggatcaatctgaacaagatgctccagatgttgatgatgattttgagaaatttcagaaggaggttatcgaagccgagacagaggtgaaggccttgaaaggcaatgatgtggaccagcaagatgatgagcggccagcaaccccccctgatggagaggaagaatttactgatgatgatggcaccatttacaaatgggaccgtactttgagggcatgggttcctcaaaatgatgcatctggtagcaaggaagattacgctgttgaagagatgacttttgcagttgaggaggaaatatttcaggcacccgatatcctgggtcctgcattagaagaaatcaacaatctacctgaaagcaaaaataaaggatcagataaagcagaaatgagaggagacaaaaagcggaaatcttatgagaatccagctgagaaaaaggtatagtttccaagtcattcttggagttatttgtaagtttgcgcattttaattctagtcttcaataaactagtaacctattgaacttctgtggtaggaagctaacaaacctccggacagttggtttgatctcaaagtaaacacacatgtctatgtaactggtttgcctgatgatgtcacagtggaggagattgtggaggtattttccaagtgcggaataataaaggaggacccagagactaaaaagccacgagtgaagatttatactgatagagaaaccggcaggaagaagggtgatgccttggtgacatatttcaaggagccttctgtagctttagcggttcaattgttggatgggacaccattccgtcctggtggtaagactcatatgtctgtgatgttttcgtttcaaagaaaactgacaagcaaaagaagaggaagataaagaaggttgaggacaaaatgcttggatggggtgggcatgacgataagaagctgatgattcctgctacagtaattttaaggcacatgttcactcctgctgagctgagagctgatgaagagcttcttcctgagcttgaggctgatgttagagaggaatgcatcaagtttggtccggtggataatgtcaaggtttgtgaaaatcatccacaaggtgtcatattggtgagattcaaagacaggaaagatggtgccaaatgcatagagaagatgaacggcagatggtttgctggacggcaaatccatgcgagcgaagacgatggctctgttaaccatgctcttatccgtgattacgacgcggaggtgtcaaggctggatcgatttggacaagagctagaagagtccacatagagtgtatatatacacacacacaccagggattagagtaggtgtgttacctcattcataggtaggttcgcctgattgaacatgagaaagaagttattggatacacctgctaataagagtagtgaccggcttgcagagctggtgatatcatcactagcgaagtagcagcacactgctttctcaaatgtgttgtttaatgaatgagaagctcatatcgatactattaacctcggctccctatgaaagtacagtgggcatttctatctgaaatgtgggaatttttatatgcattactggcttgttcgtactggtttctactatttctacaatattttatctatatggattatagatacagcagtttaaacaacgact

SEQ ID NO: 213559 - DNA, 1926 bp, Zea Mays
actataataggttctctcgagccttcgccgccaagagcccgatacccgccgtcctccctgctcctgctgccgcgtgcccctctccggccacccgccgccggcgcagtgtccatgaactagcacctctttcttcgcccggtacccattcagttcgtccgcctccttctcttcgagtttgggtgcccatggagaccagcagtgcgcccgccgccgccaccgaggccggctgaacatttcgcaaacggttatttcaatgagagcacaatgctctgggcagaagggaggaaggaatggatgccactctcgtccatctctgagctacactccgcagtcgcagcgaaggatcaatctgaacaagatgctccagatgttgatgatgattttgagaaatttcagaaggaggttatcgaagccgagacagaggtgaaggccttgaaaggcaatgatgtggaccagcaagatgatgagcggccagcaaccccccctgatggagaggaagaatttactgatgatgatggcaccatttacaaatgggaccgtactttgagggcatgggttcctcaaaatgatgcatctggtagcaaggaagattacgctgttgaagagatgacttttgcagttgaggaggaaatatttcaggcacccgatatcctgggtcctgcattagaagaaatcaacaatctacctgaaagcaaaaataaaggatcagataaagcagaaatgagaggagacaaaaagcggaaatcttatgagaatccagctgagaaaaaggaagctaacaaacctccggacagttggtttgatctcaaagtaaacacacatgtctatgtaactggtttgcctgatgatgtcacagtggaggagattgtggaggtattttccaagtgcggaataataaaggaggacccagagactaaaaagccacgagtgaagatttatactgatagagaaaccggcaggaagaagggtgatgccttggtgacatatttcaaggagccttctgtagctttagcggttcaattgttggatgggacaccattccgtcctggtggtaagactcatatgtctgtaagtccagccaaatttgagcagaaaggtgatgttttcgtttcaaagaaaactgacaagcaaaagaagaggaagataaagaaggttgaggacaaaatgcttggatggggtgggcatgacgataagaagctgatgattcctgctacagtaattttaaggcacatgttcactcctgctgagctgagagctgatgaagagcttcttcctgagcttgaggctgatgttagagaggaatgcatcaagtttggtccggtggataatgtcaaggtttgtgaaaatcatccacaaggtgtcatattggtgagattcaaagacaggaaagatggtgccaaatgcatagagaagatgaacggcagatggtttgctggacggcaaatccatgcgagcgaagacgatggctctgttaaccatgctcttatccgtgattacgacgcggaggtgtcaaggctggatcgatttggacaagagctagaagagtccacatagagtgtatatatacacacacacaccagggattagagtaggtgtgttacctcattcataggtaggttcgcctgattgaacatgagaaagaagttattggatacacctgctaataagagtagtgaccggcttgcagagctggtgatatcatcactagcgaagtagcagcacactgctttctcaaatgtgttgtttaatgaatgagaagctcatatcgatactattaacctcggctccctatgaaagtacagtgggcatttctatctgaaatgtgggaatttttatatgcattactggcttgttcgtactggtttctactatttctacaatattttatctatatggattatagatacagcagtttaaacaacgact

SEQ ID NO: 213560 - DNA, 1882 bp, Zea Mays
actataataggttctctcgagccttcgccgccaagagcccgatacccgccgtcctccctgctcctgctgccgcgtgcccctctccggccacccgccgccggcgcagtgtccatgaactagcacctctttcttcgcccggtacccattcagttcgtccgcctccttctcttcgagtttgggtgcccatggagaccagcagtgcgcccgccgccgccaccgaggccggctggtacgtgcttggaccgaaccaggagggcgtcggaccctacgcgcttgctgagcttcgagaacatttcgcaaacggttatttcaatgagagcacaatgctctgggcagaagggaggaaggaatggatgccactctcgtccatctctgagctacactccgcagtcgcagcgaaggatcaatctgaacaagatgctccagatgttgatgatgattttgagaaatttcagaaggaggttatcgaagccgagacagaggtgaaggccttgaaaggcaatgatgtggaccagcaagatgatgagcggccagcaaccccccctgatggagaggaagaatttactgatgatgatggcaccatttacaaatgggaccgtactttgagggcatgggttcctcaaaatgatgcatctggtagcaaggaagattacgctgttgaagagatgacttttgcagttgaggaggaaatatttcaggcacccgatatcctgggtcctgcattagaagaaatcaacaatctacctgaaagcaaaaataaaggatcagataaagcagaaatgagaggagacaaaaagcggaaatcttatgagaatccagctgagaaaaaggaagctaacaaacctccggacagttggtttgatctcaaagtaaacacacatgtctatgtaactggtttgcctgatgatgtcacagtggaggagattgtggaggtattttccaagtgcggaataataaaggaggacccagagactaaaaagccacgagtgaagatttatactgatagagaaaccggcaggaagaagggtgatgccttggtgacatatttcaaggtgatgttttcgtttcaaagaaaactgacaagcaaaagaagaggaagataaagaaggttgaggacaaaatgcttggatggggtgggcatgacgataagaagctgatgattcctgctacagtaattttaaggcacatgttcactcctgctgagctgagagctgatgaagagcttcttcctgagcttgaggctgatgttagagaggaatgcatcaagtttggtccggtggataatgtcaaggtttgtgaaaatcatccacaaggtgtcatattggtgagattcaaagacaggaaagatggtgccaaatgcatagagaagatgaacggcagatggtttgctggacggcaaatccatgcgagcgaagacgatggctctgttaaccatgctcttatccgtgattacgacgcggaggtgtcaaggctggatcgatttggacaagagctagaagagtccacatagagtgtatatatacacacacacaccagggattagagtaggtgtgttacctcattcataggtaggttcgcctgattgaacatgagaaagaagttattggatacacctgctaataagagtagtgaccggcttgcagagctggtgatatcatcactagcgaagtagcagcacactgctttctcaaatgtgttgtttaatgaatgagaagctcatatcgatactattaacctcggctccctatgaaagtacagtgggcatttctatctgaaatgtgggaatttttatatgcattactggcttgttcgtactggtttctactatttctacaatattttatctatatggattatagatacagcagtttaaacaacgact

SEQ ID NO: 213561 - DNA, 1981 bp, Zea Mays
actataataggttctctcgagccttcgccgccaagagcccgatacccgccgtcctccctgctcctgctgccgcgtgcccctctccggccacccgccgccggcgcagtgtccatgaactagcacctctttcttcgcccggtacccattcagttcgtccgcctccttctcttcgagtttgggtgcccatggagaccagcagtgcgcccgccgccgccaccgaggccggctggtacgtgcttggaccgaaccaggagggcgtcggaccctacgcgcttgctgagcttcgagaacatttcgcaaacggttatttcaatgagagcacaatgctctgggcagaagggaggaaggaatggatgccactctcgtccatctctgagctacactccgcagtcgcagcgaaggatcaatctgaacaagatgctccagatgttgatgatgattttgagaaatttcagaaggaggttatcgaagccgagacagaggtgaaggccttgaaaggcaatgatgtggaccagcaagatgatgagcggccagcaaccccccctgatggagaggaagaatttactgatgatgatggcaccatttacaaatgggaccgtactttgagggcatgggttcctcaaaatgatgcatctggtagcaaggaagattacgctgttgaagagatgacttttgcagttgaggaggaaatatttcaggcacccgatatcctgggtcctgcattagaagaaatcaacaatctacctgaaagcaaaaataaaggatcagataaagcagaaatgagaggagacaaaaagcggaaatcttatgagaatccagctgagaaaaagctaacaaacctccggacagttggtttgatctcaaagtaaacacacatgtctatgtaactggtttgcctgatgatgtcacagtggaggagattgtggaggtattttccaagtgcggaataataaaggaggacccagagactaaaaagccacgagtgaagatttatactgatagagaaaccggcaggaagaagggtgatgccttggtgacatatttcaaggagccttctgtagctttagcggttcaattgttggatgggacaccattccgtcctggtggtaagactcatatgtctgtaagtccagccaaatttgagcagaaaggtgatgttttcgtttcaaagaaaactgacaagcaaaagaagaggaagataaagaaggttgaggacaaaatgcttggatggggtgggcatgacgataagaagctgatgattcctgctacagtaattttaaggcacatgttcactcctgctgagctgagagctgatgaagagcttcttcctgagcttgaggctgatgttagagaggaatgcatcaagtttggtccggtggataatgtcaaggtttgtgaaaatcatccacaaggtgtcatattggtgagattcaaagacaggaaagatggtgccaaatgcatagagaagatgaacggcagatggtttgctggacggcaaatccatgcgagcgaagacgatggctctgttaaccatgctcttatccgtgattacgacgcggaggtgtcaaggctggatcgatttggacaagagctagaagagtccacatagagtgtatatatacacacacacaccagggattagagtaggtgtgttacctcattcataggtaggttcgcctgattgaacatgagaaagaagttattggatacacctgctaataagagtagtgaccggcttgcagagctggtgatatcatcactagcgaagtagcagcacactgctttctcaaatgtgttgtttaatgaatgagaagctcatatcgatactattaacctcggctccctatgaaagtacagtgggcatttctatctgaaatgtgggaatttttatatgcattactggcttgttcgtactggtttctactatttctacaatattttatctatatggattatagatacagcagtttaaacaacgact

SEQ ID NO: 213562 - DNA, 1881 bp, Zea Mays
cttcttcgtgcacggctgggagcaagctgctgcccctctccctggccggcgccctctcccgaggccaccccctccctcagcttcgtcttcagccgccgccgaaccagggcgacctccccacgcccgctgccactcccatccctcccctctctgcttatggtcgcgtgccctagcatccgctcgcccctgcgcgcaatcctcccccatggcgagctcgccctcaactccctaccacggtgctcgccaggctcgctggcgtccatagccgcacctccctagacgccgccagttcgccggtctccggaccgttgctcctccatcgccaggctgtgagctctctgccccatcaccagcaccactgccggcgctccctgctcacgcgcgccgtgctgcccgtgccggtgcatgcttgcctcgccgcccgcgcgctcagccgtgcttgctcaccagctcgcccatcgccgctcgcgtgctctgctgctagcagcagtcgagtgcatgcgtgtgggatacgaccatctgcttgctcctgcaactctgctgctactgtgtgactacgtgcgtggatatggcaaagcccaaaccggccctcggccgagaagatagaccacagggatccgaatcttttctcgaccagtgccgacgatgctatcagcgtgctccctctcaccttgtttgtttgtttctgctgccatgttaaacttgggaattaccattcatccgtggccgctgttgtaaataatgatacttctgctcaagaggatgaacaacacactattcgaagtatacttgatcagggcaagacaacaactacaataggaaaagcttctcacagagtacttgggaatggataatatgcttgctcttgtttgcaagacttatgatggtgttaagggtcttgagaaatatgacaaggatgacatcattgataagactagtggcattcatggacttggtcgctctgttggaaaatttgtagatggaagatttattgtcttttgtcttgaaaacttgaggccattttctagtgatgttatcattgacgatccacaaagaaagcttattttacatagaccaaggttgcctggaggagagtcgcctcctggttttctggattttgtagtaaatatgatccacctggaccgagcacacttgaggttcctcatagccagtggccatggtcttagggaaactttgttttcccatttacaagtttataagactagaactaacattcaaagttcccttcctctgataaaagatggtgttgtttctctagatggtggtctactgagacccaatggctcattctgccttggccatagcaagaatcttgaagtgaaatttgctgtaaccactgatgtttcaagtttacttgaaaatgtcgttgaaatggaggaacaagttaaacgtaagaattgggagaaggaaatggtttgaaaagggaggaagatctgctgaaacaagttaaggaattatacaggaagcaaaaacaagagctcatggattatgtcactcaaccagcagtgacacatacgtcacgtgattcgccagcaactcattcacccgcaactcctgggagtaatctgtttggagccaagctctccaacaagtggcggtaacattttggtggcgtacgtccctattttgttggggcttattgcttgttctggcatcagcacgacgtaactagcttttgccacaagcttggtgttagtttgtgagggtgataggccagtgaaattgttttgctgcttagcttagttggccctatggataccaattgatctatagacagccgggaacttggctaatttattatgactatggatgagacttttgtgatgtaattgatgagattattgatttaaatattgttat

SEQ ID NO: 213563 - DNA, 1750 bp, Zea Mays
tttgtacttattttattattattattatcagcaaagtgcgagtgttggtgtagtgggctagtgcgtagtggttgtaggcttagcgcttaagcatgtggttatttctttatttgaagggtccagtagtaatgcaagtgtcgtgggggtgctggctaagcatgagatgctgctaggtgtttgtgtgtattgattaattagtgaaatgcaagtgctaagtgcaccggtgtgtggtgacaaaaattccttagtatcttctgtgcctgagcatttagaggagtaatacaacatttcatatattttataagaatttgtctttgacaatagatcattttaagcttgcacaacattacacaaagagtgtaaaataattttggaagtcagattatattcatattagccttgttgactacctttccttttgcttcctatttttagcactctcatggattgtgcttcaatgatgaaagaagtccagactccacatttccatacattatttcacaatgcctctataagtgtactgaaactgtattttttctcagttaaacttgggaattaccattcatccgtggccgctgttgtaaataatgatacttctgctcaagaggatgaacaacacactattcgaagtatacttgatcagggcaagacaacaactacaataggaaaagtaaataatgataacctcagcaggcttctcacagagtacttgggaatggataatatgcttgctcttgtttgcaagacttatgatggtgttaagggtcttgagaaatatgacaaggatgacatcattgataagactagtggcattcatggacttggtcgctctgttggaaaatttgtagatggaagatttattgtcttttgtcttgaaaacttgaggccattttctagtgatgttatcattgacgatccacaaagaaagcttattttacatagaccaaggttgcctggaggagagtcgcctcctggttttctggattttgtagtaaatatgatccacctggaccgagcacacttgaggttcctcatagccagtggccatggtcttagggaaactttgttttcccatttacaagtttataagactagaactaacattcaaagttcccttcctctgataaaagatggtgttgtttctctagatggtggtctactgagacccaatggctcattctgccttggccatagcaagaatcttgaagtgaaatttgctgtaaccactgatgtttcaagtttacttgaaaatgtcgttgaaatggaggaacaagttaaacgtaagaattgggagaaggaaatggtttgaaaagggaggaagatctgctgaaacaagttaaggaattatacaggaagcaaaaacaagagctcatggattatgtcactcaaccagcagtgacacatacgtcacgtgattcgccagcaactcattcacccgcaactcctgggagtaatctgtttggagccaagctctccaacaagtggcggtaacattttggtggcgtacgtccctattttgttggggcttattgcttgttctggcatcagcacgacgtaactagcttttgccacaagcttggtgttagtttgtgagggtgataggccagtgaaattgttttgctgcttagcttagttggccctatggataccaattgatctatagacagccgggaacttggctaatttattatgactatggatgagacttttgtgatgtaattgatgagattattgatttaaatattgttat

SEQ ID NO: 213564 - DNA, 710 bp, Zea Mays
gttcctcatagccagtggccatggtcttagggaaactttgttttcccatttacaagtttataagactagaactaacattcaaagttcccttcctctgataaaagatggtgttgtttctctagatggtggtctactgagacccaatggctcattctgccttggccatagtgaaatttgctgtaaccactgatgtttcaagtttacttgaaaatgtcgttgaaatggaggaacaagttaaacgtaagaattgggagaaggaaatggtttgaaaagggaggaagatctgctgaaacaagttaaggaattatacaggaagcaaaaacaagagctcatggattatgtcactcaaccagcagtgacacatacgtcacgtgattcgccagcaactcattcacccgcaactcctgggagtaatctgtttggagccaagctctccaacaagtggcggtaacattttggtggcgtacgtccctattttgttggggcttattgcttgttctggcatcagcacgacgtaactagcttttgccacaagcttggtgttagtttgtgagggtgataggccagtgaaattgttttgctgcttagcttagttggccctatggataccaattgatctatagacagccgggaacttggctaatttattatgactatggatgagacttttgtgatgtaattgatgagattattgatttaaatattgttat

SEQ ID NO: 213565 - DNA, 1094 bp, Zea Mays
aaacgttccgacctaaccacattccttccatcatttcatccttcccggtgcggctgcggccagatgcgtccaaattcctcatattttctctcctcccctggtcccttctcgttctcgcccgcgtaattcctctctggcgtctaccaaaagcggagcaaccgaggcaagaaaaaggggtgggcgaggaaaagcgattaggcttctcttccagttcctgattcagtctgagagcagtggctgtattggtaatttaagcagatctcagtcacttccagattctaaaccgaagcgatctttgagaaagaaatatcaggattcatcgactggaaacagaagacgatggcaatcgggtctagaagcaatggagaagaatgttagcatatctgtttctcttgaggggaatatctcttctattcccaattcaatagccaacgactctaaaacgtcaatggaaaacagggtagatacatcatttatcaaccatgcggctgaagcatgggctgagatgagaagacaatgggttggacgccaggcagaagttctgagaaagaccccccgagagccagtgataagttggtccacaacatacgatgatctcttgtcgacaagtgagcgttttccacaacgaatcccattatctgagatggttgattttttggttgacatatggcacgaagaagggctctatgattagctgacctctgcctttctttacgccttgcttttagaatgtggtcaacttcctccccacaaaatatgtgaccttcagaagaaatgaaaaaactacatactctatgaattagtcgcaacatttgaaattgaaaaaaaaaactctcatgtgaaaaggtacaacagtgggttggtatatttggtgatgagttatcaacggtttcttcatgttgaaggactcgatgacctgtcattcctgaatgaacgattgcttaagaatataagggggaagggcatttttttctcatatcatcattgtgatgttattggctagttcatgtctgaggaccctgaagtttttatcaacgttggtcatcaacttcaacatcttgcaatggattataatgcaataacaaaacttttaa

SEQ ID NO: 213566 - DNA, 1089 bp, Zea Mays
aaacgttccgacctaaccacattccttccatcatttcatccttcccggtgcggctgcggccagatgcgtccaaattcctcatattttctctcctcccctggtcccttctcgttctcgcccgcgtaattcctctctggcgtctaccaaaagcggagcaaccgaggcaagaaaaaggggtgggcgaggaaaagcgattaggcttctcttccagttcctgattcagtctgagtggctgtattggtaatttaagcagatctcagtcacttccagattctaaaccgaagcgatctttgagaaagaaatatcaggattcatcgactggaaacagaagacgatggcaatcgggtctagaagcaatggagaagaatgttagcatatctgtttctcttgaggggaatatctcttctattcccaattcaatagccaacgactctaaaacgtcaatggaaaacagggtagatacatcatttatcaaccatgcggctgaagcatgggctgagatgagaagacaatgggttggacgccaggcagaagttctgagaaagaccccccgagagccagtgataagttggtccacaacatacgatgatctcttgtcgacaagtgagcgttttccacaacgaatcccattatctgagatggttgattttttggttgacatatggcacgaagaagggctctatgattagctgacctctgcctttctttacgccttgcttttagaatgtggtcaacttcctccccacaaaatatgtgaccttcagaagaaatgaaaaaactacatactctatgaattagtcgcaacatttgaaattgaaaaaaaaaactctcatgtgaaaaggtacaacagtgggttggtatatttggtgatgagttatcaacggtttcttcatgttgaaggactcgatgacctgtcattcctgaatgaacgattgcttaagaatataagggggaagggcatttttttctcatatcatcattgtgatgttattggctagttcatgtctgaggaccctgaagtttttatcaacgttggtcatcaacttcaacatcttgcaatggattataatgcaataacaaaacttttaa

SEQ ID NO: 213567 - DNA, 1133 bp, Zea Mays
ctgcccctcaattcaccgcccctgccccctgtttgtctcgtcgctgctacccacccatgctccccccaccaccatggcctcgacctcgtccgtctggtcggtgtggatcgccctgtcgctgacgctaacgcttgcctcggcatcaccagctgacgggcaagggggcggaggagcacactgcccgcccgtgctatgcggcggcgtggagatcgccttcccgttcgggatcgtccaggagcaggcgacggccaccaactgcggcgggatcgggttccaggtccgctgcgtcaacggcacgccgtacctcggatacagccggtacgaccactggctccagatcctcagcgtctcctacaccaacgcctccttgctcgtcgccgacacccacaagctcgagaagctgggagcctcggacggcggcggcgactccgccgtctgccgcatccccgggaacaacagctccaccaaggtcgccctcccgttctccatcagccctctcaaccaggacctcatcctgtacaactgcaccaaggcgccggcgccggcgccggacgaggaggggcttgtggagatgacgagatgcggcaaccgcactttcgcccgcatcggagggcgttacggcgagccggacgacgacggcggatactccttggacggctgcggtgccactgtcgtgcccgtgcttgtaaaggacgatggcaaggcgaacgcgagcgactacgagcaactcataagtggcggcttcctcttgacatggcagtggcagacaagcaaatgactagaagggctccaaccaagctagcgcttaaatctgcctaaagcttcctagtcctaggcatgcaattcaacgcgttgtacctttttttgaatagtcatagtatttttttctcgtgttaaaattcgatgcttcgatacatacgtgtgttatactattatatgaccatacataatcatccaccatctccatttgttccattttcatgcatgggtcaaaacaaatcctaaaacaatgttgtttcgtctatcgccgcctaagcatcgctgaccactttttaaagctaaggttataggtgcaactattttttcccctcaccgatagtctggtctggtatttatttattacctaatttagg

SEQ ID NO: 213568 - DNA, 2191 bp, Zea Mays
gcgcttcccaccgggcactcctccaccaggcgtgagaggcgctaacgagagccacaaactctgctccgcgtgcacgccgcgctccatggccgccgccccagcagcagccggaggccttatgcagctccagcctccgctatgcgtgtcgcctcgcgccagcgcttcttgcgcaccaagcatctggggggccctgccccagcttcgccgccgccgggccctggcgcgcgcggcgtcgtcggtagcggccggggaggctgaggcgtacacggaacccgagctggtgttgctggaggccctcctcggcatccagggccgcggccgcgccgtcgctccgcgccagctccaggaagtggagagcgctgtgcaggctctcgagacccagggaggcattcctgatccgacaagttcaagtttaatcgaaggtagctggcggctcatcttcactacgagaccagggacagcatcgcccattcagaggacatttgttggagttgactctttccgtatcttccaggaagtttatcttcgaacagatgatccaagggtggtcaatgttgtcaagttttcagaatcagttggtgatctgaaagtagaggcagaagcaactattaaggatggaaagcgcatacttttccgttttgaccgagcagcatttgccttcaagtttctgccatttaaagttccatacccagtgccatttagacttcttggagatgaagctaatggttggcttgacacaacgtacttgtcccacactgggaacatacgaatttcaaggggaaacaagggaaccacttttgtcctacagaagagtgcagacccaagacaaatcttattgtcagctatatctgcaagaacaggagtagaagaggtcatcaatgattttatttcaagccaaaatggaacaaaggctgatctaagcattctggtgggtgaatggcaactattgtggtgctcacagactgaaggtgaaagttggtcatctgttgcatctgccggtctcaaggacttccagattataagagaagatgggaaattaaagaattcagctagccccttcccaggtctcactcttaatgcaacaggcaacatatggtaagtctgtagcgcctccaagaatcaatgtttatttgtgtgtcctgtcaaggatactttgcatttatgcatgaccatcttaatgaagaagaaacagaagtccttactccatccctccaacatgcgtgattctataattgttgaagcagtttgtcttctacctgaaggaaacactatgatatacttacttttgtaagggcaaacatatacaataagttgtgcacatacagggagggaaatgaacgttttgcagtaagacagggtgtacaagaatgctgaaattattgcaggaaagtgcattttggtttccagttctgactcagctttgcactgcacttgcagcaaaaatgggagtggaaacacctttaccatgtccatgaaagaaggagctgttaaagttggtggtttacagtttcccttggatgctcaaggagaatttgtgatggaaatcttgtatatcgacaacaagataaggatatccaggattaaccagcacatgcttgtccatttacgcattgcgaatacaacatgacaccttaatgaagactatgtgaacatatatcctaatttcattgctgagcacacctcatcagatgtgactaggtcatgcgacataattttaaatttactggtgtatagctaacattttagcacaaaattttctacatagttttcttgtactcaaaccgttttctcacaaacatatggaaccacagttgagcagtttgtatggcaacattctgtaaatgcctgtttgaaaccagatccgatttctcaggggatttcttatgtaacttcagagttcctagaagacatgggcagaaagtagatctcaaaatgcccttgtgcaattaacttttattttctttatgggcccggacggactcaggctcgtgttcgtgctacccgatttatgtttcaggactgaatgactactctctcgtcattccaatggtacaaaatggtgtccgaattaagtagctaaggctcaccgctctttcaattttcatttttcattttaaattttattcttcaaacaaacactacagtatatagtgtaatttaggcattctttggaatgcaggattggtaaaac

SEQ ID NO: 213569 - DNA, 1948 bp, Zea Mays
caacacgcgcgagaggcgcgaacgagaggcgcttcccaccgggcactcctccaccaggcgtgagaggcgctaacgagagccacaaactctgctccgcgtgcacgccgcgctccatggccgccgccccagcagcagccggaggccttatgcagctccagcctccgctatgcgtgtcgcctcgcgccagcgcttcttgcgcaccaagcatctggggggccctgccccagcttcgccgccgccgggccctggcgcgcgcggcgtcgtcggtagcggccggggaggctgaggcgtacacggaacccgagctggtgttgctggaggccctcctcggcatccagggccgcggccgcgccgtcgctccgcgccagctccaggaagtggagagcgctgtgcaggctctcgagacccagggaggcattcctgatccgacaagttcaagtttaatcgaaggtagctggcggctcatcttcactacgagaccagggacagcatcgcccattcagaggacatttgttggagttgactctttccgtatcttccaggaagtttatcttcgaacagatgatccaagggtggtcaatgttgtcaagttttcagaatcagttggtgatctgaaagtagaggcagaagcaactattaaggatggaaagcgcatacttttccgttttgaccgagcagcatttgccttcaagtttctgccatttaaagttccatacccagtgccatttagacttcttggagatgaagctaatggttggcttgacacaacgtacttgtcccacactgggaacatacgaatttcaaggggaaacaagtgcagggaaccacttttgtcctacagaagagtgcagacccaagacaaatcttattgtcagctatatctgcaagaacaggagtagaagaggtcatcaatgattttatttcaagccaaaatggaacaaaggctgatctaagcattctggtgggtgaatggcaactattgtggtgctcacagactgaaggtgaaagttggtcatctgttgcatctgccggtctcaaggacttccagattataagagaagatgggaaattaaagaattcagctagccccttcccaggtctcactcttaatgcaacaggcaacatatgcaaaaatgggagtggaaacacctttaccatgtccatgaaagaaggagctgttaaagttggtggtttacagtttcccttggatgctcaaggagaatttgtgatggaaatcttgtatggcattcacgtcttcctgaaattgaaatatgaagcttatacttaggaaaatgttggttgctggtatatcgacaacaagataaggatatccaggattaaccagcacatgcttgtccatttacgcattgcgaatacaacatgacaccttaatgaagactatgtgaacatatatcctaatttcattgctgagcacacctcatcagatgtgactaggtcatgcgacataattttaaatttactggtgtatagctaacattttagcacaaaattttctacatagttttcttgtactcaaaccgttttctcacaaacatatggaaccacagttgagcagtttgtatggcaacattctgtaaatgcctgtttgaaaccagatccgatttctcaggggatttcttatgtaacttcagagttcctagaagacatgggcagaaagtagatctcaaaatgcccttgtgcaattaacttttattttctttatgggcccggacggactcaggctcgtgttcgtgctacccgatttatgtttcaggactgaatgactactctctcgtcattccaatggtacaaaatggtgtccgaattaagtagctaaggctcaccgctctttcaattttcatttttcattttaaattttattcttcaaacaaacactacagtatatagtgtaatttaggcattctttggaatgcaggattggtaaaac

SEQ ID NO: 213570 - DNA, 344 bp, Zea Mays
ggagtttttagttttcatccgatgttaaattgaccaatatttacgagctgaggcattatgggtaaatcaagcaagaagtccagtgttaaggctgcacctgctgctgtctcagttccagaggggaaatctgcaaagaaggggaagagaaatgcagaagatgagattgagaaggccgtgagtgcaaagaagcaaaagaccgtacctgaaaaagctgtgccggttaagaagcagccccctccaaagaaagttgagagcagcagctctgaggaggattcttcagattccgaagtggaggtgatataacattcttctcttttggctcatgtttctcctttagttaaaaa

SEQ ID NO: 213571 - DNA, 2834 bp, Zea Mays
tcgctcgcttcgcttccaggcttccacagtccacaccaccaccccactccgcccagctccctcgagcgcgcagcgcggcggtggcgatgccgagctcccggcggactacaggccgcggcggtgcaggcgcaggcgcaggcggcgcgggggcgggtgatgcaggaggcggcgacggcgaccgagtgccgcggttcatgggcaacaaccgcgaccacaacccgcgggagctgcgctcctgggcgcgccgcacggggttccacccctcggctttcttctcgggggagtccaactcctccttcgcctcctccgccgcgccgcagccaccgccgccgcctcccccggcctcctcgcgtcgcccgccgcgcccgccgccggagcgggaccccgatccggacgcggaggatgacctcgatcccgcgcccggccgcggacgcggcagacgcccgcgtcgacgcatcgacctccgcggcgagctccagatcccgccgggcttcggccgcgaggaggcggtgccggggtcggcggagccggacgcgcggaggggaggcgcgcgcggggacgccacccggaggaacggcggcgtcgagagaggccaggcgccggccaatgccggccggaacggcaacggagcgctcgcggacgcggacgcgaggaagaaggccgaggacgcagaggcgaagcggaaggcggaggaggccgaggcgaggaggaagaaggaggacgaggagagggatgccgagctggctgcgtactaccaggagcagtgggcgaatgaggatgaaggagctgcgggcgctgccgccgccgctgctgagacggccccgctgtatgaggcgtcgggactccggtgtggtgtaaccgagaaccccggatgggatagtatcacggatgcattgccatatattggcactcactgcgctaatactacttgaattgttgaaatggctgtagcacccctcatattttatggcatacaacattacctgtcaatagctggttcgcttgtctttgttcctttgatactggtacctacaatgggtggctctgatgaggatactgcaacagtcatctccaccatgttattaatctctggtcttactacaatactacatacttttttgggttctcggcttccactgattcaaggaagctcctttgtatatttggctccagcgttggtaattgcgaactcagaggagttcagaaatcttagtgacaataaattcaagcacataatgagagaactacagggggctatacttgttggttcagtatttcagataatattaggatacactggccttatgtcactgtttctgaggttaataaatccagtagtggtggcaccgactattgctgcagtgggtttggcattttttagttatggttttcctcaggctggcagctgtgtagaaatcagcatgccgctcattctgttggttcttctgtgcactctgtacttgagaaaaatatccctgtttggcaaccatatcttccttgtctatgcggtgcccctcagtgttgcaattgtatgggcatattcattcttcctaactgcgggtggagcatataacttcaaaggttgcagctcaaatatacccagttcaaacatattactggattcatgcagaaggcatttagaaaccatgagacgctgccgtactgatgtttctagtgcatggagaactgctgcctgggtgaggattccctatccgttccaatggggcccaccaacatttcattctaagacgggtatcatcatgataatagtgtcgctggttgcttcagttgattcgctttcatcgtaccatgctgcatcgctgctggtaaatttaagtccaccaacacgcggagttgtcagcagagcgattgggcttgaagggatttcaagttttattgctggagtgtggggtacaggtacaggatcgataacattaacagagaacatacacacccttgaaacgaccaaaatggccagcagaagggcattgcagcttggggcagccgttttagtcgtctgctccttctttggtaaaatcggagctctcctagcctctatacctcttgcattggccgcctctgttctgtgcttcacctgggcgctaatcgttgcacttggcttgtctacgttgcgatacacccaagcagcaagctccagaaacttgataatagttggatttaccctattcatctccctgtcaatccctgcatactttcagcagtacgaacccagctccaatcttatcttgccaagctatcttctcccttatgctgcagcgtcaagtggaccagttcgcacagccagcagtgggttgaattatgcagtgaatgcgctcctatccatcaacgttgtggtggctctccttgtcgcgttgatccttgacaacactgtgccaggcagccgacaagagcgcggtgtgtacgtttggacagatcccaaatctctcgaggtggatcctgctaccttggaaccctaccgattgccggaaaagatttcgtgctggttcaggtgggcaaagtgtgtcggcatgtaaaggttctcaaagtcaggggccgcgatgaaaatattctatttattccattggtaccttgttactgtaggatttactatatgagaatatataatatatatagatacagatgctacatagttaggggcctctcttgctgctgttaggttaggataagcacatgtaaagttttggtcatgttagaggggacacgttctatgagctatgctatgtaagtttgtagaaatgctacgttcaaatgaccagtcaccgagtttaaccgttacacacgtccgtgttgacgcttttatgccttgtttagat

SEQ ID NO: 213572 - DNA, 2516 bp, Zea Mays
gcttcgcttccaggcttccacagtccacaccaccaccccactccgcccagctccctcgagcgcgcagcgcggcggtggcgatgccgagctcccggcggactacaggccgcggcggtgcaggcgcaggcgcaggcggcgcgggggcgggtgatgcaggaggcggcgacggcgaccgagtgccgcggttcatgggcaacaaccgcgaccacaacccgcgggagctgcgctcctgggcgcgccgcacggggttccacccctcggctttcttctcgggggagtccaactcctccttcgcctcctccgccgcgccgcagccaccgccgccgcctcccccggcctcctcgcgtcgcccgccgcgcccgccgccggagcgggaccccgatccggacgcggaggatgacctcgatcccgcgcccggccgcggacgcggcagacgcccgcgtcgacgcatcgacctccgcggcgagctccagatcccgccgggcttcggccgcgaggaggcggtgccggggtcggcggagccggacgcgcggaggggaggcgcgcgcggggacgccacccggaggaacggcggcgtcgagagaggccaggcgccggccaatgccggccggaacggcaacggagcgctcgcggacgcggacgcgaggaagaaggccgaggacgcagaggcgaagcggaaggcggaggaggccgaggcgaggaggaagaaggaggacgaggagagggatgccgagctggctgcgtactaccaggagcagtgggcgaatgaggatgaaggagctgcgggcgctgccgccgccgctgctgagacggccccgctgtatgaggcgtcgggactccggtgtggtgtaaccgagaaccccggatgggcacccctcatattttatggcatacaacattacctgtcaatagctggttcgcttgtctttgttcctttgatactggtacctacaatgggtggctctgatgaggatactgcaacagtcatctccaccatgttattaatctctggtcttactacaatactacatacttttttgggttctcggcttccactgattcaaggaagctcctttgtatatttggctccagcgttggtaattgcgaactcagaggagttcagaaatcttagtgacaattacttgagaaaaatatccctgtttggcaaccatatcttccttgtctatgcggtgcccctcagtgttgcaattgtatgggcatattcattcttcctaactgcgggtggagcatataacttcaaaggttgcagctcaaatatacccagttcaaacatattactggattcatgcagaaggcatttagaaaccatgagacgctgccgtactgatgtttctagtgcatggagaactgctgcctgggtgaggattccctatccgttccaatggggcccaccaacatttcattctaagacgggtatcatcatgataatagtgtcgctggttgcttcagttgattcgctttcatcgtaccatgctgcatcgctgctggtaaatttaagtccaccaacacgcggagttgtcagcagagcgattgggcttgaagggatttcaagttttattgctggagtgtggggtacaggtacaggatcgataacattaacagagaacatacacacccttgaaacgaccaaaatggccagcagaagggcattgcagcttggggcagccgttttagtcgtctgctccttctttggtaaaatcggagctctcctagcctctatacctcttgcattggccgcctctgttctgtgcttcacctgggcgctaatcgttgcacttggcttgtctacgttgcgatacacccaagcagcaagctccagaaacttgataatagttggatttaccctattcatctccctgtcaatccctgcatactttcagcagtacgaacccagctccaatcttatcttgccaagctatcttctcccttatgctgcagcgtcaagtggaccagttcgcacagccagcagtgggttgaattatgcagtgaatgcgctcctatccatcaacgttgtggtggctctccttgtcgcgttgatccttgacaacactgtgccaggcagccgacaagagcgcggtgtgtacgtttggacagatcccaaatctctcgaggtggatcctgctaccttggaaccctaccgattgccggaaaagatttcgtgctggttcaggtgggcaaagtgtgtcggcatgtaaaggttctcaaagtcaggggccgcgatgaaaatattctatttattccattggtaccttgttactgtaggatttactatatgagaatatataatatatatagatacagatgctacatagttaggggcctctcttgctgctgttaggttaggataagcacatgtaaagttttggtcatgttagaggggacacgttctatgagctatgctatgtaagtttgtagaaatgctacgttcaaatgaccagtcaccgagtttaaccgttacacacgtccgtgttgacgcttttatgccttgtttagat

SEQ ID NO: 213573 - DNA, 863 bp, Zea Mays
gcgcccacctcttccgtcctcctgtttcccgtcccgcacagcgctacgcacacagactatatttctctctctctctcgtcctctatcgctcgtccgatctgcatctgcttttcttcccccccctccgcgtgtcccctgtcccttccggcgtgcgcgaagatttgattttttttttgtcggggagaaggcggagtaagacagaccaggccgcgggaggaaggagatcctgatctgttcttggagtggggaggcgaggagaggagaggaggaagatggcggcgcaggagcaggagcacgagaagcagcaggcgaagacgagcaccacgagctcgctcccctccagcagcgagcgctcctccagctccgcccccaacaaccttagggaaggagctgaagctgccggcgcaggcgtggagagcgacgaggagatacggcgggtgccggagctgggcggcgcgtcggcgtcggcgtcggcctccggcggcggcggcaagggtggagacggcggcaagaagcaccacttcgccaagagctaatgagaattgagggactgagggagggagctggttcgtgctctgctcgcgctcgcctcacctgaccattgttggtggtggttgatgttgctgttgctgatgacgtattctctttttttttctccttttttcccctaatttctactgtacctgtgttcctcttgtctcgctgattcactgttttttaacgtagcaaatcccgtctccccggccgctgctgtgctgggactgactactcaccactgctgtagggatgtggttgtttttgggggcgttttgtactggtcttgaaaggagaagcctttatggaatagatagatctttcggcag

SEQ ID NO: 213574 - DNA, 1077 bp, Zea Mays
ccagcgcccacctcttccgtcctcctgtttcccgtcccgcacagcgctacgcacacagactatatttctctctctctctcgtcctctatcgctcgtccgatctgcatctgcttttcttcccccccctccgcgtgtcccctgtcccttccggcgtgcgcgaagatttgattttttttttgtcggggagaaggcggagtaagacagaccaggccgcgggaggaaggagatcctgatctgttcttggagtggggaggcgaggagaggagaggaggaagatggcggcgcaggagcaggagcacgagaagcagcaggcgaagacgagcaccacgagctcgctcccctccagcagcgagcgctcctccagctccgcccccaacaaccttagggaaggaggcgtggagagcgacgaggagatacggcgggtgccggagctgggcggcgcgtcggcgtcggcgtcggcctcgtcgggcgcgggcaaggaggacggcgcgcgggcggtggccgcgggggcgcaggggcaccctccggcggccgggaagaagcgcggccgcgccccgggggacaaggagcagaaccggctgaagcggctgctgcggaaccgcgtgtcggcgcagcaggcgcgggagcggaagaaggcgtacctgacggagctggaggcgcgggccaaggacctggagctccgcaatgcggagctcgagcagcgggtgtccacgctccagaacgagaacaacacgctccgccagattctgaagaacacgacggcgcacgcgagcaagaggagcggcggcggcggcaagggtggagacggcggcaagaagcaccacttcgccaagagctaatgagaattgagggactgagggagggagctggttcgtgctctgctcgcgctcgcctcacctgaccattgttggtggtggttgatgttgctgttgctgatgaccaaatcccgtctccccggccgctgctgtgctgggactgactactcaccactgctgtagggatgtggttgtttttgggggcgttttgtactggtcttgaaaggagaagcctttatggaatagatagatctttcggcag

SEQ ID NO: 213575 - DNA, 2150 bp, Zea Mays
ccccctcccctgttttccttcccatctcatcacaagcagaagaaaatcgagataacgagagctagggttttgattccagtactcacgccgcatcctgtctccttctgcccctccctctcggcaccgcctccgccccctcattctctctcgcgtcatccggcggaggctcgaggaaactgaggccgggagcgccccgaagaatattctccacccagtcgccgacacccctgcgcgcgcgagagtaagtcgcctcccccgccgccagtgctcttcgtgatgatatatttccagatccggtttgtccgacgcagatggtagggctggagaggctgccgatgtggtattgaagagggatttagatgcatgaattttgtgttcgtaacgtggattggtgtggggtgggagaggctcctttgccggattggccaggttaccattgtactgttgtagcttggcagttggttgactgtgtgacaactttgagctatgtcatattacgaaagaaggggtggagacaggggtagtggccgtattcaaggaagtggtgggcgaggtggacatgtcctgcgtggaagatcaggattggctccccgaggacctcttggggttaactcccgtccatctgcacgcactattgctaaggcaaggccaaacctgtcactatgtttttgttcatggtcaggttcctgactaaagtagaaactgaatggggagagcatgcctaagcttacattatatggaggggcaggagtatctgtgatgtctgtgactaatgtgttctctgtcagtattgtttggaggcttggaggggcagatgcaactttggtagaaattttgcagtagatcataaggttgaatttattgaggggcagaagtaaatggtggtcatctctaatgggaattttgttggaacaccaccatttcttcaaacatatggaaggaaatagatgaaaaataaagctggcggactccagtttgatgtgtctaaatcatgatatgctgaagggaagactccatcaatcttcttgccatatatggaaattgcaatgtgccccttattcaacagttctggattccatactcccatggaagttcttctagtctgcttccatagcaagtgcacaagccatttgtctcctggacttttgtgatattgtcatttagcagaaccaaagacatgacatggcgacctgatctatttagtgatagcatggcggctagtggaatagaaactggtacaaaattgtacatttcaaacttggactatggggtctctaatgaggatataaaggagctgttttcggaagttggtcatttgaaacgctttgctgttcactacgatggttatggccgcccaaatggcactgcagaggtggtgtttacacggaggagcgatgcaattgctgcactgaagcgttataataatgttctacttgatggaaaagctatgaagatagaagtcatcggaaatgacttaggattgcctatgacacctcgtataaatgttgttggggcttctaatggcagagctacaagaacagttgttatgacgcctgagtttagtcaacgtggcagaggttcaagcagtagacctctaagtaatcccagcaacaggtttaataaccgtggtggtttccaagctggtcgaggccgtggccagttccagagctgggggagaggccgtggtcagttccagagccgggggagaggccgtgcccagttccagggacgagggagaggcaggaagcctgagaagactgcagatgagctggataaagacctggaaagctatcacgcggaggcaatgaaaaccgattgattgcaaggccggtagtgccacaaggttgtggttttatccatcattttctgggagcaacgaacatgctttgtgctttggtttcaggagactagactcttgtagtaaattcgaacaaaagattgccagtttgtagtgtttgcatgaagtttgcaacctgatgtgtttatttttgtatcggttgctttggagattgtgttaatttttaggttcatgcttagaataaccgtaattggccaaaacatgcacccggccctgttccgctctgcgatgtgccttcgcagcattgtgttatttttagcatattgcagtttgtcggaggttagtccggtgc

SEQ ID NO: 213576 - DNA, 1632 bp, Zea Mays
ccccctcccctgttttccttcccatctcatcacaagcagaagaaaatcgagataacgagagctagggttttgattccagtactcacgccgcatcctgtctccttctgcccctccctctcggcaccgcctccgccccctcattctctctcgcgtcatccggcggaggctcgaggaaactgaggccgggagcgccccgaagaatattctccacccagtcgccgacacccctgcgcgcgcgagagttaccattgtactgttgtagcttggcagttggttgactgtgtgacaactttgagctatgtcatattacgaaagaaggggtggagacaggggtagtggccgtattcaaggaagtggtgggcgaggtggacatgtcctgcgtggaagatcaggattggctccccgaggacctcttggggttaactcccgtccatctgcacgcactattgctaaggcaaggccaaacctgtcactatgtttttgttcatggtcaggttcctgactaaagtagaaactgaatggggagagcatgcctaagcttacattatatggaggggcaggagtatctgtgatgtctgtgactaatgtgttctctgtcagtattgtttggaggcttggaggggcagatgcaactttggtagaaattttgcagtagatcataaggttgaatttattgaggggcagaagtaaatggtggtcatctctaatgggaattttgttggaacaccaccatttcttcaaacatatggaaggaaatagatgaaaaataaagctggcggactccagtttgatgtgtctaaatcatgatatgctgaagggaagactccatcaatcttcttgccatatatggaaattgcaatgtgccccttattcaacagttctggattccatactcccatggaagttcttctagtctgcttccatagcaagtgcacaagccatttgtctcctggacttttgtgatattggtggagctctttccttctcagctgttaacttaatgcagtacttcatggttttgctatttctcggttataattattgctactcttcctctaaagaccaatgataagtcaatgtggttcgtgatgattggcatgatcatatgaaaagtttgaagagatattcttttataatgacatgttccctcacatgcttggatgtttggcatttttcagtcatttagcagaaccaaagacatgacatggcgacctgatctatttagtgatagcatggcggctagtggaatagaaactggtacaaaattgtacatttcaaacttggactatggggtctctaatgaggatataaaggagctgttttcggaagttggtcatttgaaacgctttgctgttcactacgatggttatggccgcccaaatggcactgcagaggtggtgtttacacggaggagcgatgcaattgctgcactgaagcgttataataatgttctacttgatggaaaagctatgaagatagaagtcatcggaaatgacttaggattgcctatgacacctcgtataaatgttgttggggcttctaatggcagagctacaagaacagttgttatgacgttatgaaaaacaccccattgctggcagagattactggtttacagcaagctagtcttct

SEQ ID NO: 213577 - DNA, 3000 bp, Zea Mays
ccaagagccaacagagcaacagcccaggcacacacgactagaaccaggcaaccagctgcggagggaggaaacctagcggaacactgtgcaggtgacggcggcgcgctaccggtgacaggggatacggcggcatcgtcccctcctccatccccggcgcggcggcgccagcagccggcctgcaggcacacaagtggccacccttccaatggcggtggagaagtccagcagcggcacatcaactccctccaccacctccaccatggaccggtttcagaagattgtcctaagctgggattacctccgtctcatcgctgaatccaagggcggcaagcaggccaaggtgctgcagcatgtgaagaacacatacgtctcggtggctgagtaccttggtgtctttgagccactgctctttgaggaggtcaaggcacagatcatccagggacgcagtaacgacgaggaagaatctgggatggactggaggaggggagcagtggggtcgtgcacggagtctgaggggttccacaagctctctgtggcggtggaagacaattttcaggataatgtgtcagagaatgatctactgcttatctccaaggagaaatttgaggagggatcgacccctaatgcatatgcatttgcattagtggagcagcgaggtggtggcatacatatttcacttagaacttttgtggcaggtgaaattcaaaatctgaatgttgcaaagcctgtgaagtctacaaggctgcaacattttgcttccattattgcaagtcaaaacagcttgctgtggatactgaaggtctgcagcttgtctacaataatgcgggagttcacagctatgcattccgtagcttctctaccttttaaggatttgattctttcagctaccgaggcgcacaaggatggtgatgatcaaagtcgtgcgtggaatgtccctgagccacttatggattatctcaaagtgaatcttaatgattcccagctagaagcagttaatgcaggtctttcacgcagatcctttgttcttattcagggccctccaggaacaggaaagacacaaactattcttggactccttagtgccgttctccattctgctcctgcaagaatgcagatcaaaggaggatttgatgttctaaaacatgggccagaactggacattgatggcaagcgtgcacactggataaaggcatctccttggttacttggtgcaaatcctcgagatctgattatgcctgttgatggtgatgatggattttacccaacgggaaatgaactgaaacccgaaatcgtaagttccaatcgcaagtatcgggctcatgtgttggtgtgtgctccatccaactcagcactcgatgagatcgtgttgcgtgttcttaagacaggaattcgagatgaaaataacaacacttataaccctaaaattgtgcgcattggagtgaaggcccttcattctgttaaagcagtttctatggattatcttattcaacaaaaactttctggtgtagatcgcacattagatggtgggagacgaggtgctggtgaatatgatcggattagagcttcaatactggacgaagcagccattgtattttctactctgagtttcagtggatcatcaatttttagcaggatgacccgtgcttttgatgttgttataattgatgaagctgcacaagcggtggaacctgcaactcttattcctttgatccatggctgcagacaaatttttcttgttggtgacccagttcagttgcctgcaactgtcatttcacagactgcacagaagttgggatatggaacgagcttgttcaaaagatttcaagctgccggttttccagtgcaaatgcttaaaatccaatatcgcatgcatccagagattagtacattcccttcaaaagaattttatgaaggggtactacaagatggggagggcctgagcaggaaacgtccatggcattcctacagctgcttcggaccattttgtttctttgacgttgatggcattgaatcccaaccatctggaagtggttcttgggtaaaccaggatgaagtggaattcataactctcctgtaccaccaattggcattgcgctatccagagctcaaatctagtcctgaagtgggtgttatatcaccatacaggcatcaagtaaaactattgaaggacagttttcgatcaacctttggggatcaatcaagggaattgatagatgtaagcacagttgatggattccagggacgtgaaaaagaaatagtcattttttcatgtgtaagatgcaataaggaacaaaagattggctttgtttctgattttcgacgaatgaatgttgccattacaagagcaaaatctgctgtactgaagggcaggcctggtgtagtggttgtaggttctgcttcaacattgaagcaagataaacactggaacaaccttgttgagagtgccaaggagcgaaactgcttattcaaggtccccaagccattgaccgcattctttgcagaggataacctgaagactatgaaggtggaaaggcgtcctccgccagagctgaatgctcgagtactggaagagatcaaccaagaagttgtaaggcaggagctcatgaatgtcgatgatgctgccgaccatgcagacgcaggggacgacgatgatgctgatatggatgctgacgatggaggcggcgatgattgattttaaattgatggggctggagcctggaggttcaccagctccagtatttgtcttcacggattgagttgaggcagtgaagaacgtaagcatgtggataccagctagggaaaacaggcaacagcgttgatccaagcagcgttttacagttacatgcggaaaattgtgtgggttgtatcttacaaacacatattcatctcccaaacacggaaatctctgacttcgaaggagataaacttgtcgtttcaaccagaacgtctctgtgtagtacgaaaataacaaaaaccagctccgtggtgtcattttagaca

SEQ ID NO: 213578 - DNA, 1572 bp, Zea Mays
ttttttttgatcgtcttcatcccgcatccggcacaaaccaactgcatcaagctccaccagagaagacaggcccgccgacggccgcagccgcgggcggactcgtgagtcgcgactacgccgctgcagttcccaactcagggtgcctgcccgtaacctacccaagagcggccccgccatgcgcgcggaggtcacccagatcagcgccctaaccgccgtggccgcgcacgtgctctgctctgcgggccttgctgccgcccacgccctcgctggccgcggcgcgctcgtctccgaccccgcgctcgcccttcgccttctcgtggtctgtgaagcgcccatagtcatcgcagtgttcagctacctccggcgtgatgctaaaagttgctcgtttttcagggctgttgcaagaggattgatcggcttgcccgtgggagcgttccttaatgcatttggagcaatcattcttggggcacctgttggagtcaagtactggatagctactatttactggtcgcttgtcatgtccctgtttacgtttgttcccgcagcatgtgtctttggagcatccaggatcgattggcaggatgtgctttctcactccatttatttcacgccaactgatgttgagaactacatgatctctgcaccttgccatggagctgtgctaggagcgtggctcggtgcttggcctatgccacttgactgggagagaccatggcaggtagacataccatctttgaatctcaagtagtatgttgccaagtttctaggcatgtgaaagctggatcatgtggatgtgttgacaaatttgacatgacactaaatagctctatggaacatacttatgtttatgatctgactagggtaaacatatgggggatcacaaacagtcaaacatggccagacattaaaacaggagaagtacctgctacaggaaattcattggtttgcctgacatgacgtggagtttttttttttttgaaactctcagtatcctgatgcctcctttttatctattgtcatatgtttgatcatagatcttaccttcaagtgtcacattgatgatgattcctttgctgggatttatgacttggttactactctttgatcttttgcaggaatggccaatctgtgtcacttatggtgcagttgctgggtatttgttcggaatggcagtgtcattggtcctaacagcactttacaaaagaagggttcgtgcaaaagctgactagccgttcttcccacaaagcaatgtatttgctgataacatttcttgttcctgcgagtactcatcactttcagtagccttttcacccaggttcacattgttgtattcttttgaagcccccctcattttttttgcagttgtacattgttttcttgaatgtaatgtgaaggactcagtttattactgtaaaacacacgtttgttgagagagtgcgtgttacacaaagttacctgctttattacgtacttcctccgttcttttttatctgttgagttttagttcaaaattgaactaacggatgacaaatattcgaaaacggaggtagcatgttatattatgaataaacg

SEQ ID NO: 213579 - DNA, 784 bp, Zea Mays
ctccacacaaccacgtctatgaacagtaaacaggattgagcgttccttaatgcatttggagcaatcattcttggggcacctgttggagtcaagtactggatagctactatttactggtcgcttgtcatgtccctgtttacgtttgttcccgcagcatgtgtctttggagcatccaggatcgattggcaggatgtgctttctcactccatttatttcacgccaactgatgttgagaactacatgatctctgcaccttgccatggagctgtgctaggagcgtggctcggtgcttggcctatgccacttgactgggagagaccatggcaggaatggccaatctgtgtcacttatggtgcagttgctgggtatttgttcggaatggcagtgtcattggtcctaacagcactttacaaaagaagggttcgtgcaaaagctgactagccgttcttcccacaaagcaatgtatttgctgataacatttcttgttcctgcgagtactcatcactttcagtagccttttcacccaggttcacattgttgtattcttttgaagcccccctcattttttttgcagttgtacattgttttcttgaatgtaatgtgaaggactcagtttattactgtaaaacacacgtttgttgagagagtgcgtgttacacaaagttacctgctttattacgtacttcctccgttcttttttatctgttgagttttagttcaaaattgaactaacggatgacaaatattcgaaaacggaggtagcatgttatattatgaataaacg

SEQ ID NO: 213580 - DNA, 2480 bp, Zea Mays
cacaccgtgatggaagcatggagcacccacgcatggatcaaaatcctcccccaaaacgcgacgaaattctccgcgagcaaaatataaagtttataaacccactcctccccttcccctgttccctctaccaccaccaccggcaccgcgggacagtctgctctcgtcccgctgcagcccgtccccgacccggaaccctagcgactgccattgcccacgcgccgctcgcccgatgaacggcgggggctctgggctggcgcccaacgccgcgcacaccgcggacgaggtcttccgcgactacaaaggccgccgcgccggcatgatcaaggccctcaccactgatgtggagaggttcttcaaactctgtgaccctggtgagtgcgctcgatctctttggttcctcgccccaggatgtggagtgatagccgaggaggcttccgtggtttttctgcttgggcttcgttgcttcggtgggggattggatcattggaagctaaatttggagaaatttcccttttctctgtctcctctaccctcactcgacatgctttggattcgattattggtagccttgcagctttcgttaatgctctgcttgtgcttgattgtagctgttcgaatttggtgagagattgaaccccatgatgacagttttatgttggttggaactgtggaaccagtggctgacatataatttttttttgctgttaggttgttacttgttagcgctatggggttgccatcaatcttgtattgatagcttgcttgcagaaaatcgctagatatttttggctgatcagtgccgtggaatttcgactgtgtactgggtgcttggtttctatatgattgcttttagctagggcaatggtggttgtgcaagcagtccttaggtgcaaacgagttctctcgtccattagattatgatctaactgaggcgtcacactttaactagtatgtctattgtcttgtctgttgttttttaggggcggtctccagcagctctcctagtatcatatcatattacctatctcacatcctatttcaaactccactctgtaaacaatgttatctgcaatacaaaacattgttttatatgacaatatgtacgatccgcgacacaacattatgctactacatagttgttggtacagtcaatttattggagtcagtgacataatgtggataggtatactgattcagcaaatcttttttctttagtgcattgatggcactgttcgactggctgaatgcatggttgttttagctgctcgctctattaatgtaattattattattgtggagtttggttgcttctcattattgtatggcgtggtctgcagtgttttctgcttcagcctcgcactcttgtttgcagcagtgcccagttggtgtaacttgttatggctaattccattggttttgaacagaaaaggagaacttgtgcctttatggctatcccgatgagacgtgggaggtgaccttgccagctgaggaagttccccctgagatccctgaaccagcattaggaatcaactttgctagggatggcatgaatgagaaagactggctggcgctagttgcagtccacagtgattcctggttactgtctgttgcattctactttggtgcacgctttggatttgacagagaaactaggaggcgactctttagcctgataaacaacatgcccacgatatttgaggtagtgacaggagcagccaagaagcaggcgaaggagaagacacctaatagtagcagcaagagcaacaggcctagttcaaaagtgtcaagagcagagtctcgttcaaaggctaaggtcccccaagacgaagaagagagcggtgatgacgatgaggatgaggaggcagacgagcacaacaataccttgtgtggaacttgcggaactaacgacagcaaggaccagttctggatctgttgtgataactgcgagaagtggtaccatgggaagtgtgtcaagatcacgccagctcgagctgagcatatcaagcagtacaagtgcccagactgcaccaacaagcgggccagggcatgagcggcaaacatcggcatcgggcgacctttgataggaaggaagaaaccacctcctggcttcaagatccctagatatggcgtaggtccctagtttacgaagtctgcattttcatgtgttcattaatatatctgctgattagctgttcgacctagcagtgtctaaaacgtgccgtgtgtcttctgtgctgagtgttgacatggggcctcctccctccagcctgtaaacgctgtcactgaaggtacctctcaactgaccatccttcattgttggtgtcgtgcagtgagtagtggccgtactctttgttcccagttcctagcatttgaattgctcaaatgcgtaccttgctgagtaaggccgttggaaaatgacgaatagctgcatttccgtgggtctcaatgttccccaaagggcaccaccactgaaccatttt

SEQ ID NO: 213581 - DNA, 2467 bp, Zea Mays
catggagcacccacgcatggatcaaaatcctcccccaaaacgcgacgaaattctccgcgagcaaaatataaagtttataaacccactcctccccttcccctgttccctctaccaccaccaccggcaccgcgggacagtctgctctcgtcccgctgcagcccgtccccgacccggaaccctagcgactgccattgcccacgcgccgctcgcccgatgaacggcgggggctctgggctggcgcccaacgccgcgcacaccgcggacgaggtcttccgcgactacaaaggccgccgcgccggcatgatcaaggccctcaccactgatgtggagaggttcttcaaactctgtgaccctggtgagtgcgctcgatctctttggttcctcgccccaggatgtggagtgatagccgaggaggcttccgtggtttttctgcttgggcttcgttgcttcggtgggggattggatcattggaagctaaatttggagaaatttcccttttctctgtctcctctaccctcactcgacatgctttggattcgattattggtagccttgcagctttcgttaatgctctgcttgtgcttgattgtagctgttcgaatttggtgagagattgaaccccatgatgacagttttatgttggttggaactgtggaaccagtggctgacatataatttttttttgctgttaggttgttacttgttagcgctatggggttgccatcaatcttgtattgatagcttgcttgcagaaaatcgctagatatttttggctgatcagtgccgtggaatttcgactgtgtactgggtgcttggtttctatatgattgcttttagctagggcaatggtggttgtgcaagcagtccttaggtgcaaacgagttctctcgtccattagattatgatctaactgaggcgtcacactttaactagtatgtctattgtcttgtctgttgttttttaggggcggtctccagcagctctcctagtatcatatcatattacctatctcacatcctatttcaaactccactctgtaaacaatgttatctgcaatacaaaacattgttttatatgacaatatgtacgatccgcgacacaacattatgctactacatagttgttggtacagtcaatttattggagtcagtgacataatgtggataggtatactgattcagcaaatcttttttctttagtgcattgatggcactgttcgactggctgaatgcatggttgttttagctgctcgctctattaatgtaattattattattgtggagtttggttgcttctcattattgtatggcgtggtctgcagtgttttctgcttcagcctcgcactcttgtttgcagcagtgcccagttggtgtaacttgttatggctaattccattggttttgaacagaaaaggagaacttgtgcctttatggctatcccgatgagacgtgggaggtgaccttgccagctgaggaagttccccctgagatccctgaaccagcattaggaatcaactttgctagggatggcatgaatgagaaagactggctggcgctagttgcagtccacagtgattcctggttactgtctgttgcattctactttggtgcacgctttggatttgacagagaaactaggaggcgactctttagcctgataaacaacatgcccacgatatttgaggtagtgacaggagcagccaagaagcaggcgaaggagaagacacctaatagtagcagcaagagcaacaggcctagttcaaaagtgcagtcaagagcagagtctcgttcaaaggctaaggtcccccaagacgaagaagagagcggtgatgacgatgaggatgaggaggcagacgagcacaacaataccttgtgtggaacttgcggaactaacgacagcaaggaccagttctggatctgttgtgataactgcgagaagtggtaccatgggaagtgtgtcaagatcacgccagctcgagctgagcatatcaagcagtacaagtgcccagactgcaccaacaagcgggccagggcatgagcggcaaacatcggcatcgggcgacctttgataggaaggaagaaaccacctcctggcttcaagatccctagatatggcgtaggtccctagtttacgaagtctgcattttcatgtgttcattaatatatctgctgattagctgttcgacctagcagtgtctaaaacgtgccgtgtgtcttctgtgctgagtgttgacatggggcctcctccctccagcctgtaaacgctgtcactgaaggtacctctcaactgaccatccttcattgttggtgtcgtgcagtgagtagtggccgtactctttgttcccagttcctagcatttgaattgctcaaatgcgtaccttgctgagtaaggccgttggaaaatgacgaatagctgcatttccgtgggtctcaatgttccccaaagggcaccaccactgaaccatttt

SEQ ID NO: 213582 - DNA, 1337 bp, Zea Mays
catggagcacccacgcatggatcaaaatcctcccccaaaacgcgacgaaattctccgcgagcaaaatataaagtttataaacccactcctccccttcccctgttccctctaccaccaccaccggcaccgcgggacagtctgctctcgtcccgctgcagcccgtccccgacccggaaccctagcgactgccattgcccacgcgccgctcgcccgatgaacggcgggggctctgggctggcgcccaacgccgcgcacaccgcggacgaggtcttccgcgactacaaaggccgccgcgccggcatgatcaaggccctcaccactgatgtggagaggttcttcaaactctgtgaccctgaaaaggagaacttgtgcctttatggctatcccgatgagacgtgggaggtgaccttgccagctgaggaagttccccctgagatccctgaaccagcattaggaatcaactttgctagggatggcatgaatgagaaagactggctggcgctagttgcagtccacagtgattcctggttactgtctgttgcattctactttggtgcacgctttggatttgacagagaaactaggaggcgactctttagcctgataaacaacatgcccacgatatttgaggtagtgacaggagcagccaagaagcaggcgaaggagaagacacctaatagtagcagcaagagcaacaggcctagttcaaaagtgcagtcaagagcagagtctcgttcaaaggctaaggtcccccaagacgaagaagagagcggtgatgacgatgaggatgaggaggcagacgagcacaacaataccttgtgtggaacttgcggaactaacgacagcaaggaccagttctggatctgttgtgataactgcgagaagtggtaccatgggaagtgtgtcaagatcacgccagctcgagctgagcatatcaagcagtacaagtgcccagactgcaccaacaagcgggccagggcatgagcggcaaacatcggcatcgggcgacctttgataggaaggaagaaaccacctcctggcttcaagatccctagatatggctgtctaaaacgtgccgtgtgtcttctgtgctgagtgttgacatggggcctcctccctccagcctgtaaacgctgtcactgaaggtacctctcaactgaccatccttcattgttggtgtcgtgcagtgagtagtggccgtactctttgttcccagttcctagcatttgaattgctcaaatgcgtaccttgctgagtaaggccgttggaaaatgacgaatagctgcatttccgtgggtctcaatgttccccaaagggcaccaccactgaaccatttt

SEQ ID NO: 213583 - DNA, 4290 bp, Zea Mays
ctccgcgtgaatgaactcctcccgacctgccccgccccgggcgggcgaccagaacacatccgacaccaaaactaggcgcccgcttcgacgcaccataacgcactccacccaccgccacctactcgctacactctccatggctgccagataacggctggtgcttaaactactccggccgagctggccgtgctaatgccgctgcggctgcgtgcggtggcacagcgcggcctgcccctgtcgcgatgacacgccgcccggcctcctccgcgccttcggcggcccggctcctcctcctcctcctgcttcttctgctgctgcactgccagtgccaccgcgccggcgcggcgacggacgcggagcggcgggcgctgctggacttcaaggcggcggtgacggcggacccggggggcgtgctggcgtcgtggacgcccacgggggacccctgcggcttcgtcggggtcacctgcgacgcgtccacgggcgccgtgaagcggctgcgcgtccacggcgccgggctggccggcgcgctctcgccctccctcgcgcgcctccccgcgctcgagtccgtctcgctcttcggcaacgccctcacgggcggcgtcccgccgagcctccgcttgctggcgcccacgctccgcaagctcaacctcagccggaacgcgctggccggcgagatcccgccgttcctcggcgccttcccgtggctccgcctgctcgacctctcccacaaccgcttcgccggcgggatccccgccgcgctcttcgacccctgcccccgcctccgctacgtctcgctcgcgcacaaccacctcaccggccccgtcccgcccgccatcgccaactgctcgcgcctcgccggcttcgacttctcctacaaccgcctctccggcgagttcccggaccgggcctgcgcgccgccggagatgagctacatctccgtccgcggcaacgcgctctccggggacatagccgccaagctcgcctcctgcggcagcattgacctcttcgacgtcgggagcaacagcttcaccggagctgcgccctttgcgctccttgcatcggtaaacatcacctacttcaatgtctcctccaacgcctttgacggtgaaatccccagcattgcgacttgcggcaccagattctcgtacctggacgcgtccggcaaccgcctcacggggccggtgccggagagcgtggtgaactgccgtggcctcagggttctggatttgggggcgaatgctcttgctggagctgtaccgcctgtgattgggacactgcggtcgctctccgttctccggctcgcgggcaaccctcgcatttccggttccattccggctgagcttggagggattgagatgctcgtcacgctcgacctcgcgggccttgctctcacaggagagattccagggtcactcagccagtgccagttcctgcttgaactgaatctgtccggcaacaagctgcaaggagtcatcccaggcacactcaacaacataacctacctcaagatgcttgatctccacgggaaccagctccaagggggcattcccgtcacgcttgggcagctcacaaaccttgttctcctagacctctcggagaaccagctgactgggccaatccctcaagagcttgggaacctctctaacctgacacacttcaacgtgtccttcaacaacctatctggcatgatcccttccgagccagcattgcagaaatttgatttcaccgcatacatggataacccgttactatgtggctctccactgcccaataactgtgggcctgggactgggatgaagcaccggaaacgattgcgtgtgcctgtcataatcgccattgttgctgcagccctgatacttgttggaatatgcattgtttgcgcgttaaacatcaaggcttacacacgtaagggcacagacggggacgggaaggaagaggaagaggttcttgtgtccgagagcacccctccagctgcctctccaggctcgaatgcaatcatcgggaaactggtgcttttcagcaagagcttgccttcaaggtatgaagactgggaaactgggaccaaggcgctacttgataaagactgtctcatcggtggtgggtcgattggtacggtgtacaaggccacttttgagaacggcctgtccattgctgtgaagaaactggagacagcagggagggtgagaggccaggatgagttcgagcatcagatgagccagcttggtaacctcagccaccccaacctggtcgcttttcagggctactactggtcatcctcgatgcagttgcttctgtcagaattcatggccaacgggagcttgtacgaccacctccacggctaccgtcctcctcctcgcgctctctctgagagcagcagcagcagcagaggtggtggaggtgaactgttctgggaacggaggttcaacattgcgctcggagcagcccgtgcactcgcttaccttcaccatgattgctggccacagatcctgcacctcaacatcaagtcctccaacatcatgttagatgggagatacgaagctagactgtctgactacgggttggggaagctgctgccgatactaggaagcattgagctgagcagaattcacaccgcgatcgggtacattgcgccggagctggcatctccgacactgagatatagcgacaagagtgacgtgtttagctttggggtggttttgcttgagatcgtgacggggaggaaacctgtagacagccctgggataggagctacagctgtggttctccgtgactacgtgagagggatattggaggacggaactgcgtcggactgcttcgatcgaagcctgagggggtttgtcgaagctgagctggttcaagtgctcaaactgggcctggtgtgcacttccaacacaccgtcaagccgacctagcatggcagaagtggtacagttcttggagtccgttagggttagctcttgaccttctgctgtcggatcggaacatagcagcagaattaggatgttaacatggaaaggattttctgattttttcaacagatgaaggtcacattctctttttttttaaatttttttggttctttactgtggcgcagcttcatttgtaaattgtatttagatttgttactgaataagtcattgttttggtcgaattactacatccatgtctatgattttgtcctttcggtcttcggtctatgtaaggctctttctatgttgtccgaagaccattttgcttcatggtgtgggcttaaagatgagttggtacagtctaattgtatatctagtttgcaggcatagcaaaggaccaggagtttcagtttccccgggcgccatcagagaagagcttggaggtggccagcgacgaggaccagctgaacaaggacagtcagtccatggaagcccattgagaccgaggtgtgcgtacaagctctgtccgttgaggaaaagtatcacatcgctgcagcatattcagacaaaaattcataccacatcgctacgggaacgggggtccattgcatctgcagtccgctgagacaacaggcaagccacggatgcttcttctcattggcaggcgcaggttgttttttagtattgtattattgccattgtatgatgctgacaccacaaccgctcccgctaaacgctaatgacagtgggttttcccagctcttgctctgtctgatgtttcaggggctcatgaaggagctcttcaccatcgcgtgttctttagctgcacggctccggcctccggggctgctgcacatggacgtgccaaacggtgcagaatgcacgtgaggccataatggagagaggaagcatggcaaggtagaaagcctagccgtcgggcgtcgggtgactggtgttgtaccgtcgtctcgtgaaaatattggtccttttttttttaaatggaacggtatgcaggagaggagacgcactgcaactttctttgtacagcagattcgaaagaaatgtcctgctgctggtccatattatcattcattcatgtggtatggaagcacttggtattgaacgtgtgaacttttgttgcaccgtctgaaagaccatcagactatctccagcggctcacccattcttatacttgtatttaaactttactttacaaacaatacaatttatagtgcaaaacaatgttttgggtgaccatatagatgaaccgttggacacggtctcactagagttcatgtgaaactagtgaacttttgttacaccgtctcaaagaccatgtactagagttcatgtgaaactagtgaaatcctgttacaccatct

SEQ ID NO: 213584 - DNA, 1261 bp, Zea Mays
gcgcgaggcgatgctgcagtctccgcctccattccggcctggtgtccaccctttgtcgcttcttctctgcgaccatcgtcaccaccagccaccatcaccatccctcccctcggcctcgcggtcgcagcggtcagagcctccgagatggagctccgcctctgcctccgtctccacgcgcgcctccctcctgccacgacgccaccgcctttccaggcgaccgcggtgctcccggcctcccgccgccttcggacgggtggtagctacggggttgctcttaggcggcacacgaggcgttcgagtccggcaatctgcgcttcaataaccgacggcgagcagggcgtggctgtgaaggagaggagcgtctcggtgatcctcttgtccggagggcagggaaagagaatgggggcgaatatgccaaagcagtatctacctctactaggactaccaattgcattgtacagtttaaaaacattctgtcaactgaaggaagtcaaagaagttgtggtagtgtgtgatccagactacagtgatgtatttgaaggttctattgacaacttgcaaataccccttaaatttgcacgcccgggaaaagagagacaagactctgtttttaatggacttcaggaaattgatggggattcagaactagtttgtgtccatgattctgcaaggcccttagtttcttctgaagatgtcttagaagatgctgcagtacatggagcagctgttcttggtgtgcctgtgaaagctacaataaaggaggccaatactaattcttttgtagtgaaaactcttgaccggaaaactctctgggaaatgcaaactccacaggctatgaagcccaatttactcagagatggttttgagctcgttaaacgggatggccttgaagtcactgatgatgtatccattgtagaatatctaaaacaccctgtgtatatcacggaaggctcttatacaaacattaaggtgactacgcctgatgacttgctactagctgagcgcctgatgaatgaggaatagaggtgataggcaaaattagctctttgcctgattttacagacaagtacgattttgtaggacggcatttatctacacttctacagttttcaaaaaccaaaataattatggagctcatgctcgagatatctgagctctctgtagacattatgtcattctttctatattatatatcaatgaaaaaatggccacgctttctgccgagttcatgctttggcggaaaactggagctcaagctatg

SEQ ID NO: 213585 - DNA, 2166 bp, Zea Mays
ctccatcactctcttctctgctcagccggagatcagccgactgaatccacgacggttgctgtgacggcgatgacgacggtgtcgtcggcggccgcgtgcctggtcctcgctgtcctcctcctgccgtcggcggcgcagtacgtcaagtacaaggacgcgaagcagcccatcaatgagcgcgttcaggacctcctcggccggatgacgctcgaggagaagatcgggcagatgtcgcagatcgagagggccaacgcgaccgccgaggtcatcgagaagtacttcgtcggtagcgtgctcagcggcggcggcagcgtgccggcggagaaggcgtcggcgtcggtgtggcagaagatggtgaccaggatgcagaaggcggcgctcaagacccggctgggcatccccatcatctacggcatcgacgccgtgcacggcaacaacgacgtctacaacgccaccatcttcccccacaacgtcggcctcggcgccaccagggacccccgcctcgtcaagcgggtcggggaggccacggcgcacgagaccagggccaccggcatcccctacactttcgcgccatgcgtagcggtctgccgtgacccgagggcgacgtcccgcagaatttcaccagcggcatgcccttcgccgccggaaagaacaaggtggcggcgtgcgccaagcacttcgtcggcgacggtggcacccacgacggcatcaacgagaacaacaccatcatcgaccgcaagggcctgatgagcatccatatgccggcctacctggacgcgctccgcaagggcgtctccacggtcatgatctcctactccagctggaacgggctcaagatgcacgccaaccacaacctcatcacaggcttcctcaagggcgagcacaagttccagggcttcacgatctcggactgggaaggcatcgacaggatcaccagccctccaggggcgaactactcctactctgtgcaggcttcaattcttgctggcattgacatgatcatggtgccaaacaactaccaagacttcatcaccatcctgaccggtcacgtgaacagcggcctgatcccgatgagcaggatcgacgacgccgtgacgaggattctgcgcgtcaagttcaccatgggcctgttcgagaaccccatgccggaccctagcctcgccgaccagctggggaagcaggagcacagggacctggcgcgggaggcggtgaggaagtcgctggtgctcctcaagaacggcaagcctggcgacgcgccgctgctgcccctgcccaagaaggccgccaagatcctggtcgccgggagccacgccgacaacctggggtaccagtgcggcgggtggacgatcgagtggcagggcgacacgggccgcatcaccgtcggcaccacgctcctggacgccgtgaaggcggccgtggacccgtcgacggcggtggtgttcgcggagaaccccgacgcgggcttcgtcaggaacggcggcttctcgtacgccatcgtggccgtgggcgagcacccgtacacggagaccaagggcgatagcatgaacctgacgatcccggagcccgggccgagcaccatccagacggtgtgcggcgccgtgccctgcgcgaccgtgctcatcagcggccgccccgtggtgatacagccgttccttggcaccgtgcacgcgctcgtggcggcctggctgccgggaagcgaaggccagggcatcaccgacgtgctcttcggggactacggcttcacggggacgctgccgcggacgtggttcaagtcggtggaccagctgccgatgaactacggcgacgagcactacgacccgctgttcccgctcgggttcgggctcaccacacagggcaagaaggggtgctagaagaagacggggtggggggtggtacttggtagagataggaaattggattaaacagtgctctggcgaggggacatgaactggggagttcttgtttccttgttttatgtcgattaattttgttgtatgctcctcacttgcgctaataagttttttttttggttatataccggagttcaaattatttaccgccgtgttatccgaattagaaacatttcaatcctcttaaacatatcttgacaagtgtatgagcaaaagtcgagtttttgagcaaaagaacaaaaagtaaataaaaaat

SEQ ID NO: 213586 - DNA, 2885 bp, Zea Mays
ggtagttgaatggcgctacggaagatgcgcatgatgccttcttccctccctcattctcgctcgcccccattccaccttcgacgacccctttctccttctccctcctcaatcacctgcagcgaaaaggaaaaggtacacacaatattgagtccatatgcatgcattcgtgatttcaaatggttcttcgttctaacttgtttgagatccgtttggagttttgcgcagcagatctttgacatgcatagggcgtgctacacccactttgtggtttaatttctttcttgaatattaattttctcattaagagcgtattagtgatttccttatctgatctgatctctctttgttcatgtcctttacttgtttgagatccgagagtatttatgattgtaatatttgcctatgacaacacgtacggccgaggcattacaaattgttatttgaacgacgaattgtaggttgtgtgtatttacctaatagtcagtttcatgagtgcacatgcatgtacactccataaagaaaaaacgaatgcaaccacatgcatttctccttgtaatatatattgcagcaattaattcctttcattaccttttcttcttcggttggaacaaatttgagatatgcaaaacaatccaaaaaacattgtacgttgcaccttgtgccattttattgacctgcaacattttctctcaattttatgttgtagggtgtcagaccgtaactaagagctatttagcaataatacatacatagctataccctctttaggtcaagagggtggagttctccttattcggaggaagagctccatcctcattctacaagaccaaaccaataaatggcctctagcccacagtcctcgccatcatcctccaagaagtcgccgccaccacaagaagcatcagctttggcgccaaaatcatcttcaaagtcaccctcgccaccaaagggtgaatcaaattcatctcccagtcccccatcgaaatcgtccctgtcaccaccgccacgaccaaagaaaagtgctagtacatctagctctaaagatgggaagacgaagaagtcgtcttcatcgtcttcatcgtcggataatacagccgctgtgatcaccggcgtggtgcttggggtggtgggcttcgctctgctcttgtccatcgtggcgtgcgtgtgctgcgccaagaagaagaagaaacgtccgcccccaatgaacatgcccttctacaccgacgagaaaggcaatgtgtattaccccaacgctggtctgccgcctatgtggcagcaatatggcagcaacggcagcatccctccgccgggatggcaccatcacggcggcgggaacccgctgtcgccatcgctgggctcgatggcggcgcccctgagcggcgagatgtactcgtccggcccccacgggcctcccctccccccaccttcgccgaacgtggcgctggggttctccaagagctccttctcgtacgaggagctagcggcagcgacgtcgggcttctcgtcggcgaacctgctggggcagggcgggttcgggtacgtgtacaagggcgtgctcgccggcagcgggaaggaggtggcggtgaagcagctcaagtccgggagcgggcagggggagcgcgagttccaggcggaggtggagatcatcagccgcgtgcaccaccgtcacctggtgtcgctcgtgggctactgcatcgcgggcaaccagcgcatgctcgtctacgagttcgtggccaacaacacgctggagcaccatctgtacgccaaggacggccctgtcatggactggagcacccgcatgaagatcgcgctcggctccgccaagggcctcgcctacctccacgaggactgccatcctcggatcatccaccgcgacatcaaggccgccaacatcctgctggacaacaacttcgaggccatggtggcggacttcgggctggccaagctcacgacggacaccaacacgcacgtctccacgcgcgtcatgggcaccttcggctacctggcgccggagtacgcgtccagcggcaagctcacggacaggtcggacgtcttctccttcggcgtcatgctgctggagctgctcacggggcgccgccccatcgataccaccaactacatggaggacagcctcgtggactgggcgcgcccgctgctgagcgccgcgctggcgggggagacgggcttcgccgagctcgtcgacccccgtctgggaggcgagtactccgtcgtcgaggtggagcgcttggcggcctgcgccgccgccagcacccgccactcggccaagcgccgccccaagatgagccagatcgtgcgcgcgctggagggcgacgcatcgctggaggatctgcaccaggacggcggcaagcccgggcagagcgtgctcttctccggcggtggctccgacaacatctcccgcctaaggcagctcgccttcgacagcggcgactactcggactacagcaccgactcctccaccggtggtggtggccgaccgccgcgcaggccatgatgatttatcaacttgacaacttattactagcacaaattgaagctacagtctatacacacatgcaaattagattgagcgagggagatcgagagagagctcttaactaatttgagggcgatctatagttaagctatggcagcaagtggcgatcgatgtggagatccatggttcatgtaattatattattgctgtgcttgtgatatacacatgcatggatttttactggactggatcctcgatggttatacgtacgtacgtacgcaggatcaaaggcggaactcataccctcttccatctttcctgaactagtacttgcacatgtttttagatcgaataacatccaatttcagtcgcaccccgctggtagctcaag

SEQ ID NO: 213587 - DNA, 2298 bp, Zea Mays
gtccatatgcatgcattcgtgatttcaaatggttcttcgttctaacttgtttgagatccgtttggagttttgcgcagcagatctttgacatgcatagggcgtgctacacccactttgtgggtgtcagaccgtaactaagagctatttagcaataatacatacatagctataccctctttaggtcaagagggtggagttctccttattcggaggaagagctccatcctcattctacaagaccaaaccaataaatggcctctagcccacagtcctcgccatcatcctccaagaagtcgccgccaccacaagaagcatcagctttggcgccaaaatcatcttcaaagtcaccctcgccaccaaagggtgaatcaaattcatctcccagtcccccatcgaaatcgtccctgtcaccaccgccacgaccaaagaaaagtgctagtacatctagctctaaagatgggaagacgaagaagtcgtcttcatcgtcttcatcgtcggataatacagccgctgtgatcaccggcgtggtgcttggggtggtgggcttcgctctgctcttgtccatcgtggcgtgcgtgtgctgcgccaagaagaagaagaaacgtccgcccccaatgaacatgcccttctacaccgacgagaaaggcaatgtgtattaccccaacgctggtctgccgcctatgtggcagcaatatggcagcaacggcagcatccctccgccgggatggcaccatcacggcggcgggaacccgctgtcgccatcgctgggctcgatggcggcgcccctgagcggcgagatgtactcgtccggcccccacgggcctcccctccccccaccttcgccgaacgtggcgctggggttctccaagagctccttctcgtacgaggagctagcggcagcgacgtcgggcttctcgtcggcgaacctgctggggcagggcgggttcgggtacgtgtacaagggcgtgctcgccggcagcgggaaggaggtggcggtgaagcagctcaagtccgggagcgggcagggggagcgcgagttccaggcggaggtggagatcatcagccgcgtgcaccaccgtcacctggtgtcgctcgtgggctactgcatcgcgggcaaccagcgcatgctcgtctacgagttcgtggccaacaacacgctggagcaccatctgtacgccaaggacggccctgtcatggactggagcacccgcatgaagatcgcgctcggctccgccaagggcctcgcctacctccacgaggactgccatcctcggatcatccaccgcgacatcaaggccgccaacatcctgctggacaacaacttcgaggccatggtggcggacttcgggctggccaagctcacgacggacaccaacacgcacgtctccacgcgcgtcatgggcaccttcggctacctggcgccggagtacgcgtccagcggcaagctcacggacaggtcggacgtcttctccttcggcgtcatgctgctggagctgctcacggggcgccgccccatcgataccaccaactacatggaggacagcctcgtggactgggcgcgcccgctgctgagcgccgcgctggcgggggagacgggcttcgccgagctcgtcgacccccgtctgggaggcgagtactccgtcgtcgaggtggagcgcttggcggcctgcgccgccgccagcacccgccactcggccaagcgccgccccaagatgagccagatcgtgcgcgcgctggagggcgacgcatcgctggaggatctgcaccaggacggcggcaagcccgggcagagcgtgctcttctccggcggtggctccgacaacatctcccgcctaaggcagctcgccttcgacagcggcgactactcggactacagcaccgactcctccaccggtggtggtggccgaccgccgcgcaggccatgatgatttatcaacttgacaacttattactagcacaaattgaagctacagtctatacacacatgcaaattagattgagcgagggagatcgagagagagctcttaactaatttgagggcgatctatagttaagctatggcagcaagtggcgatcgatgtggagatccatggttcatgtaattatattattgctgtgcttgtgatatacacatgcatggatttttactggactggatcctcgatggttatacgtacgtacgtacgcaggatcaaaggcggaactcataccctcttccatctttcctgaactagtacttgcacatgtttttagatcgaataacatccaatttcagtcgcaccccgctggtagctcaag

SEQ ID NO: 213588 - DNA, 2787 bp, Zea Mays
aaaccatgttaggaaacaggccctcagctcagcttctttgtactagtcggcccaaatagcatgccaaggggcaagcgcccaagctcacccgcgacgtcaagcctgccctaacctcgtgtttcccttgctcggcttcaccccatcgccgccgtcgcaacgtgcccgcctgtttcccttgctcgacttcaccccatcgccgccgccgccgtcgcaagcgacgatgctcgacatcaacttgttccgcaccgacaagggcggcaacccggagcttattcgtgagtcccagcgcagccggttcgcctccgtcgagctcgtcgacgaggtcatcgccctcgacaaggcatggcgcgaaaggcagttcgagctggacaagatccggcaggagctcaacgctaccagcaagaagattggcaagctcaaagccagcaagcaagaagaggaagcgaagaagctcatggagagcacagacgaaattaagaaaaggttggcagccaaagaagttgaggtgcaggaggccaagagcaccctcgacgccaagctcacgacgattgggaacatcgtgcatgagtccgtgccagtcagcgaagacgaggcaaacaataaaattgtacggacatttggagagaagagagtagaggaaaatttgaagaatcacgtggacctttgcaggatgcttgacattgtcgcattggagaagggtgctgatgtggctggtggtaggggtttctatttaaaggatgaaggtgtcctccttaacctggcattgataaattttgggctagcctttctgagaaaacggggatttaaaccaatgcaaactccctttttcatgagaaaggaaactatggcaaaatgtgcccagttggcccagtttgatgaggagctttacaaagttacaggtgatggtgaagacaaatatctcatagctacatcagagcagcctttatgtgcttatcacttaggtgatagaatataccctgctgaacttccaatcaaatatgctgggtactccacatgcttccggaaggaagctggttcgcatggaagggacacagctggtatcttcagagtccaccagtttgaaaaaatcgaacaattctgcattacaagcccaaatgacaacgattcttgggagatgcatgaagagatgctaaaaaactcagaagattactataaggagattgggctaccataccaagttgtttccattgtctctggcgctcttaatgatgctgctgctaagaaatatgatttggaagcatggttccctgcatcaaagaccttccgagagttagtatcctgttcaaactgcactgactttcagtcaaggagacttggaattgggtatggccagaaaaagaatgatgagcagtccaagcagtttgttcatatgctgaactctaccttgactgccactgagaggaccctctgttgtattctggagaatttccaaaaggaggacggcgtcgaggtgccaaaggcactgcaaccttatatgggtggaatagagtttcttcctttcaagcaacctttggatgtcaaacaagcttctgactccaaatcaaacaagtccaaatcaaagggaaatgctgcttgagctggatgaggaacactatgttaatttttgggcctaccagtacacaatacccatagcatgactatggcgttgcagagaggttgggcagcaccatcagcttctcagagtgtggagggattgagatcgaggagaactgggacaaagttaagactatttttcttcctactgagaagccaacgaggcaacgacgtctgattcatgtgctcctttgattgcgacccatccattggaggcacacagaaaaattggcgacttcattaaaggagtatttgctgtcttccaaggtggggaggtatagaattccctctaccttttggaagagtactcagccctacagaaagtttcatccatgaactagatgagaagggagttttccgtaccgccgacatgtgaacgatttatatagggacttccctactactgctttaacacttctggactatctacttgcggtgtttgtcaattgagataatcttgggaaagagtgacaaattcgatgagttgatggttgctgccgccgccgagaggcgagaagttgaagatgaagagcaggcttgaaaaaacagtgccgaccatccctgccacgcgtgacgcctccgccggcccccgtaggatcctttcgtctcctgctgtggcctcttcattcgcagccgccccatcagcccatcctccacggctggcctgaatcgccttgcagccccttgtcttccccgtccgcctcttttactgatttgtttgaaaggtaacagtgtgttgctcttttgttgttttgatgattctaactgaatgtataaagaagtcccctctccgatgcatcctatacatgttccttcccctcattgcatgtctccctactctttgcagtcataaccattttattgtcttttgttgctaggtcgaaaccttatatagtgctagatgtcttagcagtaacatcggtactactggctaatactggctactgagctaggtggtcctcaacattgcgacctaaagctgaaaacattttgctatgtttgtttggtctccttgcatgtaaaaatggctccctaaaaacttttgttttggggaacatggttccaaatgtctctttatcgagtctatattttgtagatgaatatggagtggtcgagataggttactggctagattatggcttgttcgattggctatcgatccatgtggattgg

SEQ ID NO: 213589 - DNA, 3948 bp, Zea Mays
ctcagcttctttgtactagtcggcccaaatagcatgccaaggggcaagcgcccaagctcacccgcgacgtcaagcctgccctaacctcgtgtttcccttgctcggcttcaccccatcgccgccgtcgcaacgtgcccgcctgtttcccttgctcgacttcaccccatcgccgccgccgccgtcgcaagcgacgatgctcgacatcaacttgttccgcaccgacaagggcggcaacccggagcttattcgtgagtcccagcgcagccggttcgcctccgtcgagctcgtcgacgaggtcatcgccctcgacaaggcatggcgcgaaaggcagttcgagctggacaagatccggcaggagctcaacgctaccagcaagaagattggcaagctcaaagccagcaagcaagaagaggaagcgaagaagctcatggagagcacagacgaaattaagaaaaggttggcagccaaagaagttgaggtgcaggaggccaagagcaccctcgacgccaagctcacgacgattgggaacatcgtgcatgagtccgtgccagtcagcgaagacgaggcaaacaataaaattgtacggacatttggagagaagagagtagaggaaaatttgaagaatcacgtggacctttgcaggatgcttgacattgtcgcattggagaagggtgctgatgtggctggtggtaggggtttctatttaaaggatgaaggtgtcctccttaacctggcattgataaattttgggctagcctttctgagaaaacggggatttaaaccaatgcaaactccctttttcatgagaaaggaaactatggcaaaatgtgcccagttggcccagtttgatgaggagctttacaaagttacaggtgatggtgaagacaaatatctcatagctacatcagagcagcctttatgtgcttatcacttaggtgatagaatataccctgctgaacttccaatcaaatatgctgggtactccacatgcttccggaaggaagctggttcgcatggaagggacacagctggtatcttcagagtccaccagtttgaaaaaatcgaacaattctgcattacaagcccaaatgacaacgattcttgggagatgcatgaagagatgctaaaaaactcagaagattactataaggagattgggctaccataccaagttgtttccattgtctctggcgctcttaatgatgctgctgctaagaaatatgatttggaagcatggttccctgcatcaaagaccttccgagagttagtatcctgttcaaactgcactgactttcagtcaaggagacttggaattgggtatggccagaaaaagaatgatgagcagtccaagcagtttgttcatatgctgaactctaccttgactgccactgagaggaccctctgttgtattctggagaatttccaaaaggaggacggcgtcgaggtgccaaaggcactgcaaccttatatgggtggaatagagtttcttcctttcaagcaacctttggatgtcaaacaagcttctgactccaaatcaaacaagtccaaatcaaagggaaatgctgcttgagctggatgaggaacactatgttaatttttgggcctaccagtacacaatacccatagcatgactatggcgttgcaggttttcgttttacccattttggtttcttggttgccacattatctaatgacctacctggcatacttatattgcaatagcatttcttgaaatctggaatatttgaccaccatcagctctaccggctgtgtttatcgcgttgccacagaacgctgcttgtttgtctccgaaaccaccagtgttctctgtagcacattagtaacaatttgctggtggatttgatatcatcttttttgaatgatggtgtattggtgtacttgtgatcgataatgaaaaagacatcttgtgttagtggcatctagtgctgttgtggctggaacctggaattgttcttggattctcccttcgcatctcttattttgaaacccggtgcggattgttcgcacgagagcgttttctgacggggtgggagtgcctccacctgtaagtcccagacgtgaaatcttcattcaattgcgctctgagcggggttccgacgcagcttcctcacgtgcctagccttccacacttctctgtctgcccacccgtcgccgcctcatcctcctagggttagggctcgcgtcgcggggggccgtggcgcctggtgcaatgcggaaaccgttggggccggcgctctgtgcatccgtctccgcgcgatctaggtgctggtggcgttctccctgatcgacgcgctcgccatgttattcttattcctcgaatcgccccttgtgtttacgtcgctgctcggggcaggggtggctgccgcagcgtcgcggaagctcgacctctatgacgcgaggcaagcaatgccggcgcgtctcgtgaagagcatccgcacagggaggccctctcgacggacgcatggtggcgatgggcgcaccggttagcgtggatcgtctctggcctcgacctcccgccacctcaactctacatgccctggcttgctccgcaaggcatgatatgctgttcggggagcctgggaagagtggtctcgtggctctcaacttggatttcgatcaagtcaagaagtttatcaaggagcggctggggattgaggttgagatgggtggttgcaaggcttaattacgaccttcatcgtcgagccatttgtgccacatgatcaagactactagctttcgattatttcagagaggttgggcagcaccatcagcttctcagagtgtggagggattgagatcgaggagaactgggacaaagttaagactatttttcttcctactgagaagccaacgaggcaacgacgtctgattcatgtgctcctttgattgcgacccatccattggaggcacacagaaaaattggcgacttcattaaaggagtatttgctgtcttccaaggtggggaggtatagaattccctctaccttttggaagagtactcagccctacagaaagtttcatccatgaactagatgagaagtgagagtgagcatgaggtgcacgctgatgtactcaagcggttcaaactgccagcgaagatcatggagttttccgtaccgccgacatgtgaacgatttatatagggacttccctactactgctttaacacttctggactatctacttgcggtgtttgtcaattgagataatcttgggaaagagtgacaaattcgatgagttgatggttgctgccgccgccgagaggcgagaagttgaagatgaagagcaggcttgaaaaaacagtgccgaccatccctgccacgcgtgacgcctccgccggcccccgtaggatcctttcgtctcctgctgtggcctcttcattcgcagccgccccatcagcccatcctccacggctggcctgaatcgccttgcagccccttgtcttccccgtccgcctcttttactgatttgtttgaaaggtaacagtgtgttgctcttttgttgttttgatgattctaactgaatgtataaagaagtcccctctccgatgcatcctatacatgttccttcccctcattgcatgtctccctactctttgcagtcataaccattttattgtcttttgttgctaggtcgaaaccttatatagtgctagatgtcttagcagtaacatcggtactactggctaatactggctactgagctaggtggtcctcaacattgcgacctaaagctgaaaacattttgctatgtttgtttggtctccttgcatgtaaaaatggctccctaaaaacttttgttttggggaacatggttccaaatgtctctttatcgagtctatattttgtagatgaatatggagtggtcgagataggttactggctagattatggcttgttcgattggctatcgatccatgtggattgg

SEQ ID NO: 213590 - DNA, 4173 bp, Zea Mays
ctttgtactagtcggcccaaatagcatgccaaggggcaagcgcccaagctcacccgcgacgtcaagcctgccctaacctcgtgtttcccttgctcggcttcaccccatcgccgccgtcgcaacgtgcccgcctgtttcccttgctcgacttcaccccatcgccgccgccgccgtcgcaagcgacgatgctcgacatcaacttgttccgcaccgacaagggcggcaacccggagcttattcgtgagtcccagcgcagccggttcgcctccgtcgagctcgtcgacgaggtcatcgccctcgacaaggcatggcgcgaaaggcagttcgagctggacaagatccggcaggagctcaacgctaccagcaagaagattggcaagctcaaagccagcaagcaagaagaggaagcgaagaagctcatggagagcacagacgaaattaagaaaaggttggcagccaaagaagttgaggtgcaggaggccaagagcaccctcgacgccaagctcacgacgattgggaacatcgtgcatgagtccgtgccagtcagcgaagacgagggctgatcagccgtcgattaatctgatcgctttctgatcagtcgatcagacctccaaatcgtccggacacatggaaaccaatcaggcttttgtatatatattactacagacattagcgtagagtgccagagtatcatgtatcatcgttacttgcctgcacaatgggacgcccccatcttattgtcatgaagagaaggcttccacatcaggtcaagctagctaaggcaaacaataaaattgtacggacatttggagagaagagagtagaggaaaatttgaagaatcacgtggacctttgcaggatgcttgacattgtcgcattggagaagggtgctgatgtggctggtggtaggggtttctatttaaaggatgaaggtgtcctccttaacctggcattgataaattttgggctagcctttctgagaaaacggggatttaaaccaatgcaaactccctttttcatgagaaaggaaactatggcaaaatgtgcccagttggcccagtttgatgaggagctttacaaagttacaggtgatggtgaagacaaatatctcatagctacatcagagcagcctttatgtgcttatcacttaggtgatagaatataccctgctgaacttccaatcaaatatgctgggtactccacatgcttccggaaggaagctggttcgcatggaagggacacagctggtatcttcagagtccaccagtttgaaaaaatcgaacaattctgcattacaagcccaaatgacaacgattcttgggagatgcatgaagagatgctaaaaaactcagaagattactataaggagattgggctaccataccaagttgtttccattgtctctggcgctcttaatgatgctgctgctaagaaatatgatttggaagcatggttccctgcatcaaagaccttccgagagttagtatcctgttcaaactgcactgactttcagtcaaggagacttggaattgggtatggccagaaaaagaatgatgagcagtccaagcagtttgttcatatgctgaactctaccttgactgccactgagaggaccctctgttgtattctggagaatttccaaaaggaggacggcgtcgaggtgccaaaggcactgcaaccttatatgggtggaatagagtttcttcctttcaagcaacctttggatgtcaaacaagcttctgactccaaatcaaacaagtccaaatcaaagggaaatgctgcttgagctggatgaggaacactatgttaatttttgggcctaccagtacacaatacccatagcatgactatggcgttgcaggggtggctgccgcagcgtcgcggaagctcgacctctatgacgcgaggcaagcaatgccggcgcgtctcgtgaagagcatccgcacagggaggccctctcgacggacgcatggtggcgatgggcgcaccggttagcgtggatcgtctctggcctcgacctcccgccacctcaactctacatgccctggcttgctccgcaaggcatgatatgctgttcggggagcctgggaagagtggtctcgtggctctcaacttggatttcgatcaagtcaagaagtttatcaaggagcggctggggattgaggttgagatgggtggttgcaaggcttaattacgaccttcatcgtcgagccatttgtgccacatgatcaagactactagctttcgattatttcagagaggttgggcagcaccatcagcttctcagagtgtggagggattgagatcgaggagaactgggacaaagttaagactatttttcttcctactgagaagccaacgaggcaacgacgtctgattcatgtgctcctttgattgcgacccatccattggaggcacacagaaaaattggcgacttcattaaaggagtatttgctgtcttccaaggtaccacagatttgggaaatgtttatttgctggctgtagtgaattaagaatttttcatgtcactatattttcttatttgccatgtttataataattatgctccatctccatatggatttctcatttcttgagatgaatccgttcactatggtcaacggggagacatatcctctggacatcagaggagaactagatgacacaacagccttcaaaaacttcaagaagtgaatctgataaacagggataccatttcttgttgtcattgttggatttactcttatcaattgtgcaggtggggaggtatagaattccctctaccttttggaagagtactcagccctacagaaagtttcatccatgaactagatgagaaggtattgatctctgggctatatttttatctgtatttctttccctggggtctatcacatataaaataatcagtttccatgagaaatacgggatctgcagtgtattctgttgatgtgtgttaattcgccaaccttgttatttcagacaagtgcttgttcttttgtgctactttgcatgtcctgttgatgttataccctgatttaaggctgttcttcattttccttgcgactggatttgaacctgaggacgatgtttgtaggaccatgcatctattgtatttaaagtttaaattaaacataaccacctttttctaatgaaaatatgatgctgcgcttacctgtgttaaatttagtagttcccctttcactgagctaataaaaagttgctttgttgtgatgccatggctagcaagttctttcatctttgtttgccattctattgttgatagtgagagtgagcatgaggtgcacgctgatgtactcaagcggttcaaactgccagcgaagatcatggagttttccgtaccgccgacatgtgaacgatttatatagggacttccctactactgctttaacacttctggactatctacttgcggtgtttgtcaattgagataatcttgggaaagagtgacaaattcgatgagttgatggttgctgccgccgccgagaggcgagaagttgaagatgaagagcaggcttgaaaaaacagtgccgaccatccctgccacgcgtgacgcctccgccggcccccgtaggatcctttcgtctcctgctgtggcctcttcattcgcagccgccccatcagcccatcctccacggctggcctgaatcgccttgcagccccttgtcttccccgtccgcctcttttactgatttgtttgaaaggtaacagtgtgttgctcttttgttgttttgatgattctaactgaatgtataaagaagtcccctctccgatgcatcctatacatgttccttcccctcattgcatgtctccctactctttgcagtcataaccattttattgtcttttgttgctaggtcgaaaccttatatagtgctagatgtcttagcagtaacatcggtactactggctaatactggctactgagctaggtggtcctcaacattgcgacctaaagctgaaaacattttgctatgtttgtttggtctccttgcatgtaaaaatggctccctaaaaacttttgttttggggaacatggttccaaatgtctctttatcgagtctatattttgtagatgaatatggagtggtcgagataggttactggctagattatggcttgttcgattggctatcgatccatgtggattgg

SEQ ID NO: 213591 - DNA, 3886 bp, Zea Mays
ctttgtactagtcggcccaaatagcatgccaaggggcaagcgcccaagctcacccgcgacgtcaagcctgccctaacctcgtgtttcccttgctcggcttcaccccatcgccgccgtcgcaacgtgcccgcctgtttcccttgctcgacttcaccccatcgccgccgccgccgtcgcaagcgacgatgctcgacatcaacttgttccgcaccgacaagggcggcaacccggagcttattcgtgagtcccagcgcagccggttcgcctccgtcgagctcgtcgacgaggtcatcgccctcgacaaggcatggcgcgaaaggcagttcgagctggacaagatccggcaggagctcaacgctaccagcaagaagattggcaagctcaaagccagcaagcaagaagaggaagcgaagaagctcatggagagcacagacgaaattaagaaaaggttggcagccaaagaagttgaggtgcaggaggccaagagcaccctcgacgccaagctcacgacgattgggaacatcgtgcatgagtccgtgccagtcagcgaagacgaggcaaacaataaaattgtacggacatttggagagaagagagtagaggaaaatttgaagaatcacgtggacctttgcaggatgcttgacattgtcgcattggagaagggtgctgatgtggctggtggtaggggtttctatttaaaggatgaaggtgtcctccttaacctggcattgataaattttgggctagcctttctgagaaaacggggatttaaaccaatgcaaactccctttttcatgagaaaggaaactatggcaaaatgtgcccagttggcccagtttgatgaggagctttacaaagttacaggtgatggtgaagacaaatatctcatagctacatcagagcagcctttatgtgcttatcacttaggtgatagaatataccctgctgaacttccaatcaaatatgctgggtactccacatgcttccggaaggaagctggttcgcatggaagggacacagctggtatcttcagagtccaccagtttgaaaaaatcgaacaattctgcattacaagcccaaatgacaacgattcttgggagatgcatgaagagatgctaaaaaactcagaagattactataaggagattgggctaccataccaagttgtttccattgtctctggcgctcttaatgatgctgctgctaagaaatatgatttggaagcatggttccctgcatcaaagaccttccgagagttagtatcctgttcaaactgcactgactttcagtcaaggagacttggaattgggtatggccagaaaaagaatgatgagcagtccaagcagtttgttcatatgctgaactctaccttgactgccactgagaggaccctctgttgtattctggagaatttccaaaaggaggacggcgtcgaggtgccaaaggcactgcaaccttatatgggtggaatagagtttcttcctttcaagcaacctttggatgtcaaacaagcttctgactccaaatcaaacaagtccaaatcaaagggaaatgctgcttgagctggatgaggaacactatgttaatttttgggcctaccagtacacaatacccatagcatgactatggcgttgcaggggtggctgccgcagcgtcgcggaagctcgacctctatgacgcgaggcaagcaatgccggcgcgtctcgtgaagagcatccgcacagggaggccctctcgacggacgcatggtggcgatgggcgcaccggttagcgtggatcgtctctggcctcgacctcccgccacctcaactctacatgccctggcttgctccgcaaggcatgatatgctgttcggggagcctgggaagagtggtctcgtggctctcaacttggatttcgatcaagtcaagaagtttatcaaggagcggctggggattgaggttgagatgggtggttgcaaggcttaattacgaccttcatcgtcgagccatttgtgccacatgatcaagactactagctttcgattatttcagagaggttgggcagcaccatcagcttctcagagtgtggagggattgagatcgaggagaactgggacaaagttaagactatttttcttcctactgagaagccaacgaggcaacgacgtctgattcatgtgctcctttgattgcgacccatccattggaggcacacagaaaaattggcgacttcattaaaggagtatttgctgtcttccaagatgaatccgttcactatggtcaacggggagacatatcctctggacatcagaggagaactagatgacacaacagccttcaaaaacttcaagaagtgaatctgataaacagggataccatttcttgttgtcattgttggatttactcttatcaattgtgcaggtggggaggtatagaattccctctaccttttggaagagtactcagccctacagaaagtttcatccatgaactagatgagaaggtattgatctctgggctatatttttatctgtatttctttccctggggtctatcacatataaaataatcagtttccatgagaaatacgggatctgcagtgtattctgttgatgtgtgttaattcgccaaccttgttatttcagacaagtgcttgttcttttgtgctactttgcatgtcctgttgatgttataccctgatttaaggctgttcttcattttccttgcgactggatttgaacctgaggacgatgtttgtaggaccatgcatctattgtatttaaagtttaaattaaacataaccacctttttctaatgaaaatatgatgctgcgcttacctgtgttaaatttagtagttcccctttcactgagctaataaaaagttgctttgttgtgatgccatggctagcaagttctttcatctttgtttgccattctattgttgatagtgagagtgagcatgaggtgcacgctgatgtactcaagcggttcaaactgccagcgaagatcatgtagagctcctctcttcactttcactaccacacacacaaagagttctcagtgtttccttttgtatgcagggagttttccgtaccgccgacatgtgaacgatttatatagggacttccctactactgctttaacacttctggactatctacttgcggtgtttgtcaattgagataatcttgggaaagagtgacaaattcgatgagttgatggttgctgccgccgccgagaggcgagaagttgaagatgaagagcaggcttgaaaaaacagtgccgaccatccctgccacgcgtgacgcctccgccggcccccgtaggatcctttcgtctcctgctgtggcctcttcattcgcagccgccccatcagcccatcctccacggctggcctgaatcgccttgcagccccttgtcttccccgtccgcctcttttactgatttgtttgaaaggtaacagtgtgttgctcttttgttgttttgatgattctaactgaatgtataaagaagtcccctctccgatgcatcctatacatgttccttcccctcattgcatgtctccctactctttgcagtcataaccattttattgtcttttgttgctaggtcgaaaccttatatagtgctagatgtcttagcagtaacatcggtactactggctaatactggctactgagctaggtggtcctcaacattgcgacctaaagctgaaaacattttgctatgtttgtttggtctccttgcatgtaaaaatggctccctaaaaacttttgttttggggaacatggttccaaatgtctctttatcgagtctatattttgtagatgaatatggagtggtcgagataggttactggctagattatggcttgttcgattggctatcgatccatgtggattgg

SEQ ID NO: 213592 - DNA, 3172 bp, Zea Mays
ctttgtactagtcggcccaaatagcatgccaaggggcaagcgcccaagctcacccgcgacgtcaagcctgccctaacctcgtgtttcccttgctcggcttcaccccatcgccgccgtcgcaacgtgcccgcctgtttcccttgctcgacttcaccccatcgccgccgccgccgtcgcaagcgacgatgctcgacatcaacttgttccgcaccgacaagggcggcaacccggagcttattcgtgagtcccagcgcagccggttcgcctccgtcgagctcgtcgacgaggtcatcgccctcgacaaggcatggcgcgaaaggcagttcgagctggacaagatccggcaggagctcaacgctaccagcaagaagattggcaagctcaaagccagcaagcaagaagaggaagcgaagaagctcatggagagcacagacgaaattaagaaaaggttggcagccaaagaagttgaggtgcaggaggccaagagcaccctcgacgccaagctcacgacgattgggaacatcgtgcatgagtccgtgccagtcagcgaagacgagggctgatcagccgtcgattaatctgatcgctttctgatcagtcgatcagacctccaaatcgtccggacacatggaaaccaatcaggcttttgtatatatattactacagacattagcgtagagtgccagagtatcatgtatcatcgttacttgcctgcacaatgggacgcccccatcttattgtcatgaagagaaggcttccacatcaggtcaagctagctaaggcaaacaataaaattgtacggacatttggagagaagagagtagaggaaaatttgaagaatcacgtggacctttgcaggatgcttgacattgtcgcattggagaagggtgctgatgtggctggtggtaggggtttctatttaaaggatgaaggtgtcctccttaacctggcattgataaattttgggctagcctttctgagaaaacggggatttaaaccaatgcaaactccctttttcatgagaaaggaaactatggcaaaatgtgcccagttggcccagtttgatgaggagctttacaaagttacaggtgatggtgaagacaaatatctcatagctacatcagagcagcctttatgtgcttatcacttaggtgatagaatataccctgctgaacttccaatcaaatatgctgggtactccacatgcttccggaaggaagctggttcgcatggaagggacacagctggtatcttcagagtccaccagtttgaaaaaatcgaacaattctgcattacaagcccaaatgacaacgattcttgggagatgcatgaagagatgctaaaaaactcagaagattactataaggagattgggctaccataccaagttgtttccattgtctctggcgctcttaatgatgctgctgctaagaaatatgatttggaagcatggttccctgcatcaaagaccttccgagagttagtatcctgttcaaactgcactgactttcagtcaaggagacttggaattgggtatggccagaaaaagaatgatgagcagtccaagcagtttgttcatatgctgaactctaccttgactgccactgagaggaccctctgttgtattctggagaatttccaaaaggaggacggcgtcgaggtgccaaaggcactgcaaccttatatgggtggaatagagtttcttcctttcaagcaacctttggatgtcaaacaagcttctgactccaaatcaaacaagtccaaatcaaagggaaatgctgcttgagctggatgaggaacactatgttaatttttgggcctaccagtacacaatacccatagcatgactatggcgttgcagagaggttgggcagcaccatcagcttctcagagtgtggagggattgagatcgaggagaactgggacaaagttaagactatttttcttcctactgagaagccaacgaggcaacgacgtctgattcatgtgctcctttgattgcgacccatccattggaggcacacagaaaaattggcgacttcattaaaggagtatttgctgtcttccaaggtaccacagatttgggaaatgtttatttgctggctgtagtgaattaagaatttttcatgtcactatattttcttatttgccatgtttataataattatgctccatctccatatggatttctcatttcttgagatgaatccgttcactatggtcaacggggagacatatcctctggacatcagaggagaactagatgacacaacagccttcaaaaacttcaagaagtgaatctgataaacagggataccatttcttgttgtcattgttggatttactcttatcaattgtgcaggtggggaggtatagaattccctctaccttttggaagagtactcagccctacagaaagtttcatccatgaactagatgagaagattgagataatcttgggaaagagtgacaaattcgatgagttgatggttgctgccgccgccgagaggcgagaagttgaagatgaagagcaggcttgaaaaaacagtgccgaccatccctgccacgcgtgacgcctccgccggcccccgtaggatcctttcgtctcctgctgtggcctcttcattcgcagccgccccatcagcccatcctccacggctggcctgaatcgccttgcagccccttgtcttccccgtccgcctcttttactgatttgtttgaaaggtaacagtgtgttgctcttttgttgttttgatgattctaactgaatgtataaagaagtcccctctccgatgcatcctatacatgttccttcccctcattgcatgtctccctactctttgcagtcataaccattttattgtcttttgttgctaggtcgaaaccttatatagtgctagatgtcttagcagtaacatcggtactactggctaatactggctactgagctaggtggtcctcaacattgcgacctaaagctgaaaacattttgctatgtttgtttggtctccttgcatgtaaaaatggctccctaaaaacttttgttttggggaacatggttccaaatgtctctttatcgagtctatattttgtagatgaatatggagtggtcgagataggttactggctagattatggcttgttcgattggctatcgatccatgtggattgg

SEQ ID NO: 213593 - DNA, 3061 bp, Zea Mays
ctttgtactagtcggcccaaatagcatgccaaggggcaagcgcccaagctcacccgcgacgtcaagcctgccctaacctcgtgtttcccttgctcggcttcaccccatcgccgccgtcgcaacgtgcccgcctgtttcccttgctcgacttcaccccatcgccgccgccgccgtcgcaagcgacgatgctcgacatcaacttgttccgcaccgacaagggcggcaacccggagcttattcgtgagtcccagcgcagccggttcgcctccgtcgagctcgtcgacgaggtcatcgccctcgacaaggcatggcgcgaaaggcagttcgagctggacaagatccggcaggagctcaacgctaccagcaagaagattggcaagctcaaagccagcaagcaagaagaggaagcgaagaagctcatggagagcacagacgaaattaagaaaaggttggcagccaaagaagttgaggtgcaggaggccaagagcaccctcgacgccaagctcacgacgattgggaacatcgtgcatgagtccgtgccagtcagcgaagacgaggcaaacaataaaattgtacggacatttggagagaagagagtagaggaaaatttgaagaatcacgtggacctttgcaggatgcttgacattgtcgcattggagaagggtgctgatgtggctggtggtaggggtttctatttaaaggatgaaggtgtcctccttaacctggcattgataaattttgggctagcctttctgagaaaacggggatttaaaccaatgcaaactccctttttcatgagaaaggaaactatggcaaaatgtgcccagttggcccagtttgatgaggagctttacaaagttacaggtgatggtgaagacaaatatctcatagctacatcagagcagcctttatgtgcttatcacttaggtgatagaatataccctgctgaacttccaatcaaatatgctgggtactccacatgcttccggaaggaagctggttcgcatggaagggacacagctggtatcttcagagtccaccagtttgaaaaaatcgaacaattctgcattacaagcccaaatgacaacgattcttgggagatgcatgaagagatgctaaaaaactcagaagattactataaggagattgggctaccataccaagttgtttccattgtctctggcgctcttaatgatgctgctgctaagaaatatgatttggaagcatggttccctgcatcaaagaccttccgagagttagtatcctgttcaaactgcactgactttcagtcaaggagacttggaattgggtatggccagaaaaagaatgatgagcagtccaagcagtttgttcatatgctgaactctaccttgactgccactgagaggaccctctgttgtattctggagaatttccaaaaggaggacggcgtcgaggtgccaaaggcactgcaaccttatatgggtggaatagagtttcttcctttcaagcaacctttggatgtcaaacaagcttctgactccaaatcaaacaagtccaaatcaaagggaaatgctgcttgagctggatgaggaacactatgttaatttttgggcctaccagtacacaatacccatagcatgactatggcgttgcaggttttcgttttacccattttggtttcttggttgccacattatctaatgacctacctggcatacttatattgcaatagcatttcttgaaatctggaatatttgaccaccatcagctctaccggctgtgtttatcgcgttgccacagaacgctgcttgtttgtctccgaaaccaccagtgttctctgtagcacattagtaacaatttgctggtggatttgatatcatcttttttgaatgatggtgtattggtgtacttgtgatcgataatgaaaaagacatcttgtgttagtggcatctagtgctgttgtggctggaacctggaattgttcttggattctcccttcgcatctcttattttgaaacccggtgcggattgttcgcacgagagcgttttctgacggggtgggagtgcctccacctgtaagtcccagacgtgaaatcttcattcaattgcgctctgagcggggttccgacgcagcttcctcacgtgcctagccttccacacttctctgtctgcccacccgtcgccgcctcatcctcctagggttagggctcgcgtcgcggggggccgtggcgcctggtgcaatgcggaaaccgttggggccggcgctctgtgcatccgtctccgcgcgatctaggtgctggtggcgttctccctgatcgacgcgctcgccatgttattcttattcctcgaatcgccccttgtgtttacgtcgctgctcggggcaggggtggctgccgcagcgtcgcggaagctcgacctctatgacgcgaggcaagcaatgccggcgcgtctcgtgaagagcatccgcacagggaggccctctcgacggacgcatggtggcgatgggcgcaccggttagcgtggatcgtctctggcctcgacctcccgccacctcaactctacatgccctggcttgctccgcaaggcatgatatgctgttcggggagcctgggaagagtggtctcgtggctctcaacttggatttcgatcaagtcaagaagtttatcaaggagcggctggggattgaggttgagatgggtggttgcaaggcttaattacgaccttcatcgtcgagccatttgtgccacatgatcaagactactagctttcgattatttcagagaggttgggcagcaccatcagcttctcagagtgtggagggattgagatcgaggagaactgggacaaagttaagactatttttcttcctactgagaagccaacgaggcaacgacgtctgattcatgtgctcctttgattgcgacccatccattggaggcacacagaaaaattggcgacttcattaaaggagtatttgctgtcttccaaggtggggaggtatagaattccctctaccttttggaagagtactcagccctacagaaagtttcatccatgaactagatgagaagtgagattg

SEQ ID NO: 213594 - DNA, 1339 bp, Zea Mays
ccgaactttaggcatatattgttattggccacatgcgtttgtgtttatagttcttggatgaatttgtttcattttgccaataaaaaaactgtggtggttcttagataagtaatagctgctgacccatataaaaatgaagtgaatgcataaactgatgctaaatagatttggtgatggtttatacaattatttctcccacatttaccaattggtcagaataggataggttgtcaatgggggaaaaaaggcaggggcaacatgctgttgaccggatttgtatcccatcctctgtctcgacaataacaagcaagttgacaaataaataaataagactcatctgccgcaaactctaatgtatttacttctagcaattctatgtttgatactttctattttgagccacaactgttacagcaagccactacgaatactaataactacaaggatatgttttctcacagaaaacaaaagctcttagatcaggaaatcatcaatcatgagatgtgataatgttctcttcattgttattgtttcaaccagggcctggtttatctaaacaagaggggccaaaagatcattcactacgatctaaaacctggcaatgttctctttgatgagggaatggaactcacttctcagggagctggaacctattggtatcttcctccagaatgctttgaccttagcaaaacaccatttatttcatctaaggtggatgtttggtcagctggtgtaatgttttaccaaatgctttatggaaggcgtccttttggtcatgatcagactcaggagagaatacttcgggaagatacaattatcaatgcacgaagagtggagttcccctcaaagccagctgtatcgaatgaggcgaaggatctgatacgccggtgcttgacatacaaccaatcagagaggccagatgtactaaccataactcaagatcattatctctcgtatgcaaagaagtagccactaccccggagaacattttggcgatggtatctgttcaggcattgagattatggatggggatggataatctcgtggaagagctaagtattaaacaagctcaagaagaccacaaagggtgtataattgtaaattttagtctgccctattacggcaatgacctgaaatccagaaggcatcagttcaaaggccagcttcttttgtaacatagagaaaacatgcattaacgggcccatttaccctttgactgagatctccttgactcgcttgtggcatgcccccgtgcgtaacgcgacggttacttggctggtgggcaatggtcctcttgattttctgtttgctgatactgtcgataaggactgccgaatca

SEQ ID NO: 213595 - DNA, 1292 bp, Zea Mays
atttgtttcattttgccaataaaaaaactgtggtggttcttagataagtaatagctgctgacccatataaaaatgaagtgaatgcataaactgatgctaaatagatttggtgatggtttatacaattatttctcccacatttaccaattggtcagaataggataggttgtcaatgggggaaaaaaggcaggggcaacatgctgttgaccggatttgtatcccatcctctgtctcgacaataacaagcaagttgacaaataaataaataagactcatctgccgcaaactctaatgtatttacttctagcaattctatgtttgatactttctattttgagccacaactgttacagcaagccactacgaatactaataactacaaggatatgttttctcacagaaaacaaaaggcaaggatcttgatgcagtccttaaagccacaccaattcttccagaaaaagaagcaagaatcataattgttcaaatatttcagggcctggtttatctaaacaagaggggccaaaagatcattcactacgatctaaaacctggcaatgttctctttgatgagggaatggaactcacttctcagggagctggaacctattggtatcttcctccagaatgctttgaccttagcaaaacaccatttatttcatctaaggtggatgtttggtcagctggtgtaatgttttaccaaatgctttatggaaggcgtccttttggtcatgatcagactcaggagagaatacttcgggaagatacaattatcaatgcacgaagagtggagttcccctcaaagccagctgtatcgaatgaggcgaaggatctgatacgccggtgcttgacatacaaccaatcagagaggccagatgtactaaccataactcaagatcattatctctcgtatgcaaagaagtagccactaccccggagaacattttggcgatggtatctgttcaggcattgagattatggatggggatggataatctcgtggaagagctaagtattaaacaagctcaagaagaccacaaagggtgtataattgtaaattttagtctgccctattacggcaatgacctgaaatccagaaggcatcagttcaaaggccagcttcttttgtaacatagagaaaacatgcattaacgggcccatttaccctttgactgagatctccttgactcgcttgtggcatgcccccgtgcgtaacgcgacggttacttggctggtgggcaatggtcctcttgattttctgtttgctgatactgtcgataaggactgccgaatca

SEQ ID NO: 213596 - DNA, 1316 bp, Zea Mays
gctgcttgctgtttttgttctaaataaaatggttgtcagcatcattggccttcttttatttgggaagttgttagaacctctatggggttcaaaagagttatcaaagttcatttttatcgtcaacctttcaacttctgcttgtgttttcatgactgctattgtgctgtactatataactcagcaagagatctacctctatactcctttttctggattttatggggttctatcaggattgttggtgggcattaaacagcttttacctgatcaagagcttaatctttttgtgctaaaaattaaggcaaagtggattccatctcttgttgcattgatatccattcttggaagcatcttcatatacgactttatgtcttacctcccagttctgttgtttggcatgtatatgagttggatctacctccgttactttcaaaagagacttgagaccagcctgaaaggggatccaagtgaggagttctctttctcaagcttcttccctgaatttgtaagaccatttctcgacccaatagcatctgtattccataggttactttgtggaagatctgatgccaggggagaaacattagacacctcaccattacctggttcagattcgtttgaggcaaacaggaggagagagaggggtcaacgggcactggagcaaagattagctgagaagctggctgcagtcaggagttcagagggcggcacatcactggatgccgctgacaaagtttgagtcttctatgcaacgaacaacgagctgtgcggtgcagtttgtgatttcctggcaattcgtttctatgtgatttcaccagccccagcctcaccgccgagtgcttcattttttttatggtttctcatcctaatcatcatcgggaaccaactaatgaagcactgcgcgcccattttccccatggtttctctgtaatcaactagaagtgatcaagtaccaagcagtgtacaatgcgatgctccctaggacaagaactcatctatgttcggtttcctgttttttttcttccaaatggtgcggttgatacttgatagtagttgacacttgacaggaacaaaattatttttgtaaccttttagagctctgtgttggatggcaaattgacggtgctaacggtccggccccgagtctagacggtccgcgcgcgtagtcagttagggttctgagtttcttgctacagttgttggctagattcgcggaattaacttgggagatttgtatgtaatgggttcagccccctcctctataaatatagaggaatacgaccgattaaacattatcaatcgaattaataatcagt

SEQ ID NO: 213597 - DNA, 1503 bp, Zea Mays
cctctctccatctcttccttcccgccgggagtggaggcttcttcaggggatacacaaagctgtgcaagggcctcgccgtcatattgctcattgtgcaccttgtagtccagttgtttccgtccgccgtcacctatctcgcgcttatccctggaagaacgatcccttttgcttggaacctgataactgcaggctatgtcgagcaaacaattccagggatggttgtcagcatcattggccttcttttatttgggaagttgttagaacctctatggggttcaaaagagttatcaaagttcatttttatcgtcaacctttcaacttctgcttgtgttttcatgactgctattgtgctgtactatataactcagcaagagatctacctctatactcctttttctggattttatggggttctatcaggattgttggtgggcattaaacagcttttacctgatcaagagcttaatctttttgtgctaaaaattaaggcaaagtggattccatctcttgttgcattgatatccattcttggaagcatcttcatatacgactttatgtcttacctcccagttctgttgtttggcatgtatatgagttggatctacctccgttactttcaaaagagacttgagaccagcctgaaaggggatccaagtgaggagttctctttctcaagcttcttccctgaatttgtaagaccatttctcgacccaatagcatctgtattccataggttactttgtggaagatctgatgccaggggagaaacattagacacctcaccattacctggttcagattcgtttgaggcaaacaggaggagagagaggggtcaacgggcactggagcaaagattagctgagaagctggctgcagtcaggagttcagagggcggcacatcactggatgccgctgacaaagtttgagtcttctatgcaacgaacaacgagctgtgcggtgcagtttgtgatttcctggcaattcgtttctatgtgatttcaccagccccagcctcaccgccgagtgcttcattttttttatggtttctcatcctaatcatcatcgggaaccaactaatgaagcactgcgcgcccattttccccatggtttctctgtaatcaactagaagtgatcaagtaccaagcagtgtacaatgcgatgctccctaggacaagaactcatctatgttcggtttcctgttttttttcttccaaatggtgcggttgatacttgatagtagttgacacttgacaggaacaaaattatttttgtaaccttttagagctctgtgttggatggcaaattgacggtgctaacggtccggccccgagtctagacggtccgcgcgcgtagtcagttagggttctgagtttcttgctacagttgttggctagattcgcggaattaacttgggagatttgtatgtaatgggttcagccccctcctctataaatatagaggaatacgaccgattaaacattatcaatcgaattaataatcagt

SEQ ID NO: 213598 - DNA, 1121 bp, Zea Mays
atgttttttgcactgaatctggttgtgaaccaaacacacctcagctgctctgtccaaacgcaccctgacttccgagttccgacccccactgctttgcttgctctgcactccgctaattccttccgcggcgatcccgagcaagaaacccagcagcgcggcggatctcgccgggcggcggccgccactatgatgagcggtagctcgcctccgccgccctcgcttcctgccgggagtggaggcttcttcaggggatacacaaagctgtgcaagggcctcgccgtcatattgctcattgtgcaccttgtagtccagttgtttccgtccgccgtcacctatctcgcgcttatccctggaagaacgatcccttttgcttggaacctgataactgcaggctatgtcgagcaaacaattccagggatggttgtcagcatcattggccttcttttatttgggaagttgttagaacctctatggggttcaaaagagttatcaaagttcatttttatcgtcaacctttcaacttctgcttgtgttttcatgactgctattgtgctgtactatataactcagcaagagatctacctctatactcctttttctggattttatggggttctatcaggattgttggtgggcattaaacagcttttacctgatcaagagcttaatctttttgtgctaaaaattaaggcaaagtggattccatctcttgttgcattgatatccattcttggaagcatcttcatatacgactttatgtcttacctcccagttctgttgtttggcatgtatatgagttggatctacctccgttactttcaaaagagacttgagaccagcctgaaaggggatccaagtgaggagttctctttctcaagcttcttccctgaatttgtaagaccatttctcgacccaatagcatctgtattccataggttactttgtggaagatctgatgccaggggagaaacattagacacctcaccattacctggttcagattcgtttgaggcaaacaggaggaggtccttgagctagtggagtcaccaattgttcctgtgactgtcatgttttctgtgtttgttcgactattgcagatctgcagtagcttgtagctccat

SEQ ID NO: 213599 - DNA, 1085 bp, Zea Mays
taatgctaaatcaaggcagttgcaggttcagggtcaaaagtacgatccggacggtgaatatgtaagaacttggattcctgaacttgctagaatgccaacagaatggatccatagtccatgggctgcgccaaactctatattacaagttgctggagttgagctgggctttaactacccaaagcccatagtagaacttcatatggcgcgggaatgtttagatgacgccatctccacaatgtggcaattggacacagctgcaaaacttgctgaactagatggtgaagttgttgacgacaatctgaataatatcaggaattttgatatcccaaaggtggttttgaacaagaaattatcaccaagcacttcatccatggagcacagggtgttgtctactaatggcaaggacgaaaagtcgcagcctactgaagtgaaggccctgtacaaacagattattcgagatgatatgatgaatgactcaaacatggatgacacatgctctactgctaacttgaaagtgacaaggaaaagatctagcagtgatagtgcgttcaatgttccctcatgttcatcctcattagtcatggaatcacggattcatcataatgaacctagttctgttctgtattcaggctacttccagaagacagcagacagagatggcactagttgaagataatgacagtgaagatagtggtacgagcatctctaggccatccaagaaagctgcttagcattagcgcattgaagatgttgcaaatcttcaatgagaaatatttaccgtcacatgtaatttagctggtgcgtttgtagtgatcatgcaaaagctgttctgtgaattataattagttttacacggcctatccttattccgatagaaggcaatttttgtttggtgaaaaaacatcgctcacggacaggccatagtttgctgtcgctgctgaacagcctaatgcctggtgtaaatgactcatcaacgttacgacactattagcgctggttggttttgctatcaatccgtattcatggattgggtaagattgagtagatttaaatatcaaataaatcaaaatgttttataatttttt

SEQ ID NO: 213600 - DNA, 3745 bp, Zea Mays
gcggtgatgattgcgatgacgattattaatccattgccagccggttcgttgaccgccacgtcaccgtcgtcgtcttccttgcgtccgtccgtccgtcctctccatcaattgcaattggttggaaggttggagagatttgatttgctggttgtactactgtcgaaccccagcccgtccgtaccctacgcatcttcctctcccatccatccactctttgcttcatcgatccccactgctgtgctgtgctgtgctgcgtagcttatccgaggggacaggtgagggagtcgagggggacggcgcatgaaagaaagagaccgagggggaggcggcgagagcgagaaggcaccgccgacggcgagacctaggatgcagacaaggccaaatccacatcgatggagccaagcccgatggccgttggtgttggcggcccaaagaggaggtggacgcgcagtcggaggcggaggtgcgtatgcccatcgtcgccatctagctgcgcctccttatatgcccctccggctccgattagcttacctccatcgatctccccaccatggacgccaacgccaatgccctcggcatggacgctatcaccaacgaaaccgtcgacctggagcatgtccctgtggaggaggtcttcgagcatctcaaatgcacccgcgacggcctaacctccgccgctgcccaggataggatcgacgcctttggctacaacaagctggaagagaagcaggaaagcaaagtgctcaagttcctgggcttcatgtggaaccccctttcctgggtcatggaggcagcagccataatggctatcgcccttgctcatggcggcagagatgttaggggaaagccaatggggatagactaccatgactttgtcggaattatgttactgctcattatcaattccaccattagcttcatagaggaaaacaatgccgggaatgctgctgctgcgcttatggcccgcctcgcaccaaaatccaaggttttacgtgatggaacctggagtgaaatggacgcatctttgttggtgcccggtgacataatcagcattaaacttggagacatcattccggcagatgcgcgtcttctcgagggagatccgctgaaaattgaccaggtctgcacttacgggagaatcgctacctgtaaccaaacaacctggtgacgggatctactctggttcaacctgtaagcaaggtgaaatagaagcagttgttattgccactggaatccatactttcttcggaaaagcagctcatctggttgagtcaaccactcatgttggccactttcagaaggttctcacatcaattggaaacttctgcatttgctcaattgctgctggaatgactattgagttaatcgtgatgtacgctattcatgcaagagaataccgtcagattgttgataacctcctagtgcttcttatcggaggaattccaattgccatgcccacggttctctctgtcactatggctattggatcacacaaactagcacagcagggtgccattaccaagaggatgactgccatagaagaaatggctggaatggatgtcctttgcagtgacaaaacaggaactctgacactcaacaaactaagcgttgacaagaatttaattgaggtttttgctcgaggcatggagaaggatgacgttgtcttaatggccgcaagagcttctagactagagaatcaagatgctattgattttgctattgtttcaatgttgccagatccgaaagaggcgcgtgccggcattcaagaagttcatttcctcccattcaatccaactgacaagagaacagcacttacatacttagacgctaggggtaaaatgcacagggttagcaaaggcgctcctgaacagatcctgaacctagcatcgaacaagtctgagattgaaaggaaggtccatcattctattggcaattatgcagagagagggctacgatcgcttgctgttgcctatcaggaagtacctgaagggactaaggaaagttctggtgggccttggcaatttattggtcttctcccactctttgatcctcctcgccatgacagtgctgaaactatacgcagagctcttgaccttggagtcagtgtaaaaatgattacaggtgatcagttggctatagctaaggagactggccggagactaggaatgggcacaaacatgtatccttcttcatcattgctgggtgacaaaaaaggtgacatcgcagttctaccagtggacgaattgattgagcaagcggatggatttgctggagttttcccagagcacaaatacgagattgtgcagaggttgcaagccagaaagcacatatgtgggatgactggagatggagttaatgatgcacctgctttgaagatagcagatattggtattgctgtggctgatgctactgatgctgctcgaggtgcttctgacatagttctgacggaacctggattgagtgtcatcatcagtgctgtactaaccagtcgggcaattttccaaagaatgaagaattatactatatatgctgtatctataaccatacgtattgtgcttgggtttttgctcttggcatgcttttggaagtttgacttccctccgatgcttgttcttgtgatagctattcttaatgatggaactattatgactatatccaaagacaaggtgaggccatctccccatccggacagttggaagctagcagagatatttgcaactggagtgatcattggggcgtatttggctgtaaccacggtgctgttcttttgggtaatttacaagacggagttttttgtgagggttttccacgttagaacaatgaatagaaaaaagatcgaagaaacaggagaccagaatctacttgccgacaacatggagatgctggcctctgcagtgtaccttcaagtgagcaccattagccaggcgttgatatttgtgacgaggtcgaggggttggtccttcatggagaggcctggcctgctgctgatggccgcattcgtgatagctcagctgatcgcgtctgtgcttgctgccatggtgagctgggagcttgctggcatcaaaggcatcgggtggcgttggaccggcgtgatctggctgtacaacttggttgtgtacctgctgctggacccgatcaagttcgcggtgcggtacgggctgagcggcaaggcctggaacctggtgatcgaccacaaggtggccttcacgaaccgcaaggactttgggaaggaggcccgggaggcggcatgggcgcacgagcagcgcacactgcatgggctggagagcgccgggacccctggggagaaagcggcgtcggtggagctggggcagatggcggaggacgcccggcggcgcgcggagatcgccaggctgcgggagctgcacaccctcaagggcaaggtggaatcggtggtgaagctcaaagggctggacctggaggacatcaacaaccagcactacacggtgtaagtgtaaccgccgtgattgattcgtcatagcctccttatcttagagagagggatataaagtaataattggatgcaataaccatctgattggttgcccccactatcttgtcctaaactatcacatgcgttgattttatcttaaacttctgtttggttctttgtacgtgaaagacgtaagttgcatatcatttttgttgcacccgtagataggaaacaaatcattttctgtttgatataaagtagtaattggatcgttagtaaccggtctgatttgct

SEQ ID NO: 213601 - DNA, 882 bp, Zea Mays
cgcatatccagataaaaaaaacttgcctgcttgcactgcagatgcgttgtttttgctaacagcaagcaggcaagtcagcagcctaaccttctttgatatttacagagaagatgaaaaggagaactggagagcagtagtggcagtcacttcactggtcaagcattcctatccacctcggcccacctccacctccctgacagtcattttgttatataaaacccatcaagctcccctgcaaggagatacagaaccctgcaactgcaagctaaggagagtgtgatcaccaacagctagtgctagtcccccttccttccatccatccatggcatgcgtcagcaccttccagagctgccccattgccagaagagcaaagatcaacaccaggtccaggggcagcagcagtagcgtggcgaaggggtcaccaccaccagccttccagttccagtgcagggcgtcgactttcgcggcggacaccagcctccggctcgagctggacgagaaccccgaggcgatcatctcgggggcgtggcccgggaactgctccctcctcagctacgacgacctccgcgcctacctcgagtcgcaggagacggcggcccaggcagacgatcagcgcggcgtggcgctcctgagcgagaccatgtccacacccgtgctggtggccacagcagaccagaccctggaggacgtcgagtgccacttcgaggccgtgtcggggcttccggtcgtcgacagcggcctcagatgcgtcggggtgatcgtcaagaacgaccgggcaagagcctctcatgggtccaagacgaagatatcggaagtgatgacatctccagctatcacactatcgtctgacaaaaccgtgatggtgcatgcctaacgtctaca

SEQ ID NO: 213602 - DNA, 668 bp, Zea Mays
gcctcgggagaagagctcaaggcatttttccgtccagagttgctcaatagaatcgacgagatggttgtgttccgtcctctggagaagactcagatgctggccattcttgatatcatcctaaaggaagtcaagggccgacttttggccctcgggataggtttggaggtgtctgatgcaatgaaggacctgatatgccaagagggctacgacaaaagctatggcgctcggcctctgaggagagctgtcacccacattatcgaggatgtcatcagcgaagcgattctttttggcgagttcaagcccggtgacacgatactgatggacatcgatgcagaggggaagccatgcatgggccatctggaccaacagatcgtccaggtctctgacccaacacgggcaatctgaagctgtgttggaccttttccagtgtagtagattagggatctaaatcttttattctttcaagatagagattattaattctttgttacgtagatatatagagtagtatttcattatgtatatatatcaaccagatgatccagataggggaatctggtcagtcattggagttatttgaaattttcatccagctgtatgtatattgttgaattgtttctgattcaactggccatatatatcatcattaaactatcttcatcggctta

SEQ ID NO: 213603 - DNA, 3216 bp, Zea Mays
ggactcgtgtccctccttccttgcgtgcttccttccccttccttccgttccgtcctccccgcctccgcccccgcctccgccgcgcggtatttttataccgctctcccccgtctcctcctcgcctactcatccactcgccacgccacgccacgccacgcctccaactccaagcagatagatagactagatagctgttggcgtgcgacgcgtagcgagagcgtgactaaccgctgcctaagcaagcatataagcatttgattcgttcctaggacaggggagggttaaggtagttccttaatttttcttgtttctttttttgtgtgtcgttgctggtgcggtagctatggaggtgtgctgctgctccacctcgtcgtccgtcctcaccgccgggggccgcggcgccgcggcgcggaggctggccgcgccggcggctcgctggggcgcagcggggttcgggagggcggtggtgctggcgcacccgctcccacgcccggcatccgcggccgcggcggcgcccacgcgccgggcgcgcagggggggcgtcggcgtcgtcagggcggtgttcgagcggttcacggagcgggccgtcaaggcggtcgtgctgtcgcagcgggaggcccgggggctcggggagcccgccgtggcgccgcgccacctcctcctcggcctggtcgccgaggaccgatcctcgggcggcttcctctcgtcggggatcaacatcgagcgcgcgcgcgaggagtgccgcggcatcgctgccagtgccagggacgcggactcggccaccgcggcgtctaggcccgggtcgtcggggctcgacacggacgtgcccttcgccgcgcccaccaagcaggtcttcgacgtggccgtcgtgctctccaagaacatgggctccagcttcgtctcgcccgagcacctcgccatcgcactcttctccctcgacgatccaaccaccaacaacctcctaaggagtttgggagcggatcccagtcatctagcatcggttgcagtcgaccgtctccaagcagagcttgcgaaagatggcagagatcctgctgaaccatcatctttcaaagttccaaagaaagcccctgctgcagccggaagatctgccttctcccagtccttgactaaaaagaaagataagggtgcgctggatcaattttgtttggatttgaccacacaagctagtggaggtttcattgatcctattattggccgtgaagaagagattgaaagagtagttcagatagtatgccggcggacgaagaacaaccctattcttttgggtgaggcgggtgttggcaaaactgcaattgccgagggtctggctcttcgaattgcaaatggagatgtccccatttaccttgtggcaaagcgcatattgtcgctagatgttggtctccttattgctggtgcaaaggagaggggtgaactggagtctagggttactaatataatccgcgaggtccgggaagcaggcgatgttattctttttattgatgaggtccacaaccttattggatctggaactgttggaaagagtaagggttctggtcttgacattggcaacttgctgaagcccgcgcttgctagaggtgaattgcagtgcattgctgctacaactctagatgaacaccggatgcattttgagaaggataaggctttggcccgccgcttccagccagtactagtagatgagcctagtcaggaagatgctgtgaagatattactgggtcttcgtgaaaaatatgaaacttaccataaatgcaaattcacattggaagccatcaatgcagcagtttatttgtcagcaagatacattcctgacagacagcttcctgataaggctattgatctgattgatgaggctggaagtagagctcggatggaatcatttaataggaagaaggaagggcagtcttcgattctcttgaagtcaccagatgaatactggcaagagataagagctgctcaggccatgcatgaagtggtgttatctaacaaggaaaaatattctccaaatgagaatgctgaagagagtggtagtgctaacgttgaagcactacacagagacaatattgagtcaacatctacttcatcactctcagctgatgaaccagttgtagttgggacagaggaaattgcaagggttgcctcattatggtctgggataccagtacagcagttgactgccgacgataaaaaacttctagtaggactggacgacgaactcagaaaacgtgtcattggccaagatgatgctgttgtggccatatctcgtgcagtgaagagatcacgtgttggccttaacgatcctgatagacctattgctacgctgcttttctgtggtccaacaggagttggtaaaacagagctcaccaaagctctagcagctagttattttggatcgggtcgcagggtttccttcaaaaatacgttgattgtcatgacttcgaatgttggttcaacatcaatttcaaaaggaagacagagcataggtttcttgaaggaagataccgagtcaggctcatacttcgcaatgaaatccttagtgatggaagagctcaaggcatttttccgtccagagttgctcaatagaatcgacgagatggttgtgttccgtcctctggagaagactcagatgctggccattcttgatatcatcctaaaggaagtcaagggccgacttttggccctcgggataggtttggaggtgtctgatgcaatgaaggacctgatatgccaagagggctacgacaaaagctatggcgctcggcctctgaggagagctgtcacccacattatcgaggatgtcatcagcgaagcgattctttttggcgagttcaagcccggtgacacgatactgatggacatcgatgcagaggggaagccatgcatgggccatctggaccaacagatcgtccaggtctctgacccaacacgggcaatctgaagctgtgttggaccttttccagtgtagtagattagggatctaaatcttttattctttcaagatagagattattaattctttgttacgtagatatatagagtagtatttcattatgtatatatatcaaccagatgatccagataggggaatctggtcagtcattggagttatttgaaattttcatccagctgtatgtatattgttgaattgtttctgattcaactggccatatatatcatcattaaactatcttcatcggctta

SEQ ID NO: 213604 - DNA, 3402 bp, Zea Mays
tccgttccgtcctccccgcctccgcccccgcctccgccgcgcggtatttttataccgctctcccccgtctcctcctcgcctactcatccactcgccacgccacgccacgccacgcctccaactccaagcagatagatagactagatagctgttggcgtgcgacgcgtagcgagagcgtgactaaccgctgcctaagcaagcatataagcatttgattcgttcctaggacaggggagggttaaggtagttccttaatttttcttgtttctttttttgtgtgtcgttgctggtgcggtagctatggaggtgtgctgctgctccacctcgtcgtccgtcctcaccgccgggggccgcggcgccgcggcgcggaggctggccgcgccggcggctcgctggggcgcagcggggttcgggagggcggtggtgctggcgcacccgctcccacgcccggcatccgcggccgcggcggcgcccacgcgccgggcgcgcagggggggcgtcggcgtcgtcagggcggtgttcgagcggttcacggagcgggccgtcaaggcggtcgtgctgtcgcagcgggaggcccgggggctcggggagcccgccgtggcgccgcgccacctcctcctcggcctggtcgccgaggaccgatcctcgggcggcttcctctcgtcggggatcaacatcgagcgcgcgcgcgaggagtgccgcggcatcgctgccagtgccagggacgcggactcggccaccgcggcgtctaggcccgggtcgtcggggctcgacacggacgtgcccttcgccgcgcccaccaagcaggtcttcgacgtggccgtcgtgctctccaagaacatgggctccagcttcgtctcgcccgagcacctcgccatcgcactcttctccctcgacgatccaaccaccaacaacctcctaaggagtttgggagcggatcccagtcatctagcatcggttgcagtcgaccgtctccaagcagagcttgcgaaagatggcagagatcctgctgaaccatcatctttcaaagttccaaagaaagcccctgctgcagccggaagatctgccttctcccagtccttgactaaaaagaaagggtgcgctggatcaattttgtttggatttgaccacacaagctagtggaggtttcattgatcctattattggccgtgaagaagagattgaaagagtagttcagatagtatgccggcggacgaagaacaaccctattcttttgggtgaggcgggtgttggcaaaactgcaattgccgagggtctggctcttcgaattgcaaatggagatgtccccatttaccttgtggcaaagcgcatattgtcgctagatgttggtctccttattgctggtgcaaaggagaggggtgaactggagtctagggttactaatataatccgcgaggtccgggaagcaggcgatgttattctttttattgatgaggtccacaaccttattggatctggaactgttggaaagagtaagggttctggtcttgacattggcaacttgctgaagcccgcgcttgctagaggtgaattgcagtgcattgctgctacaactctagatgaacaccggatgcattttgagaaggataaggctttggcccgccgcttccagccagtactagtagatgagcctagtcaggaagatgctgtgaagatattactgggtcttcgtgaaaaatatgaaacttaccataaatgcaaattcacattggaagccatcaatgcagcagtttatttgtcagcaagatacattcctgacagacagcttcctgataaggctattgatctgattgatgaggctggaagtagagctcggatggaatcatttaataggaagaaggaagggcagtcttcgattctcttgaagtcaccagatgaatactggcaagagataagagctgctcaggccatgcatgaagtggtgttatctaacaaggaaaaatattctccaaatgagaatgctgaagagagtggtagtgctaacgttgaagcactacacagagacaatattgagtcaacatctacttcatcactctcagctgatgaaccagttgtagttgggacagaggaaattgcaagggttgcctcattatggtctgggataccagtacagcagttgactgccgacgataaaaaacttctagtaggactggacgacgaactcagaaaacgtgtcattggccaagatgatgctgttgtggccatatctcgtgcagtgaagagatcacgtgttggccttaacgatcctgatagacctattgctacgctgcttttctgtggtccaacaggagttggtaaaacagagctcaccaaagctctagcagctagttattttggatcggaatctgctatgcttaggttagacatgagcgagtatatggagaggcacactgtgagcaagctcataggctctcctccagggtacattgggtatggtgaaactggtactttgacagaagcagtcaggagaaaaccatttactgtggtattgttggatgagatagagaaagctcaccctgatattttcaacatccttctccaaatatttgaggatggacatttgacagactcacagggtcgcagggtttccttcaaaaatacgttgattgtcatgacttcgaatgttggttcaacatcaatttcaaaaggaagacagagcataggtttcttgaaggaagataccgagtcaggctcatacttcgcaatgaaatccttagtgatggaagagctcaaggcatttttccgtccagagttgctcaatagaatcgacgagatggttgtgttccgtcctctggagaagactcagatgctggccattcttgatatcatcctaaaggaagtcaagggccgacttttggccctcgggataggtttggaggtgtctgatgcaatgaaggacctgatatgccaagagggctacgacaaaagctatggcgctcggcctctgaggagagctgtcacccacattatcgaggatgtcatcagcgaagcgattctttttggcgagttcaagcccggtgacacgatactgatggacatcgatgcagaggggaagccatgcatgggccatctggaccaacagatcgtccaggtctctgacccaacacgggcaatctgaagctgtgttggaccttttccagtgtagtagattagggatctaaatcttttattctttcaagatagagattattaattctttgttacgtagatatatagagtagtatttcattatgtatatatatcaaccagatgatccagataggggaatctggtcagtcattggagttatttgaaattttcatccagctgtatgtatattgttgaattgtttctgattcaactggccatatatatcatcattaaactatcttcatcggctta

SEQ ID NO: 213605 - DNA, 3377 bp, Zea Mays
ctccgcccccgcctccgccgcgcggtatttttataccgctctcccccgtctcctcctcgcctactcatccactcgccacgccacgccacgccacgcctccaactccaagcagatagatagactagatagctgttggcgtgcgacgcgtagcgagagcgtgactaaccgctgcctaagcaagcatataagcatttgattcgttcctaggacaggggagggttaaggtagttccttaatttttcttgtttctttttttgtgtgtcgttgctggtgcggtagctatggaggtgtgctgctgctccacctcgtcgtccgtcctcaccgccgggggccgcggcgccgcggcgcggaggctggccgcgccggcggctcgctggggcgcagcggggttcgggagggcggtggtgctggcgcacccgctcccacgcccggcatccgcggccgcggcggcgcccacgcgccgggcgcgcagggggggcgtcggcgtcgtcagggcggtgttcgagcggttcacggagcgggccgtcaaggcggtcgtgctgtcgcagcgggaggcccgggggctcggggagcccgccgtggcgccgcgccacctcctcctcggcctggtcgccgaggaccgatcctcgggcggcttcctctcgtcggggatcaacatcgagcgcgcgcgcgaggagtgccgcggcatcgctgccagtgccagggacgcggactcggccaccgcggcgtctaggcccgggtcgtcggggctcgacacggacgtgcccttcgccgcgcccaccaagcaggtcttcgacgtggccgtcgtgctctccaagaacatgggctccagcttcgtctcgcccgagcacctcgccatcgcactcttctccctcgacgatccaaccaccaacaacctcctaaggagtttgggagcggatcccagtcatctagcatcggttgcagtcgaccgtctccaagcagagcttgcgaaagatggcagagatcctgctgaaccatcatctttcaaagttccaaagaaagcccctgctgcagccggaagatctgccttctcccagtccttgactaaaaagaaagataagggtgcgctggatcaattttgtttggatttgaccacacaagctagtggaggtttcattgatcctattattggccgtgaagaagagattgaaagagtagttcagatagtatgccggcggacgaagaacaaccctattcttttgggtgaggcgggtgttggcaaaactgcaattgccgagggtctggctcttcgaattgcaaatggagatgtccccatttaccttgtggcaaagcgcatattgtcgctagatgttggtctccttattgctggtgcaaaggagaggggtgaactggagtctagggttactaatataatccgcgaggtccgggaagcaggcgatgttattctttttattgatgaggtccacaaccttattggatctggaactgttggaaagagtaagggttctggtcttgacattggcaacttgctgaagcccgcgcttgctagagtgcattgctgctacaactctagatgaacaccggatgcattttgagaaggataaggctttggcccgccgcttccagccagtactagtagatgagcctagtcaggaagatgctgtgaagatattactgggtcttcgtgaaaaatatgaaacttaccataaatgcaaattcacattggaagccatcaatgcagcagtttatttgtcagcaagatacattcctgacagacagcttcctgataaggctattgatctgattgatgaggctggaagtagagctcggatggaatcatttaataggaagaaggaagggcagtcttcgattctcttgaagtcaccagatgaatactggcaagagataagagctgctcaggccatgcatgaagtggtgttatctaacaaggaaaaatattctccaaatgagaatgctgaagagagtggtagtgctaacgttgaagcactacacagagacaatattgagtcaacatctacttcatcactctcagctgatgaaccagttgtagttgggacagaggaaattgcaagggttgcctcattatggtctgggataccagtacagcagttgactgccgacgataaaaaacttctagtaggactggacgacgaactcagaaaacgtgtcattggccaagatgatgctgttgtggccatatctcgtgcagtgaagagatcacgtgttggccttaacgatcctgatagacctattgctacgctgcttttctgtggtccaacaggagttggtaaaacagagctcaccaaagctctagcagctagttattttggatcggaatctgctatgcttaggttagacatgagcgagtatatggagaggcacactgtgagcaagctcataggctctcctccagggtacattgggtatggtgaaactggtactttgacagaagcagtcaggagaaaaccatttactgtggtattgttggatgagatagagaaagctcaccctgatattttcaacatccttctccaaatatttgaggatggacatttgacagactcacagggtcgcagggtttccttcaaaaatacgttgattgtcatgacttcgaatgttggttcaacatcaatttcaaaaggaagacagagcataggtttcttgaaggaagataccgagtcaggctcatacttcgcaatgaaatccttagtgatggaagagctcaaggcatttttccgtccagagttgctcaatagaatcgacgagatggttgtgttccgtcctctggagaagactcagatgctggccattcttgatatcatcctaaaggaagtcaagggccgacttttggccctcgggataggtttggaggtgtctgatgcaatgaaggacctgatatgccaagagggctacgacaaaagctatggcgctcggcctctgaggagagctgtcacccacattatcgaggatgtcatcagcgaagcgattctttttggcgagttcaagcccggtgacacgatactgatggacatcgatgcagaggggaagccatgcatgggccatctggaccaacagatcgtccaggtctctgacccaacacgggcaatctgaagctgtgttggaccttttccagtgtagtagattagggatctaaatcttttattctttcaagatagagattattaattctttgttacgtagatatatagagtagtatttcattatgtatatatatcaaccagatgatccagataggggaatctggtcagtcattggagttatttgaaattttcatccagctgtatgtatattgttgaattgtttctgattcaactggccatatatatcatcattaaactatcttcatcggctta

SEQ ID NO: 213606 - DNA, 968 bp, Zea Mays
gtggcctttggtggttgatccgtcgatggtacccgtttgcgtgtgagcttgcaaaatcctgggcttggtcatctttcttcagagtttctctttccaacaatcaagatgagccgtggcggtagcgcgggtggtggtcaaagttctctgggttacctctttggaagcggtgagccccccaaaccagcagtggcaccagctgtaagtgctccacctgctgctgcaggtgctccacctgctgagaaaccacctgctgcaaagcctgatggcaccagtcagattgctgctggggttaccagccaaaccaataactaccacagggccgacggtcagaacaccggaaacttccttacggaccgtccttcgaccaaggtccacgctgctcctggcggtggctcttccctgggatacctgtttggtggcaactgatgccgctcaccaagctatcaccccccactgtcgccgcatgctttttctgaatcgtgaacagccgttgtcatttcatgtgtacccaaacctcccgtcccgcgtgggcccgtaagctgcgcctagatttcagggctaatcgtgtgcctgaaccctcatcataagtcgtctctgtacccagcttctcgtttcgtttgcacccgtgatggtatggtttggttgttgcccgctggacctatctattctttgcatttttcctttgaaatgtatccttgcccatttcgatgcgtccggtgaagtgttcttgcatactttattactcgcctgacagcacttgagtacagcgtcgtgcctggctggccttctgcagtggcttcggctcatgctgaagctccgccaaatggtcatcgaagaagccgttctggcttgaagattggtctgaatgactggatctgcttgactgttatgctgctgaggaacaggagccgcaaaaaaaaaaacgaattaagtacaacaaaactgtcaacagggataacgaattaact

SEQ ID NO: 213607 - DNA, 1023 bp, Zea Mays
tcccacgcctctgcctgcccagatttatctcctccaggccacccctccccaggttctcttcccctagatctccccgccacctttctcgcttgtgcagtggcaccaccatgcgaggagctaggaaggaggacagaacttgtttctctttccaacaatcaagatgagccgtggcggtagcgcgggtggtggtcaaagttctctgggttacctctttggaagcggtgagccccccaaaccagcagtggcaccagctgtaagtgctccacctgctgctgcaggtgctccacctgctgagaaaccacctgctgcaaagcctgatggcaccagtcagattgctgctggggttaccagccaaaccaataactaccacagggccgacggtcagaacaccggaaacttccttacggaccgtccttcgaccaaggtccacgctgctcctggcggtggctcttccctgggatacctgtttggtggcaactgatgccgctcaccaagctatcaccccccactgtcgccgcatgctttttctgaatcgtgaacagccgttgtcatttcatgtgtacccaaacctcccgtcccgcgtgggcccgtaagctgcgcctagatttcagggctaatcgtgtgcctgaaccctcatcataagtcgtctctgtacccagcttctcgtttcgtttgcacccgtgatggtatggtttggttgttgcccgctggacctatctattctttgcatttttcctttgaaatgtatccttgcccatttcgatgcgtccggtgaagtgttcttgcatactttattactcgcctgacagcacttgagtacagcgtcgtgcctggctggccttctgcagtggcttcggctcatgctgaagctccgccaaatggtcatcgaagaagccgttctggcttgaagattggtctgaatgactggatctgcttgactgttatgctgctgaggaacaggagccgcaaaaaaaaaaacgaattaagtacaacaaaactgtcaacagggataacgaattaact

SEQ ID NO: 213608 - DNA, 4913 bp, Zea Mays
ctccgtctcgtcatcggcaggacatccacaccaacccgtgctcaaggaaaaaaaaccggggcggcgaaaaccctcgaaccctaatccttacgcccctcatggcggacgctgatgcggcgctgccaacgccgcctccggaggtagtagcccccgaggagcatcccgtgggcgccgaatccaccgtcgccgcgccggccgaagtcgataacaagcggaagctagaggaggtcagcgccgacgcggaggtgaaaggcaccagcgaggacgccaagcgcccgcgcgtggacggcgagcccgacgccgcaacaggggttgagcagcaaatcgatgggtcctccgtgaatgcggatcccgcagctccggaggataaggctgctcttaacgttggcgcagcaatggatggtgataatgacacgcctgctcccgctcccgctccagactcgcaggcggtttctgacgagaagccgcttgaagcagcagctgaagctccacagcaggaaggtgatgcagcaactgctgtacaggagatttctcgtaagatcgaagtgcccaacagcaaggttggtgtcgttattggaaaagctggtgagacaatcaggaacttgcaaatcagctcgggtgcaaagatccaaatcaccaaggacatcgaagcggactcaaatgccctgactcggccggttgaactagttggaacacctggcagcgttgataaagctgagcagcttattaagagtgtcatagctgaggctgaggctggtggttcccctgccttaatagctagaggatttggaagtggacagcctggatcagagcaatttgagatgacagttcctgataacaaggtcggtctcattatcggaaaaggtggtgagacaattaaaggcatgcagaccaaatctggtgctcgtattcagttaataccccaacatcctccagagggtgttacattgactgaaagaattgtacgtgttactgggaataagaagcagattgaagctgcaaaggatttgatcaagcaagctatgaatcaggtgatgtgatcttcctttgtgattttttggtagtcgatttgtgtttcaattgttaagtcatggtagatgctggtatgatactatatgcttttaattgttcatgctttatgtgattttactctgatggttgctgatgatgtcatcacatttcatgattcattgttcatgatatggttacttttgtgatcgtagataccgaattcaatgttgtcttcatggtattttttgaccaaggcaaattcaacctatcgagaacattgccttattacaatgctatgatggaccaattgattttttagctttgggtttcataatatgcctgtttttatcattgcatacattttgtacaattttcctgatcaagccaaacttgagaatccatgataagctttgtagcttgcatatatttgggttccataatatgcctgttttatcattgcacgcaattcatagtttcatactgtctttctgttcaaactaagcttgagaattccctgatgagctttgtagcttatataggtgtcccaagtgtactgatatttttgttatgaacaaaacatgatttgattttgtacttcattcatactgtgaatatattactatttctcttgtatcggacccttgaattttaagtgttgttttaaactaatcaatcttctctacacttggccttgtatgaagtatccatgatatatagcagagcctaattgggctggaaggtaagtttcttttaatgtttgagttctcatctttagatgaaagacaaatgggacaccgttgcgttttcaagattataaggatgtaaaacttttaaatccgatttactagctcaatgaatatttcactttctttcccttgtcaaaatctcttatcctgggtgttaagcactgcgaactttggcttattttgccttcttgtttttactggatcatacacgcttccattttgtacctgttcgttggagcatagttcttgatttatgcattaatgacatatgatatatgaattatggaagagtaaaaaatgagtgcatgatcatacgattcagaaatgaacttttgagctgtaatacatagcatatgatttgtctggaaatctgggtactgattgaattcttgatcccattagcttgactattcttcgtaggatatacactatgagtaggacttctcatcttcatctatcagccttaacagtaaacatgggcatgctttggatcaatgtccatgactatagctttggaagtgttgtataccagcggatcatccagttgctagatgagatatgattctgtttcctacataagcagtctgaactgacacatcaagttccctcgcttctagttttcgtcaattatttttgttgaaggtgccgatttggagttggtcaggtatcctaatgcagatacagctagctttcttcatggggggtcatcgctcttcatcgtttacttgcaccgaagagggacattgaccattatcccttagccttgcatggtgtatgtagttggtaactggtaaggctgcctattgccgaaaggaaacataaactgtttggcattggaagactgcaacaagtgtatcattgccatgacaaggcttctacatcaccatgttaggtttgctaagctgaatcatttgtgactgtatgttgtctgcaaaacagaacttccatatgttatagttgaacgattaagaatttagtgttgttgttacttatttggtatgtcactgttaactatagtttgagttgcttagcattattattcttcccattagtcacggttgctattagaaagtaagtatgtgtgatatagtgtatttaatatcaatattattgtgttatccattgaagctgtttatgtttatgcgatgcatctataaattaaattctgaagtaaccctttgcttgtatttctatttcttgttgcaatttttaatgatggttaaccaagatgcacagaaattcgtggagattttgttaatggaattcttttcttgaacattgttttttgaatgacatagttatcaatgctggacagtgtttaagaagtatgaaatatgagctactatgcaggcgtattttcttaatgccgttcttatttaactgcaatttgtacagtctggttgccccttgatggtttcctataacctgttgctttatgttagtttgtagtgtctgttatttacttccccttttggtttctaacatgaattcttgtacagacattttcaaagcatacaaatcagtctggcggatatggtccacaaggttaccgacctcagggtcatggtgccgcttctcagttggggccacgctctcagaatcatggctatggatacccacctagaggtatgcctccacctcaaaactacaacgcaccctacggtggctacccaccgcagggaccgtcaagaggtggcatgggctgggaccagaggccgggcccaccaacccatccttcgtaccagggtggtggttctgactactacaagcagggatctcagccatatgatagccagccacccagctaccctcctgggccagggaattacaacagttatgggcaatcccagggccctaactatggccaacctcagtatccgcaacatgcacctcaacagaactacagccatggctatggtgatcctagatacaatgccccccctccgaaccagcagtactatggtcagccaccgatggccccgcagcaaggctatcctcaacagccagatccctatgctaggcctccatacagtggacctggtcaatggacccccaggggtgctcccgccgcagatggctcctaccaggcgccaccttcatcttatgggccaccgtctcagcaacctcctgcttatgggcaaacatatggtgcagcaacgggacctgatgggtatggtcaacagggttacccacagcagggtggccaggtaccagcttcatatggtcagagtgcaccagcagctccaggatatcctcagcaaggcacgcagcaaggtggctatgcacagtacccgcagacccaaccagcatatggtgatcaagcagctcaagccaatgcgaactatgggtaccagggagctccagcagatcccaactacggaagtgcgtacccacagcagccagggtatggtcctcctggtcaggcaactggtcaggctggttatgcatcctctgcgccagcggccagccagcctgtgtatggccaggctggatatacccagccacctacaaatcctccaagttatgatcagtctgcagcaccagcggcgactcagagcggttatgctgcgccccctgcaaatccacaacagcctgctgcagcaaaaggggtctcgccacagcctgctgctgctgctgctgctggatatggtgctagcgggcagtggacggcatgagcctcgtcttccgaacttcgatgacagcaaggtcaggttggatatccgcttttggcgcgtgtttgaatgtttgcatcttttggatgtctgtggacgcatcatgtagggcttgaccccgttatcgaaagagattgtaaccccttgagttgtgatactggacatcttctgtagtatctacgagtagttgcttaatgtgacttttaaacattctattcagtttggatgttccttgtcttgctacttcacagcttgccaagccagtaatctttggattcatgtttggttgctctttggtctttgctgtcgttcctgtaaataaatattggcgtttggccttctcttacgtcgttcatgggatgacggggtgccctttcgagttggcaatagatctgctgttcatccaaactcagttggttttgtttgtatttgttccgaatcatgttggtacagttagcatgtgaatggacaagccattagccat

SEQ ID NO: 213609 - DNA, 4294 bp, Zea Mays
tcgtcatcggcaggacatccacaccaacccgtgctcaaggaaaaaaaaccggggcggcgaaaaccctcgaaccctaatccttacgcccctcatggcggacgctgatgcggcgctgccaacgccgcctccggaggtagtagcccccgaggagcatcccgtgggcgccgaatccaccgtcgccgcgccggccgaagtcgataacaagcggaagctagaggaggtcagcgccgacgcggaggtgaaaggcaccagcgaggacgccaagcgcccgcgcgtggacggcgagcccgacgccgcaacaggggttgagcagcaaatcgatgggtcctccgtgaatgcggatcccgcagctccggaggataaggctgctcttaacgttggcgcagcaatggatggtgataatgacacgcctgctcccgctcccgctccagactcgcaggcggtttctgacgagaagccgcttgaagcagcagctgaagctccacagcaggaaggtgatgcagcaactgctgtacaggagatttctcgtaagatcgaagtgcccaacagcaaggttggtgtcgttattggaaaagctggtgagacaatcaggaacttgcaaatcagctcgggtgcaaagatccaaatcaccaaggacatcgaagcggactcaaatgccctgactcggccggttgaactagttggaacacctggcagcgttgataaagctgagcagcttattaagagtgtcatagctgaggctgaggctggtggttcccctgccttaatagctagaggatttggaagtggacagcctggatcagagcaatttgagatgacagttcctgataacaaggtcggtctcattatcggaaaaggtggtgagacaattaaaggcatgcagaccaaatctggtgctcgtattcagttaataccccaacatcctccagagggtgttacattgactgaaagaattgtacgtgttactgggaataagaagcagattgaagctgcaaaggatttgatcaagcaagctatgaatcaggtgatgtgatcttcctttgtgattttttggtagtcgatttgtgtttcaattgttaagtcatggtagatgctggtatgatactatatgcttttaattgttcatgctttatgtgattttactctgatggttgctgatgatgtcatcacatttcatgattcattgttcatgatatggttacttttgtgatcgtagataccgaattcaatgttgtcttcatggtattttttgaccaaggcaaattcaacctatcgagaacattgccttattacaatgctatgatggaccaattgattttttagctttgggtttcataatatgcctgtttttatcattgcatacattttgtacaattttcctgatcaagccaaacttgagaatccatgataagctttgtagcttgcatatatttgggttccataatatgcctgttttatcattgcacgcaattcatagtttcatactgtctttctgttcaaactaagcttgagaattccctgatgagctttgtagcttatataggtgtcccaagtgtactgatatttttgttatgaacaaaacatgatttgattttgtacttcattcatactgtgaatatattactatttctcttgtatcggacccttgaattttaagtgttgttttaaactaatcaatcttctctacacttggccttgtatgaagtatccatgatatatagcagagcctaattgggctggaaggtaagtttcttttaatgtttgagttctcatctttagatgaaagacaaatgggacaccgttgcgttttcaagattataaggatgtaaaacttttaaatccgatttactagctcaatgaatatttcactttctttcccttgtcaaaatctcttatcctgggtgttaagcactgcgaactttggcttattttgccttcttgtttttactggatcatacacgcttccattttgtacctgttcgttggagcatagttcttgatttatgcattaatgacatatgatatatgaattatggaagagtaaaaaatgagtgcatgatcatacgattcagaaatgaacttttgagctgtaatacatagcatatgatttgtctggaaatctgggtactgattgaattcttgatcccattagcttgactattcttcgtaggatatacactatgagtaggacttctcatcttcatctatcagccttaacagtaaacatgggcatgctttggatcaatgtccatgactatagctttggaagtgttgtataccagcggatcatccagttgctagatgagatatgattctgtttcctacataagcagtctgaactgacacatcaagttccctcgcttctagttttcgtcaattatttttgttgaaggtgccgatttggagttggtcaggtatcctaatgcagatacagctagctttcttcatggggggtcatcgctcttcatcgtttacttgcaccgaagagggacattgaccattatcccttagccttgcatggtgtatgtagttggtaactggtaaggctgcctattgccgaaaggaaacataaactgtttggcattggaagactgcaacaagtgtatcattgccatgacaaggcttctacatcaccatacattttcaaagcatacaaatcagtctggcggatatggtccacaaggttaccgacctcagggtcatggtgccgcttctcagttggggccacgctctcagaatcatggctatggatacccacctagaggtatgcctccacctcaaaactacaacgcaccctacggtggctacccaccgcagggaccgtcaagaggtggcatgggctgggaccagaggccgggcccaccaacccatccttcgtaccagggtggtggttctgactactacaagcagggatctcagccatatgatagccagccacccagctaccctcctgggccagggaattacaacagttatgggcaatcccagggccctaactatggccaacctcagtatccgcaacatgcacctcaacagaactacagccatggctatggtgatcctagatacaatgccccccctccgaaccagcagtactatggtcagccaccgatggccccgcagcaaggctatcctcaacagccagatccctatgctaggcctccatacagtggacctggtcaatggacccccaggggtgctcccgccgcagatggctcctaccaggcgccaccttcatcttatgggccaccgtctcagcaacctcctgcttatgggcaaacatatggtgcagcaacgggacctgatgggtatggtcaacagggttacccacagcagggtggccaggtaccagcttcatatggtcagagtgcaccagcagctccaggatatcctcagcaaggcacgcagcaaggtggctatgcacagtacccgcagacccaaccagcatatggtgatcaagcagctcaagccaatgcgaactatgggtaccagggagctccagcagatcccaactacggaagtgcgtacccacagcagccagggtatggtcctcctggtcaggcaactggtcaggctggttatgcatcctctgcgccagcggccagccagcctgtgtatggccaggctggatatacccagccacctacaaatcctccaagttatgatcagtctgcagcaccagcggcgactcagagcggttatgctgcgccccctgcaaatccacaacagcctgctgcagcaaaaggggtctcgccacagcctgctgctgctgctgctgctggatatggtgctagcgggcagtggacggcatgagcctcgtcttccgaacttcgatgacagcaaggtcaggttggatatccgcttttggcgcgtgtttgaatgtttgcatcttttggatgtctgtggacgcatcatgtagggcttgaccccgttatcgaaagagattgtaaccccttgagttgtgatactggacatcttctgtagtatctacgagtagttgcttaatgtgacttttaaacattctattcagtttggatgttccttgtcttgctacttcacagcttgccaagccagtaatctttggattcatgtttggttgctctttggtctttgctgtcgttcctgtaaataaatattggcgtttggccttctcttacgtcgttcatgggatgacggggtgccctttcgagttggcaatagatctgctgttcatccaaactcagttggttttgtttgtatttgttccgaatcatgttggtacagttagcatgtgaatggacaagccattagccat

SEQ ID NO: 213610 - DNA, 4069 bp, Zea Mays
gtcatcggcaggacatccacaccaacccgtgctcaaggaaaaaaaaccggggcggcgaaaaccctcgaaccctaatccttacgcccctcatggcggacgctgatgcggcgctgccaacgccgcctccggaggtagtagcccccgaggagcatcccgtgggcgccgaatccaccgtcgccgcgccggccgaagtcgataacaagcggaagctagaggaggtcagcgccgacgcggaggtgaaaggcaccagcgaggacgccaagcgcccgcgcgtggacggcgagcccgacgccgcaacaggggttgagcagcaaatcgatgggtcctccgtgaatgcggatcccgcagctccggaggataaggctgctcttaacgttggcgcagcaatggatggtgataatgacacgcctgctcccgctcccgctccagactcgcaggcggtttctgacgagaagccgcttgaagcagcagctgaagctccacagcaggaaggtgatgcagcaactgctgtacaggagatttctcgtaagatcgaagtgcccaacagcaaggttggtgtcgttattggaaaagctggtgagacaatcaggaacttgcaaatcagctcgggtgcaaagatccaaatcaccaaggacatcgaagcggactcaaatgccctgactcggccggttgaactagttggaacacctggcagcgttgataaagctgagcagcttattaagagtgtcatagctgaggctgaggctggtggttcccctgccttaatagctagaggatttggaagtggacagcctggatcagagcaatttgagatgacagttcctgataacaaggtcggtctcattatcggaaaaggtggtgagacaattaaaggcatgcagaccaaatctggtgctcgtattcagttaataccccaacatcctccagagggtgttacattgactgaaagaattgtacgtgttactgggaataagaagcagattgaagctgcaaaggatttgatcaagcaagctatgaatcaggtgatgtgatcttcctttgtgattttttggtagtcgatttgtgtttcaattgttaagtcatggtagatgctggtatgatactatatgcttttaattgttcatgctttatgtgattttactctgatggttgctgatgatgtcatcacatttcatgattcattgttcatgatatggttacttttgtgatcgtagataccgaattcaatgttgtcttcatggtattttttgaccaaggcaaattcaacctatcgagaacattgccttattacaatgctatgatggaccaattgattttttagctttgggtttcataatatgcctgtttttatcattgcatacattttgtacaattttcctgatcaagccaaacttgagaatccatgataagctttgtagcttgcatatatttgggttccataatatgcctgttttatcattgcacgcaattcatagtttcatactgtctttctgttcaaactaagcttgagaattccctgatgagctttgtagcttatataggtgtcccaagtgtactgatatttttgttatgaacaaaacatgatttgattttgtacttcattcatactgtgaatatattactatttctcttgtatcggacccttgaattttaagtgttgttttaaactaatcaatcttctctacacttggccttgtatgaagtatccatgatatatagcagagcctaattgggctggaaggtaagtttcttttaatgtttgagttctcatctttagatgaaagacaaatgggacaccgttgcgttttcaagattataaggatgtaaaacttttaaatccgatttactagctcaatgaatatttcactttctttcccttgtcaaaatctcttatcctgggtgttaagcactgcgaactttggcttattttgccttcttgtttttactggatcatacacgcttccattttgtacctgttcgttggagcatagttcttgatttatgcattaatgacatatgatatatgaattatggaagagtaaaaaatgagtgcatgatcatacgattcagaaatgaacttttgagctgtaatacatagcatatgatttgtctggaaatctgggtactgattgaattcttgatcccattagcttgactattcttcgtaggatatacactatgagtaggacttctcatcttcatctatcagccttaacagtaaacatgggcatgctttggatcaatgtccatgactatagctttggaagtgttgtataccagcggatcatccagttgctagatgagatatgattctgtttcctacataagcagtctgaactgacacatcaagttccctcgcttctagttttcgtcaattatttttgttgaaggtgccgatttggagttggtcagacattttcaaagcatacaaatcagtctggcggatatggtccacaaggttaccgacctcagggtcatggtgccgcttctcagttggggccacgctctcagaatcatggctatggatacccacctagaggtatgcctccacctcaaaactacaacgcaccctacggtggctacccaccgcagggaccgtcaagaggtggcatgggctgggaccagaggccgggcccaccaacccatccttcgtaccagggtggtggttctgactactacaagcagggatctcagccatatgatagccagccacccagctaccctcctgggccagggaattacaacagttatgggcaatcccagggccctaactatggccaacctcagtatccgcaacatgcacctcaacagaactacagccatggctatggtgatcctagatacaatgccccccctccgaaccagcagtactatggtcagccaccgatggccccgcagcaaggctatcctcaacagccagatccctatgctaggcctccatacagtggacctggtcaatggacccccaggggtgctcccgccgcagatggctcctaccaggcgccaccttcatcttatgggccaccgtctcagcaacctcctgcttatgggcaaacatatggtgcagcaacgggacctgatgggtatggtcaacagggttacccacagcagggtggccaggtaccagcttcatatggtcagagtgcaccagcagctccaggatatcctcagcaaggcacgcagcaaggtggctatgcacagtacccgcagacccaaccagcatatggtgatcaagcagctcaagccaatgcgaactatgggtaccagggagctccagcagatcccaactacggaagtgcgtacccacagcagccagggtatggtcctcctggtcaggcaactggtcaggctggttatgcatcctctgcgccagcggccagccagcctgtgtatggccaggctggatatacccagccacctacaaatcctccaagttatgatcagtctgcagcaccagcggcgactcagagcggttatgctgcgccccctgcaaatccacaacagcctgctgcagcaaaaggggtctcgccacagcctgctgctgctgctgctgctggatatggtgctagcgggcagtggacggcatgagcctcgtcttccgaacttcgatgacagcaaggtcaggttggatatccgcttttggcgcgtgtttgaatgtttgcatcttttggatgtctgtggacgcatcatgtagggcttgaccccgttatcgaaagagattgtaaccccttgagttgtgatactggacatcttctgtagtatctacgagtagttgcttaatgtgacttttaaacattctattcagtttggatgttccttgtcttgctacttcacagcttgccaagccagtaatctttggattcatgtttggttgctctttggtctttgctgtcgttcctgtaaataaatattggcgtttggccttctcttacgtcgttcatgggatgacggggtgccctttcgagttggcaatagatctgctgttcatccaaactcagttggttttgtttgtatttgttccgaatcatgttggtacagttagcatgtgaatggacaagccattagccat

SEQ ID NO: 213611 - DNA, 4292 bp, Zea Mays
gtcatcggcaggacatccacaccaacccgtgctcaaggaaaaaaaaccggggcggcgaaaaccctcgaaccctaatccttacgcccctcatggcggacgctgatgcggcgctgccaacgccgcctccggaggtagtagcccccgaggagcatcccgtgggcgccgaatccaccgtcgccgcgccggccgaagtcgataacaagcggaagctagaggaggtcagcgccgacgcggaggtgaaaggcaccagcgaggacgccaagcgcccgcgcgtggacggcgagcccgacgccgcaacaggggttgagcagcaaatcgatgggtcctccgtgaatgcggatcccgcagctccggaggataaggctgctcttaacgttggcgcagcaatggatggtgataatgacacgcctgctcccgctcccgctccagactcgcaggcggtttctgacgagaagccgcttgaagcagcagctgaagctccacagcaggaaggtgatgcagcaactgctgtacaggagatttctcgtaagatcgaagtgcccaacagcaaggttggtgtcgttattggaaaagctggtgagacaatcaggaacttgcaaatcagctcgggtgcaaagatccaaatcaccaaggacatcgaagcggactcaaatgccctgactcggccggttgaactagttggaacacctggcagcgttgataaagctgagcagcttattaagagtgtcatagctgaggctgaggctggtggttcccctgccttaatagctagaggatttggaagtggacagcctggatcagagcaatttgagatgacagttcctgataacaaggtcggtctcattatcggaaaaggtggtgagacaattaaaggcatgcagaccaaatctggtgctcgtattcagttaataccccaacatcctccagagggtgttacattgactgaaagaattgtacgtgttactgggaataagaagcagattgaagctgcaaaggatttgatcaagcaagctatgaatcaggtgatgtgatcttcctttgtgattttttggtagtcgatttgtgtttcaattgttaagtcatggtagatgctggtatgatactatatgcttttaattgttcatgctttatgtgattttactctgatggttgctgatgatgtcatcacatttcatgattcattgttcatgatatggttacttttgtgatcgtagataccgaattcaatgttgtcttcatggtattttttgaccaaggcaaattcaacctatcgagaacattgccttattacaatgctatgatggaccaattgattttttagctttgggtttcataatatgcctgtttttatcattgcatacattttgtacaattttcctgatcaagccaaacttgagaatccatgataagctttgtagcttgcatatatttgggttccataatatgcctgttttatcattgcacgcaattcatagtttcatactgtctttctgttcaaactaagcttgagaattccctgatgagctttgtagcttatataggtgtcccaagtgtactgatatttttgttatgaacaaaacatgatttgattttgtacttcattcatactgtgaatatattactatttctcttgtatcggacccttgaattttaagtgttgttttaaactaatcaatcttctctacacttggccttgtatgaagtatccatgatatatagcagagcctaattgggctggaaggtaagtttcttttaatgtttgagttctcatctttagatgaaagacaaatgggacaccgttgcgttttcaagattataaggatgtaaaacttttaaatccgatttactagctcaatgaatatttcactttctttcccttgtcaaaatctcttatcctgggtgttaagcactgcgaactttggcttattttgccttcttgtttttactggatcatacacgcttccattttgtacctgttcgttggagcatagttcttgatttatgcattaatgacatatgatatatgaattatggaagagtaaaaaatgagtgcatgatcatacgattcagaaatgaacttttgagctgtaatacatagcatatgatttgtctggaaatctgggtactgattgaattcttgatcccattagcttgactattcttcgtaggatatacactatgagtaggacttctcatcttcatctatcagccttaacagtaaacatgggcatgctttggatcaatgtccatgactatagctttggaagtgttgtataccagcggatcatccagttgctagatgagatatgattctgtttcctacataagcagtctgaactgacacatcaagttccctcgcttctagttttcgtcaattatttttgttgaaggtgccgatttggagttggtcaggtatcctaatgcagatacagctagctttcttcatggggggtcatcgctcttcatcgtttacttgcaccgaagagggacattgaccattatcccttagccttgcatggtgtatgtagttggtaactggtaaggctgcctattgccgaaaggaaacataaactgtttggcattggaagactgcaacaagtgtatcattgccatgacaaggcttctacatcaccagacattttcaaagcatacaaatcagtctggcggatatggtccacaaggttaccgacctcagggtcatggtgccgcttctcagttggggccacgctctcagaatcatggctatggatacccacctagaggtatgcctccacctcaaaactacaacgcaccctacggtggctacccaccgcagggaccgtcaagaggtggcatgggctgggaccagaggccgggcccaccaacccatccttcgtaccagggtggtggttctgactactacaagcagggatctcagccatatgatagccagccacccagctaccctcctgggccagggaattacaacagttatgggcaatcccagggccctaactatggccaacctcagtatccgcaacatgcacctcaacagaactacagccatggctatggtgatcctagatacaatgccccccctccgaaccagcagtactatggtcagccaccgatggccccgcagcaaggctatcctcaacagccagatccctatgctaggcctccatacagtggacctggtcaatggacccccaggggtgctcccgccgcagatggctcctaccaggcgccaccttcatcttatgggccaccgtctcagcaacctcctgcttatgggcaaacatatggtgcagcaacgggacctgatgggtatggtcaacagggttacccacagcagggtggccaggtaccagcttcatatggtcagagtgcaccagcagctccaggatatcctcagcaaggcacgcagcaaggtggctatgcacagtacccgcagacccaaccagcatatggtgatcaagcagctcaagccaatgcgaactatgggtaccagggagctccagcagatcccaactacggaagtgcgtacccacagcagccagggtatggtcctcctggtcaggcaactggtcaggctggttatgcatcctctgcgccagcggccagccagcctgtgtatggccaggctggatatacccagccacctacaaatcctccaagttatgatcagtctgcagcaccagcggcgactcagagcggttatgctgcgccccctgcaaatccacaacagcctgctgcagcaaaaggggtctcgccacagcctgctgctgctgctgctgctggatatggtgctagcgggcagtggacggcatgagcctcgtcttccgaacttcgatgacagcaaggtcaggttggatatccgcttttggcgcgtgtttgaatgtttgcatcttttggatgtctgtggacgcatcatgtagggcttgaccccgttatcgaaagagattgtaaccccttgagttgtgatactggacatcttctgtagtatctacgagtagttgcttaatgtgacttttaaacattctattcagtttggatgttccttgtcttgctacttcacagcttgccaagccagtaatctttggattcatgtttggttgctctttggtctttgctgtcgttcctgtaaataaatattggcgtttggccttctcttacgtcgttcatgggatgacggggtgccctttcgagttggcaatagatctgctgttcatccaaactcagttggttttgtttgtatttgttccgaatcatgttggtacagttagcatgtgaatggacaagccattagccat

SEQ ID NO: 213612 - DNA, 4297 bp, Zea Mays
gtcatcggcaggacatccacaccaacccgtgctcaaggaaaaaaaaccggggcggcgaaaaccctcgaaccctaatccttacgcccctcatggcggacgctgatgcggcgctgccaacgccgcctccggaggtagtagcccccgaggagcatcccgtgggcgccgaatccaccgtcgccgcgccggccgaagtcgataacaagcggaagctagaggaggtcagcgccgacgcggaggtgaaaggcaccagcgaggacgccaagcgcccgcgcgtggacggcgagcccgacgccgcaacaggggttgagcagcaaatcgatgggtcctccgtgaatgcggatcccgcagctccggaggataaggctgctcttaacgttggcgcagcaatggatggtgataatgacacgcctgctcccgctcccgctccagactcgcaggcggtttctgacgagaagccgcttgaagcagcagctgaagctccacagcaggaaggtgatgcagcaactgctgtacaggagatttctcgtaagatcgaagtgcccaacagcaaggttggtgtcgttattggaaaagctggtgagacaatcaggaacttgcaaatcagctcgggtgcaaagatccaaatcaccaaggacatcgaagcggactcaaatgccctgactcggccggttgaactagttggaacacctggcagcgttgataaagctgagcagcttattaagagtgtcatagctgaggctgaggctggtggttcccctgccttaatagctagaggatttggaagtggacagcctggatcagagcaatttgagatgacagttcctgataacaaggtcggtctcattatcggaaaaggtggtgagacaattaaaggcatgcagaccaaatctggtgctcgtattcagttaataccccaacatcctccagagggtgttacattgactgaaagaattgtacgtgttactgggaataagaagcagattgaagctgcaaaggatttgatcaagcaagctatgaatcaggtgatgtgatcttcctttgtgattttttggtagtcgatttgtgtttcaattgttaagtcatggtagatgctggtatgatactatatgcttttaattgttcatgctttatgtgattttactctgatggttgctgatgatgtcatcacatttcatgattcattgttcatgatatggttacttttgtgatcgtagataccgaattcaatgttgtcttcatggtattttttgaccaaggcaaattcaacctatcgagaacattgccttattacaatgctatgatggaccaattgattttttagctttgggtttcataatatgcctgtttttatcattgcatacattttgtacaattttcctgatcaagccaaacttgagaatccatgataagctttgtagcttgcatatatttgggttccataatatgcctgttttatcattgcacgcaattcatagtttcatactgtctttctgttcaaactaagcttgagaattccctgatgagctttgtagcttatataggtgtcccaagtgtactgatatttttgttatgaacaaaacatgatttgattttgtacttcattcatactgtgaatatattactatttctcttgtatcggacccttgaattttaagtgttgttttaaactaatcaatcttctctacacttggccttgtatgaagtatccatgatatatagcagagcctaattgggctggaaggtaagtttcttttaatgtttgagttctcatctttagatgaaagacaaatgggacaccgttgcgttttcaagattataaggatgtaaaacttttaaatccgatttactagctcaatgaatatttcactttctttcccttgtcaaaatctcttatcctgggtgttaagcactgcgaactttggcttattttgccttcttgtttttactggatcatacacgcttccattttgtacctgttcgttggagcatagttcttgatttatgcattaatgacatatgatatatgaattatggaagagtaaaaaatgagtgcatgatcatacgattcagaaatgaacttttgagctgtaatacatagcatatgatttgtctggaaatctgggtactgattgaattcttgatcccattagcttgactattcttcgtaggatatacactatgagtaggacttctcatcttcatctatcagccttaacagtaaacatgggcatgctttggatcaatgtccatgactatagctttggaagtgttgtataccagcggatcatccagttgctagatgagatatgattctgtttcctacataagcagtctgaactgacacatcaagttccctcgcttctagttttcgtcaattatttttgttgaaggtgccgatttggagttggtcaggtatcctaatgcagatacagctagctttcttcatggggggtcatcgctcttcatcgtttacttgcaccgaagagggacattgaccattatcccttagccttgcatggtgtatgtagttggtaactggtaaggctgcctattgccgaaaggaaacataaactgtttggcattggaagactgcaacaagtgtatcattgccatgacaaggcttctacatcaccatgttagacattttcaaagcatacaaatcagtctggcggatatggtccacaaggttaccgacctcagggtcatggtgccgcttctcagttggggccacgctctcagaatcatggctatggatacccacctagaggtatgcctccacctcaaaactacaacgcaccctacggtggctacccaccgcagggaccgtcaagaggtggcatgggctgggaccagaggccgggcccaccaacccatccttcgtaccagggtggtggttctgactactacaagcagggatctcagccatatgatagccagccacccagctaccctcctgggccagggaattacaacagttatgggcaatcccagggccctaactatggccaacctcagtatccgcaacatgcacctcaacagaactacagccatggctatggtgatcctagatacaatgccccccctccgaaccagcagtactatggtcagccaccgatggccccgcagcaaggctatcctcaacagccagatccctatgctaggcctccatacagtggacctggtcaatggacccccaggggtgctcccgccgcagatggctcctaccaggcgccaccttcatcttatgggccaccgtctcagcaacctcctgcttatgggcaaacatatggtgcagcaacgggacctgatgggtatggtcaacagggttacccacagcagggtggccaggtaccagcttcatatggtcagagtgcaccagcagctccaggatatcctcagcaaggcacgcagcaaggtggctatgcacagtacccgcagacccaaccagcatatggtgatcaagcagctcaagccaatgcgaactatgggtaccagggagctccagcagatcccaactacggaagtgcgtacccacagcagccagggtatggtcctcctggtcaggcaactggtcaggctggttatgcatcctctgcgccagcggccagccagcctgtgtatggccaggctggatatacccagccacctacaaatcctccaagttatgatcagtctgcagcaccagcggcgactcagagcggttatgctgcgccccctgcaaatccacaacagcctgctgcagcaaaaggggtctcgccacagcctgctgctgctgctgctgctggatatggtgctagcgggcagtggacggcatgagcctcgtcttccgaacttcgatgacagcaaggtcaggttggatatccgcttttggcgcgtgtttgaatgtttgcatcttttggatgtctgtggacgcatcatgtagggcttgaccccgttatcgaaagagattgtaaccccttgagttgtgatactggacatcttctgtagtatctacgagtagttgcttaatgtgacttttaaacattctattcagtttggatgttccttgtcttgctacttcacagcttgccaagccagtaatctttggattcatgtttggttgctctttggtctttgctgtcgttcctgtaaataaatattggcgtttggccttctcttacgtcgttcatgggatgacggggtgccctttcgagttggcaatagatctgctgttcatccaaactcagttggttttgtttgtatttgttccgaatcatgttggtacagttagcatgtgaatggacaagccattagccat

SEQ ID NO: 213613 - DNA, 4195 bp, Zea Mays
gtcatcggcaggacatccacaccaacccgtgctcaaggaaaaaaaaccggggcggcgaaaaccctcgaaccctaatccttacgcccctcatggcggacgctgatgcggcgctgccaacgccgcctccggaggtagtagcccccgaggagcatcccgtgggcgccgaatccaccgtcgccgcgccggccgaagtcgataacaagcggaagctagaggaggtcagcgccgacgcggaggtgaaaggcaccagcgaggacgccaagcgcccgcgcgtggacggcgagcccgacgccgcaacaggggttgagcagcaaatcgatgggtcctccgtgaatgcggatcccgcagctccggaggataaggctgctcttaacgttggcgcagcaatggatggtgataatgacacgcctgctcccgctcccgctccagactcgcaggcggtttctgacgagaagccgcttgaagcagcagctgaagctccacagcaggaaggtgatgcagcaactgctgtacaggagatttctcgtaagatcgaagtgcccaacagcaaggttggtgtcgttattggaaaagctggtgagacaatcaggaacttgcaaatcagctcgggtgcaaagatccaaatcaccaaggacatcgaagcggactcaaatgccctgactcggccggttgaactagttggaacacctggcagcgttgataaagctgagcagcttattaagagtgtcatagctgaggctgaggctggtggttcccctgccttaatagctagaggatttggaagtggacagcctggatcagagcaatttgagatgacagttcctgataacaaggtcggtctcattatcggaaaaggtggtgagacaattaaaggcatgcagaccaaatctggtgctcgtattcagttaataccccaacatcctccagagggtgttacattgactgaaagaattgtacgtgttactgggaataagaagcagattgaagctgcaaaggatttgatcaagcaagctatgaatcaggtgatgtgatcttcctttgtgattttttggtagtcgatttgtgtttcaattgttaagtcatggtagatgctggtatgatactatatgcttttaattgttcatgctttatgtgattttactctgatggttgctgatgatgtcatcacatttcatgattcattgttcatgatatggttacttttgtgatcgtagataccgaattcaatgttgtcttcatggtattttttgaccaaggcaaattcaacctatcgagaacattgccttattacaatgctatgatggaccaattgattttttagctttgggtttcataatatgcctgtttttatcattgcatacattttgtacaattttcctgatcaagccaaacttgagaatccatgataagctttgtagcttgcatatatttgggttccataatatgcctgttttatcattgcacgcaattcatagtttcatactgtctttctgttcaaactaagcttgagaattccctgatgagctttgtagcttatataggtgtcccaagtgtactgatatttttgttatgaacaaaacatgatttgattttgtacttcattcatactgtgaatatattactatttctcttgtatcggacccttgaattttaagtgttgttttaaactaatcaatcttctctacacttggccttgtatgaagtatccatgatatatagcagagcctaattgggctggaaggtaagtttcttttaatgtttgagttctcatctttagatgaaagacaaatgggacaccgttgcgttttcaagattataaggatgtaaaacttttaaatccgatttactagctcaatgaatatttcactttctttcccttgtcaaaatctcttatcctgggtgttaagcactgcgaactttggcttattttgccttcttgtttttactggatcatacacgcttccattttgtacctgttcgttggagcatagttcttgatttatgcattaatgacatatgatatatgaattatggaagagtaaaaaatgagtgcatgatcatacgattcagaaatgaacttttgagctgtaatacatagcatatgatttgtctggaaatctgggtactgattgaattcttgatcccattagcttgactattcttcgtaggatatacactatgagtaggacttctcatcttcatctatcagccttaacagtaaacatgggcatgctttggatcaatgtccatgactatagctttggaagtgttgtataccagcggatcatccagttgctagatgagatatgattctgtttcctacataagcagtctgaactgacacatcaagttccctcgcttctagttttcgtcaattatttttgttgaaggtgccgatttggagttggtcaggtatcctaatgcagatacagctagctttcttcatggggggtcatcgctcttcatcgtttacttgcaccgaagagggacattgaccattatcccttagccttgcatggtgtatgtagttggtaactgacattttcaaagcatacaaatcagtctggcggatatggtccacaaggttaccgacctcagggtcatggtgccgcttctcagttggggccacgctctcagaatcatggctatggatacccacctagaggtatgcctccacctcaaaactacaacgcaccctacggtggctacccaccgcagggaccgtcaagaggtggcatgggctgggaccagaggccgggcccaccaacccatccttcgtaccagggtggtggttctgactactacaagcagggatctcagccatatgatagccagccacccagctaccctcctgggccagggaattacaacagttatgggcaatcccagggccctaactatggccaacctcagtatccgcaacatgcacctcaacagaactacagccatggctatggtgatcctagatacaatgccccccctccgaaccagcagtactatggtcagccaccgatggccccgcagcaaggctatcctcaacagccagatccctatgctaggcctccatacagtggacctggtcaatggacccccaggggtgctcccgccgcagatggctcctaccaggcgccaccttcatcttatgggccaccgtctcagcaacctcctgcttatgggcaaacatatggtgcagcaacgggacctgatgggtatggtcaacagggttacccacagcagggtggccaggtaccagcttcatatggtcagagtgcaccagcagctccaggatatcctcagcaaggcacgcagcaaggtggctatgcacagtacccgcagacccaaccagcatatggtgatcaagcagctcaagccaatgcgaactatgggtaccagggagctccagcagatcccaactacggaagtgcgtacccacagcagccagggtatggtcctcctggtcaggcaactggtcaggctggttatgcatcctctgcgccagcggccagccagcctgtgtatggccaggctggatatacccagccacctacaaatcctccaagttatgatcagtctgcagcaccagcggcgactcagagcggttatgctgcgccccctgcaaatccacaacagcctgctgcagcaaaaggggtctcgccacagcctgctgctgctgctgctgctggatatggtgctagcgggcagtggacggcatgagcctcgtcttccgaacttcgatgacagcaaggtcaggttggatatccgcttttggcgcgtgtttgaatgtttgcatcttttggatgtctgtggacgcatcatgtagggcttgaccccgttatcgaaagagattgtaaccccttgagttgtgatactggacatcttctgtagtatctacgagtagttgcttaatgtgacttttaaacattctattcagtttggatgttccttgtcttgctacttcacagcttgccaagccagtaatctttggattcatgtttggttgctctttggtctttgctgtcgttcctgtaaataaatattggcgtttggccttctcttacgtcgttcatgggatgacggggtgccctttcgagttggcaatagatctgctgttcatccaaactcagttggttttgtttgtatttgttccgaatcatgttggtacagttagcatgtgaatggacaagccattagccat

SEQ ID NO: 213614 - DNA, 1179 bp, Zea Mays
aattctctgcctccgccgccaggacgacggcaaatccgcccagacagggtggacgtcgacgccggcgaatcctgctcggattgcacacatcaccgccacccgtcgtgcgccgacatctgtaggtcgccagccaacaaccttagactgaggcaccctgaatccatctgctattgttcagcttggtgttcgggcaatccttgttctcgcctcagcacaaatagatcgccaagatgtctcaaccaaaagtcctttcatcaagcctttgtggagaagcatatattaatgaatgggatggaaagtacatatactcgatggattcatcatggagagaactttgaggaagatgccggtcattcgatacatgggacaggtgtgattgatgatgacagctatggtgatgattgttttgatgggatgttacaagacctatgcactgcataagagcaagataaagaggatggtgaaaatgaggatggagacaatactaatgatgacaatgagtcattttatagtgtagtgctgaaagaggcgaaacgtcatatttatcctggttgtaccaaattttcaaggttgtcctttgttgtaaagcttcttcatatgaagtcattatataggatcactaactctgcatttactgcaatattaaagttgttggttgaagcattcccaaagtgcaatacactcccaaaatcatataatgaagcaaagagtcttctaaagaaattaggtcttggatatgtatcaagattagagagcaagaagagatgaagaagaagcaagatgccatggatgctaaacttgagcttatgctaagtcagattcaaccaagttaaagctaactagtatggggtgttaggctttgttggtacttctcttttgctgatgctattgcattctattgatggataaatacgtttcaatccattttttgtctgttgtgctgctagagtagctttagcggcatgtgtggtgtgttggagtggcttacgtgtcagtggttggatacttgctgtaatgacatgctattggatacttgcatgtaatgacatgctggagtgtggtcagtattttttgtgatgagatgctggattaaaatctgagttgtgatgtaatagaattcaacattttgtcattatgttctggattataattaatatatatttaaattattgtgtttgc

SEQ ID NO: 213615 - DNA, 1204 bp, Zea Mays
aattctctgcctccgccgccaggacgacggcaaatccgcccagacagggtggacgtcgacgccggcgaatcctgctcggattgcacacatcaccgccacccgtcgtgcgccgacatctgtaggtcgccagccaacaaccttagactgaggcaccctgaatccatctgctattgttcagcttggtgttcgggcaatccttgttctcgcctcagcacaaatagatcgccaagatgaatagaagttggttgaatgtagatgtctcaaccaaaagtcctttcatcaagcctttgtggagaagcatatattaatgaatgggatggaaagtacatatactcgatggattcatcatggagagaactttgaggaagatgccggtcattcgatacatgggacaggtgtgattgatgatgacagctatggtgatgattgttttgatgggatgttacaagacctatgcactgcataagagcaagataaagaggatggtgaaaatgaggatggagacaatactaatgatgacaatgagtcattttatagtgtagtgctgaaagaggcgaaacgtcatatttatcctggttgtaccaaattttcaaggttgtcctttgttgtaaagcttcttcatatgaagtcattatataggatcactaactctgcatttactgcaatattaaagttgttggttgaagcattcccaaagtgcaatacactcccaaaatcatataatgaagcaaagagtcttctaaagaaattaggtcttggatatgtatcaagattagagagcaagaagagatgaagaagaagcaagatgccatggatgctaaacttgagcttatgctaagtcagattcaaccaagttaaagctaactagtatggggtgttaggctttgttggtacttctcttttgctgatgctattgcattctattgatggataaatacgtttcaatccattttttgtctgttgtgctgctagagtagctttagcggcatgtgtggtgtgttggagtggcttacgtgtcagtggttggatacttgctgtaatgacatgctattggatacttgcatgtaatgacatgctggagtgtggtcagtattttttgtgatgagatgctggattaaaatctgagttgtgatgtaatagaattcaacattttgtcattatgttctggattataattaatatatatttaaattattgtgtttgc

SEQ ID NO: 213616 - DNA, 1973 bp, Zea Mays
gaggggtgcaactcagaaaccatttgcagaatctacaactcacatgtcagaccaaacaaattgcaatgaagttgaagcagaagagtgtgatgcgtatgaagaaaatcaagaggaacctgtagcaatggtagaagaatctccacccgatgttggccaagatggtgatgatgggcaaggtattgattcgtcttggactgtggttggtacaccagttttacgagtcaagacaatttatatcagttcagcgattcttgctgcgaagagtcctttctttttcaagcttttctctaacggcatgaaagaatcggatcagagacatgcaacccttagaattactgactcagaggaaactgccctcatggagcttttaagctttatgtatagtggaaagttggcaactactgagcccactcttctgctggatatcttgatggctgccgacaaatttgaggttgtttcatgcatgaggtactgcagccagttgctcacaagcttgccgatgaccacagaatctgcacttctctacctagatctcccttgctcaatttcaatggcagcagcagttcaacctctgacagatgcagctaaggatttccttgctgtaaaatacaaggatttgactaagttccaagatgaagtgatgaacattcctcttgctggaattgaagccatcttgtcaagtaatgacctccaggtggcatctgaagataccatctatgacttcttgctcagatgggcccgtgcacaatacccgaaatcagaagagagacgtgagatccttagttctcggctgctccctcttgtgcgattcagtcacatgacatgtaggaagctgcggaaggtcctaacatgcacagatatagaccacgagcaggcaaccaagtgtgtcaccgaggctcttctgtacaaagctgatgcaccacaccggcaacgagctcttgcagcggacacaacaacctgtcggaaattcgctgagcgggcttacaagtacagaccactcaaggtcgttgagtttgatcggccctatccacagtgcatagcatacttggatctcaagcgcgaggagtgctctcgactctttcctgcaggccggatatactcgcaagcgttccacctcgcagggcagggcttcttcctctcagctcactgtaacatggagcagcaaagcaccttctactgctttggcctgttcctggggatgcaagagaagggctcaacgagcgtgaccgtggactatgagtttgctgcaaggacgagaccatccggcgagtttgtgagcaagtataagggtaactacacatttaccggtgggaaggcagttgggtacaggaatctctttggaatcccgtggcaggcgttcatggccgatgacagcctcttcttcatcgacgggatgctgcatctgagagctgagcttacgataaagcaacctacgtagatgtgctgccgtcgggttaagtgtgtccagtcatgggtgatgtggaaaatgctgtgtgctgcagatatcctttttgttttttttccttttgttcacgcaccttaatccttacattaatagacagtttggtgatgacaaaatataaaggaaaaaaaagggctggaaagctgccttttgttgtttcactaagatgaaggttgtatgatctctgtctcttcgtagtggaagttgttacaccagatgaaaaagaaaagatatcggatgggaatcctcactagcttgagttctctgcaagtttccagattggccggtatctcactgctaatgagctatgttctggttcgagcttttctttttcttttgttttcttttctttttttgatgggaaggacgagctgtcctattggcagcaaatgcggacgtttgtcgttggtaaggcctgctgctgctgcagtggcgctattgtttgatggcgcatttgacttgcccattgcaaggcggttgcagtgctattgttgtagcttagctaggtagg

SEQ ID NO: 213617 - DNA, 2718 bp, Zea Mays
agcccctccattgcctcattataaccaccaccgtctcttccttgtgtcttctcctcctttccctcccggccacttctctcgtttcgccctccccctcgagcaccccgccggctagggttacggccaccgccttccacgcctcccccacttcccgtaggcggaggctggtcggcgtgcacgcgaccgcggcggcggagatggacccggacttctcgcccgggggcggggggcccagctttgaattcgccttcaacgaggtcaacttctccgaccgggaattgcgtatcgaggtcgtcgccggggatgactacgctccggggtccagcggcgccggtgccggaggaggtggcctcgccgactgggcgcgccaccgcaagcgccgccgtgaggagctcctcaaggagaaagaatctacaactcacatgtcagaccaaacaaattgcaatgaagttgaagcagaagagtgtgatgcgtatgaagaaaatcaagaggaacctgtagcaatggtagaagaatctccacccgatgttggccaagatggtgatgatgggcaaggtattgattcgtcttggactgtggttggtacaccagttttacgagtcaagacaatttatatcagttcagcgattcttgctgcgaagagtcctttctttttcaagcttttctctaacggcatgaaagaatcggatcagagacatgcaacccttagaattactgactcaggtaacgtgacaactttgggaaactagagcatcctgcttcttttgtatttatttcctaataattttcatttttaaatcaactgttatgattatatatgccaagaatattcgatgtttccaaagttgtgcttttttttctttgatagtgacattgcctactatttttccctccttagctctacctatcaaatggatattttgtgtagcctgctttctgtacagatttcatcatttgttctctgagaaccagttgccacaaaaacacacacacacgtgcacaaacaaacacaaataaaatagaaaaatccttctctagtggatctttactttgtgcgtcatcctttttcccttaattctcttggaacagaggaaactgccctcatggagcttttaagctttatgtatagtggaaagttggcaactactgagcccactcttctgctggatatcttgatggctgccgacaaatttgaggttgtttcatgcatgaggtactgcagccagttgctcacaagcttgccgatgaccacagaatctgcacttctctacctagatctcccttgctcaatttcaatggcagcagcagttcaacctctgacagatgcagctaaggatttccttgctgtaaaatacaaggatttgactaagttccaagatgaagtgatgaacattcctcttgctggaattgaagccatcttgtcaagtaatgacctccaggtggcatctgaagataccatctatgacttcttgctcagatgggcccgtgcacaatacccgaaatcagaagagagacgtgagatccttagttctcggctgctccctcttgtgcgattcagtcacatgacatgtaggaagctgcggaaggtcctaacatgcacagatatagaccacgagcaggcaaccaagtgtgtcaccgaggctcttctgtacaaagctgatgcaccacaccggcaacgagctcttgcagcggacacaacaacctgtcggaaattcgctgagcgggcttacaagtacagaccactcaaggtcgttgagtttgatcggccctatccacagtgcatagcatacttggatctcaagcgcgaggagtgctctcgactctttcctgcaggccggatatactcgcaagcgttccacctcgcagggcagggcttcttcctctcagctcactgtaacatggagcagcaaagcaccttctactgctttggcctgttcctggggatgcaagagaagggctcaacgagcgtgaccgtggactatgagtttgctgcaaggacgagaccatccggcgagtttgtgagcaagtataagggtaactacacatttaccggtgggaaggcagttgggtacaggaatctctttggaatcccgtggcaggcgttcatggccgatgacagcctcttcttcatcgacgggatgctgcatctgagagctgagcttacgataaagcaacctacgtagatgtgctgccgtcgggttaagtgtgtccagtcatgggtgatgtggaaaatgctgtgtgctgcagatatcctttttgttttttttccttttgttcacgcaccttaatccttacattaatagacagtttggtgatgacaaaatataaaggaaaaaaaagggctggaaagctgccttttgttgtttcactaagatgaaggttgtatgatctctgtctcttcgtagtggaagttgttacaccagatgaaaaagaaaagatatcggatgggaatcctcactagcttgagttctctgcaagtttccagattggccggtatctcactgctaatgagctatgttctggttcgagcttttctttttcttttgttttcttttctttttttgatgggaaggacgagctgtcctattggcagcaaatgcggacgtttgtcgttggtaaggcctgctgctgctgcagtggcgctattgtttgatggcgcatttgacttgcccattgcaaggcggttgcagtgctattgttgtagcttagctaggtagg

SEQ ID NO: 213618 - DNA, 3264 bp, Zea Mays
caacagcgcagataagacaggctccagattacgatgcactgttcgtttctggccggaatatccgaaaagaccagcgtgccgagagtacagggacatacaagagtcggtacaagagagtccacagccaccccatccggcgccctcatcctgttttgcttgcccgcatccccgtcagtcattttggtgaaaaccgaaaagcgcctcccctcctgctctgctcctgcctctctcgtcactcgtcattgcggccgggcactgggccactggcatcgtaacaactgccgatacgcccgagacagcgcgggcggagccagcgagagggaaggccatgaggtcgcagctcaacgcgtccttctcgccgccgccctcgctccggcgagctctcccctctgccacgccccgcgccctcaggttccacgcgttcccgtggcggttccgcgctcctcagcaccacggccgcggcgctggagctcgctgcgctaccaatctgcccgcgcccggcagccatggagtcggagtgctcgcctccgagaggagggccgacgatggcgacactaccgtgaaaaatgcagatgcgcctagcacttcaacggcgacgcagggaaacctcaacatggctgccattgttagcatagcattctgctttctacacagaattgtttctggacggatgcagtcgatgatgaatttgttcccttggatgtcaaacggcattgcaagcttgccatttgcttgcatatctgatcctaccagaaaacccatgcctcttaagctagatttgactcttccaccactgcctgatttcggatggaatttttcgcgactgtactatcggttcaattctcagcttgatcggaacattgccttgtctatcattaccttgctcatcacttgcttttcatttgtcattgttggaggattactgtttcataagttcaggaagcaacaacaatccctggaggactgcttttgggaagcttgggcatgtctatgttcatcatctacccatctaaggcaaaagacacgtgttgagcgtgtcattgggttctttcttgctatctggggtatattattctattctcgattattaagtgcaatgacagaacaatttagaaaccagatgcataaagtaagggaaggggcacaggtgcaggttattgaggatgatcatatcattatttgtggagtcaatagtcatctgatgtctatattgaaccaattgaataagtaccatgaatcatcaattcgcttaggtttagctacagcaaggaagcagaaaatccttcttctctccgatcttccaaggaagcagattgataaacttgcagatagcttggccaaagatttaaaccatattgatgtattcaccaagagttgtagtcttagcatgtcaacgtcatttgagagagcagcagcacacaaagcaaaatctataattatcttgccagcacagcatgaacgatatgaagtggatacagatgcatttgtctctctattggctctacaaccctgtaaacaaattgcacctgttcctatcattgtcgaggcttccaatgcaaccacttgtgaacttctgaaatcaatcactggcttaaatgtgcaacctgtggagatggttgcttctaagttatttgtgcagtgctctaggcaaaaggaccttctgaaaatctacaagcacttgcttaatcagcacaaaaatgttttcaaccttttcaggcggcctgaattagagggcatgaagtatatggatgtgagacgtaaaatccatgatgcagtcgtttgtggtatcttccggtctggaaaaattcattttcacccaagcgaggaagaactactgaaagaaacagacaaattgcttcttattgctcctgttcgtgggatgaaaagaccacaatatagagcattaagtgtacggaaagaaacacaaacattgagtcgtaactcagagccaagagagggtcaaggatcatttaatatggctactaccatggataatgaaacacggctaaataacattgtaaagcgccccttgaaatctctttctaagagcagtgattatatgcttggacccaaggaatgtgtacttattgttggttggcggccaaaagttaccgaaatgatacgggagtacgataattaccttggacctggtagtacagtggaaatcttgtcggaaacccctattaaagagaggagcagtatcatcaacccccttttgcagagccagcttaaaaatgttaaagttactcaccgggtggggtgtcctttgaactacgatactctgaaggaaacaataattaacgtacgagaatctgccaagtcagataaagaggttccactgtcaatagttgtgatatctgacagagactggtttgttggagcagatgctgcacaggctgataaacagttggcatacacccttcttcttgctgaaaacatttgccagaaacatggcgttatggttgagaatcttgtatcagaaatcgttgacatgggactaggaaaacaaatatctaaaataagaccatccctttcatttattggagcagaggaaataatgagtcgtgtgacagcacaagttgcggaaagtagtgagctgaatgaagtatggaaggatatcctgaacgctgaaggcgatgagatctatattaaggaaattgggctgtacatgaaggaaggagagaaaatatcattcttggagctctctgaaagagcagttttacgccgtgaagttgcgattggttacatcaaggacggcaagcagcatattaatcctatcaacaaatcggagccgctgtcccttgaaatgaatgattcgctcattgtgatatcggagtttgaaggtgaacaaccaattatgatgggcggagaaacttcaggatgaaattttcagctttatatctcttcacagaaactctaacaactcttgctaccatgaagagatgacatataacctgtttataatccttttctttttgtacaaagggaaagcaaaatatagtttaaaggccacaaatcaagttttgttcctcccatagccgtagaacttctttgatgcaaatattttactgcacagtttaaccgcagaatcttttctatttatctgtaaacatagtgaataacacaggcaacttgtatggtacagatgtctgaataaaggaaggatgaaggaaaattgattgactatgttccttgttgtttccttctgactaatgaatacaatgtttccatttttttagtcctgagctagacaaaatcagctag

SEQ ID NO: 213619 - DNA, 4482 bp, Zea Mays
ataagacaggctccagattacgatgcactgttcgtttctggccggaatatccgaaaagaccagcgtgccgagagtacagggacatacaagagtcggtacaagagagtccacagccaccccatccggcgccctcatcctgttttgcttgcccgcatccccgtcagtcattttggtgaaaaccgaaaagcgcctcccctcctgctctgctcctgcctctctcgtcactcgtcattgcggccgggcactgggccactggcatcgtaacaactgccgatacgcccgagacagcgcgggcggagccagcgagagggaaggccatgaggtcgcagctcaacgcgtccttctcgccgccgccctcgctccggcgagctctcccctctgccacgccccgcgccctcaggtacggcgagcgcaccgcttcgatcggctccgcgtttctgctccgcagagcgacggaggctggcaggctgctgaacacagctctccctggttccaggttccacgcgttcccgtggcggttccgcgctcctcagcaccacggccgcggcgctggagctcgctgcgctaccaatctgcccgcgcccggcagccatggagtcggagtgctcgcctccgagaggagggccgacgatggcgacactaccgtgaaaaatgcagatgcgcctagcacttcaacggcgacgcagggaaacctcaacatggctgccattgttagcatagcattctgctttctacacagaattgtttctggacggatgcagtcgatgatgaatttgttcccttggatgtcaaacggcattgcaagcttgccatttgcttgcatatctgatcctaccagaaaacccatgcctcttaagctagatttgactcttccaccactgcctgatttcggatggaatttttcgcgactgtactatcggttcaattctcagcttgatcggaacattgccttgtctatcattaccttgctcatcacttgcttttcatttgtcattgttggaggattactgtttcataagttcaggaagcaacaacaatccctggaggactgcttttgggaagcttgggcatgtctatgttcatcatctacccatctaaggcaaaagacacgtgttgagcgtgtcattgggttctttcttgctatctggggtatattattctattctcgattattaagtgcaatgacagaacaatttagaaaccagatgcataaagtaagggaaggggcacaggtgcaggttattgaggatgatcatatcattatttgtggagtcaatagtcatctgatgtctatattgaaccaattgaataagtaccatgaatcatcaattcgcttaggtttagctacagcaagaaaatccttcttctctccgatcttccaaggaagcagattgataaacttgcagatagcttggccaaagatttaaaccatattgatgtattcaccaagagttgtagtcttagcatgtcaacgtcatttgagagagcagcagcacacaaagcaaaatctataattatcttgccagcacagcatgaacgatatgaagtggatacagatgcatttgtctctctattggctctacaaccctgtaaacaaattgcacctgttcctatcattgtcgaggcttccaatgcaaccacttgtgaacttctgaaatcaatcactggcttaaatgtgcaacctgtggagatggttgcttctaagttatttgtgcagtgctctaggcaaaaggaccttctgaaaatctacaagcacttgcttaatcagcacagtaatgttcttattttctgccatgatatttatgaaaaaacaatttctatattggtgcatttccgagcaaaactgtgttacccaggtctttcacgcttgaatttttttgccatcctttagttcatgatttctactgcaatcacctaaaaatgaccatactcatacataaaagttgaatgtacttagccgtgcattatatgacattgtcttgctcttgccagatttgttgccagttttattacatctatatgccaaacatgacctactttatcattcttcagaacttctgaatcagcattcactaatatagtacaaatgtaccatagaacatatttctacgtatgcaaattgttctgatattcccatgtttctgtacttttgtcattctacatttctgctttgctggcgttgttaaatttcatcagcagcactgtgattactttagtctttaggcaggcccgggcgggggcatgtgcgaccggtgcacaagaacagggccccctccctccaatggcccctaaaataatagtcaacgatagtttaatcaatacaaattttagtaatgattagatggtctagctaagtcagctcgacaagaataaaacatagtgtttgtcgtaacaaccgagtaccaatctctcatgcaactcattttggctatatggcgaagtgcagctagcacatactggcataacatccaagctagcacatactggcataacattcaaacgttaagatcactcgttaccgttattatgccatttcctacattaataattcaatcactgttaataaatgagattaatctatatcatctattcttaacaaagaaaaaaagaaaaaaaatcgatacagggccttgaattatgtcggcccggccgtgactttaggttctagatatagaggtagctatgctactttgtttgttacatgcgttgttttgtcctgcagaaaatgttttcaaccttttcaggcggcctgaattagagggcatgaagtatatggatgtgagacgtaaaatccatgattcgtttgtggtatcttccggtctggaaaaattcattttcacccaagcgaggaagaactactgaaagaaacagacaaattgcttcttattgctcctgttcgtgggatgaaaagaccacaatatagagcattaagtgtacggaaagaaacacaaacattgagtcgtaactcagagccaagagagggtcaaggatcatttaatatggctactaccatggataatgaaacacggctaaataacattgtaaagcgccccttgaaatctctttctaaggtaaagtttggtataaggatgcatctatggtaattcattgctttccaaattattgggttcatctgcggttaattttatgcagagcagtgattatatgcttggacccaaggaatgtgtacttattgttggttggcggccaaaagttaccgaaatgatacgggagtacgataattaccttggacctggtagtacagtggaaatcttgtcggaaacccctattaaagagaggagcagtatcatcaacccccttttgcagagccagcttaaaaatgttaaagttactcaccgggtggggtgtcctttgaactacgatactctgaaggaaacaataattaacgtacgagaatctgccaagtcagataaagaggttccactgtcaatagttgtgatatctgacagagactggtttgttggaggtaccagtaaattaacgaggatgtttatctgttatcatcatcggtgatggtattttttatcatcatatgataattattataagtgaagttttatttgtaactttggttccagcagatgctgcacaggctgataaacagttggcatacacccttcttcttgctgaaaacatttgccagaaacatggcgttatggttgagaatcttgtatcagaaatcgttgacatgggactaggaaaacaaatatctaaaataagaccatccctttcatttattggagcagaggaaataatgagtcgtgtgacagcacaagttgcggaaagtagtgagctgaatgaagtatggaaggatatcctgaacgctgaaggcgatgagatctatattaaggaaattgggctgtacatgaaggaaggagagaaaatatcattcttggagctctctgaaagagcagttttacgccgtgaagttgcgattggttacatcaaggacggcaagcagcatattaatcctatcaacaaatcggagccgctgtcccttgaaatgaatgattcgctcattgtgatatcggagtttgaaggtgaacaaccaattatgatgggcggagaaacttcaggatgaaattttcagctttatatctcttcacagaaactctaacaactcttgctaccatgaagagatgacatataacctgtttataatccttttctttttgtacaaagggaaagcaaaatatagtttaaaggccacaaatcaagttttgttcctcccatagccgtagaacttctttgatgcaaatattttactgcacagtttaaccgcagaatcttttctatttatctgtaaacatagtgaataacacaggcaacttgtatggtacagatgtctgaataaaggaaggatgaaggaaaattgattgactatgttccttgttgtttccttctgactaatgaatacaatgtttccatttttttagtcctgagctagacaaaatcagctag

SEQ ID NO: 213620 - DNA, 3122 bp, Zea Mays
cgccctcatcctgttttgcttgcccgcatccccgtcagtcattttggtgaaaaccgaaaagcgcctcccctcctgctctgctcctgcctctctcgtcactcgtcattgcggccgggcactgggccactggcatcgtaacaactgccgatacgcccgagacagcgcgggcggagccagcgagagggaaggccatgaggtcgcagctcaacgcgtccttctcgccgccgccctcgctccggcgagctctcccctctgccacgccccgcgccctcaggttccacgcgttcccgtggcggttccgcgctcctcagcaccacggccgcggcgctggagctcgctgcgctaccaatctgcccgcgcccggcagccatggagtcggagtgctcgcctccgagaggagggccgacgatggcgacactaccgtgaaaaatgcagatgcgcctagcacttcaacggcgacgcagggaaacctcaacatggctgccattgttagcatagcattctgctttctacacagaattgtttctggacggatgcagtcgatgatgaatttgttcccttggatgtcaaacggcattgcaagcttgccatttgcttgcatatctgatcctaccagaaaacccatgcctcttaagctagatttgactcttccaccactgcctgatttcggatggaatttttcgcgactgtactatcggttcaattctcagcttgatcggaacattgccttgtctatcattaccttgctcatcacttgcttttcatttgtcattgttggaggattactgtttcataagttcaggaagcaacaacaatccctggaggactgcttttgggaagcttgggcatgtctatgttcatcatctacccatctaaggcaaaagacacgtgttgagcgtgtcattgggttctttcttgctatctggggtatattattctattctcgattattaagtgcaatgacagaacaatttagaaaccagatgcataaagtaagggaaggggcacaggtgcaggttattgaggatgatcatatcattatttgtggagtcaatagtcatctgatgtctatattgaaccaattgaataagtaccatgaatcatcaattcgcttaggtttagctacagcaaggaagcagaaaatccttcttctctccgatcttccaaggaagcagattgataaacttgcagatagcttggccaaagatttaaaccatattgatgtattcaccaagagttgtagtcttagcatgtcaacgtcatttgagagagcagcagcacacaaagcaaaatctataattatcttgccagcacagcatgaacgatatgaagtggatacagatgcatttgtctctctattggctctacaaccctgtaaacaaattgcacctgttcctatcattgtcgaggcttccaatgcaaccacttgtgaacttctgaaatcaatcactggcttaaatgtgcaacctgtggagatggttgcttctaagttatttgtgcagtgctctaggcaaaaggaccttctgaaaatctacaagcacttgcttaatcagcacaaaaatgttttcaaccttttcaggcggcctgaattagagggcatgaagtatatggatgtgagacgtaaaatccatgatgcagtcgtttgtggtatcttccggtctggaaaaattcattttcacccaagcgaggaagaactactgaaagaaacagacaaattgcttcttattgctcctgttcgtgggatgaaaagaccacaatatagagcattaagtgtacggaaagaaacacaaacattgagtcgtaactcagagccaagagagggtcaaggatcatttaatatggctactaccatggataatgaaacacggctaaataacattgtaaagcgccccttgaaatctctttctaagtgattatatgcttggacccaaggaatgtgtacttattgttggttggcggccaaaagttaccgaaatgatacgggagtacgataattaccttggacctggtagtacagtggaaatcttgtcggaaacccctattaaagagaggagcagtatcatcaacccccttttgcagagccagcttaaaaatgttaaagttactcaccgggtggggtgtcctttgaactacgatactctgaaggaaacaataattaacgtacgagaatctgccaagtcagataaagaggttccactgtcaatagttgtgatatctgacagagactggtttgttggagcagatgctgcacaggctgataaacagttggcatacacccttcttcttgctgaaaacatttgccagaaacatggcgttatggttgagaatcttgtatcagaaatcgttgacatgggactaggaaaacaaatatctaaaataagaccatccctttcatttattggagcagaggaaataatgagtcgtgtgacagcacaagttgcggaaagtagtgagctgaatgaagtatggaaggatatcctgaacgctgaaggcgatgagatctatattaaggaaattgggctgtacatgaaggaaggagagaaaatatcattcttggagctctctgaaagagcagttttacgccgtgaagttgcgattggttacatcaaggacggcaagcagcatattaatcctatcaacaaatcggagccgctgtcccttgaaatgaatgattcgctcattgtgatatcggagtttgaaggtgaacaaccaattatgatgggcggagaaacttcaggatgaaattttcagctttatatctcttcacagaaactctaacaactcttgctaccatgaagagatgacatataacctgtttataatccttttctttttgtacaaagggaaagcaaaatatagtttaaaggccacaaatcaagttttgttcctcccatagccgtagaacttctttgatgcaaatattttactgcacagtttaaccgcagaatcttttctatttatctgtaaacatagtgaataacacaggcaacttgtatggtacagatgtctgaataaaggaaggatgaaggaaaattgattgactatgttccttgttgtttccttctgactaatgaatacaatgtttccatttttttagtcctgagctagacaaaatcagctag

SEQ ID NO: 213621 - DNA, 3101 bp, Zea Mays
cgccctcatcctgttttgcttgcccgcatccccgtcagtcattttggtgaaaaccgaaaagcgcctcccctcctgctctgctcctgcctctctcgtcactcgtcattgcggccgggcactgggccactggcatcgtaacaactgccgatacgcccgagacagcgcgggcggagccagcgagagggaaggccatgaggtcgcagctcaacgcgtccttctcgccgccgccctcgctccggcgagctctcccctctgccacgccccgcgccctcaggttccacgcgttcccgtggcggttccgcgctcctcagcaccacggccgcggcgctggagctcgctgcgctaccaatctgcccgcgcccggcagccatggagtcggagtgctcgcctccgagaggagggccgacgatggcgacactaccgtgaaaaatgcagatgcgcctagcacttcaacggcgacgcagggaaacctcaacatggctgccattgttagcatagcattctgctttctacacagaattgtttctggacggatgcagtcgatgatgaatttgttcccttggatgtcaaacggcattgcaagcttgccatttgcttgcatatctgatcctaccagaaaacccatgcctcttaagctagatttgactcttccaccactgcctgatttcggatggaatttttcgcgactgtactatcggttcaattctcagcttgatcggaacattgccttgtctatcattaccttgctcatcacttgcttttcatttgtcattgttggaggattactgtttcataagttcaggaagcaacaacaatccctggaggactgcttttgggaagcttgggcatgtctatgttcatcatctacccatctaaggcaaaagacacgtgttgagcgtgtcattgggttctttcttgctatctggggtatattattctattctcgattattaagtgcaatgacagaacaatttagaaaccagatgcataaagtaagggaaggggcacaggtgcaggttattgaggatgatcatatcattatttgtggagtcaatagtcatctgatgtctatattgaaccaattgaataagtaccatgaatcatcaattcgcttaggtttagctacagcaaggaagcagaaaatccttcttctctccgatcttccaaggaagcagattgataaacttgcagatagcttggccaaagatttaaaccatattgatgtattcaccaagagttgtagtcttagcatgtcaacgtcatttgagagagcagcagcacacaaagcaaaatctataattatcttgccagcacagcatgaacgatatgaagtggatacagatgcatttgtctctctattggctctacaaccctgtaaacaaattgcacctgttcctatcattgtcgaggcttccaatgcaaccacttgtgaacttctgaaatcaatcactggcttaaatgtgcaacctgtggagatggttgcttctaagttatttgtgcagtgctctaggcaaaaggaccttctgaaaatctacaagcacttgcttaatcagcacaaaaatgttttcaaccttttcaggcggcctgaattagagggcatgaagtatatggatgcagtcgtttgtggtatcttccggtctggaaaaattcattttcacccaagcgaggaagaactactgaaagaaacagacaaattgcttcttattgctcctgttcgtgggatgaaaagaccacaatatagagcattaagtgtacggaaagaaacacaaacattgagtcgtaactcagagccaagagagggtcaaggatcatttaatatggctactaccatggataatgaaacacggctaaataacattgtaaagcgccccttgaaatctctttctaagtgattatatgcttggacccaaggaatgtgtacttattgttggttggcggccaaaagttaccgaaatgatacgggagtacgataattaccttggacctggtagtacagtggaaatcttgtcggaaacccctattaaagagaggagcagtatcatcaacccccttttgcagagccagcttaaaaatgttaaagttactcaccgggtggggtgtcctttgaactacgatactctgaaggaaacaataattaacgtacgagaatctgccaagtcagataaagaggttccactgtcaatagttgtgatatctgacagagactggtttgttggagcagatgctgcacaggctgataaacagttggcatacacccttcttcttgctgaaaacatttgccagaaacatggcgttatggttgagaatcttgtatcagaaatcgttgacatgggactaggaaaacaaatatctaaaataagaccatccctttcatttattggagcagaggaaataatgagtcgtgtgacagcacaagttgcggaaagtagtgagctgaatgaagtatggaaggatatcctgaacgctgaaggcgatgagatctatattaaggaaattgggctgtacatgaaggaaggagagaaaatatcattcttggagctctctgaaagagcagttttacgccgtgaagttgcgattggttacatcaaggacggcaagcagcatattaatcctatcaacaaatcggagccgctgtcccttgaaatgaatgattcgctcattgtgatatcggagtttgaaggtgaacaaccaattatgatgggcggagaaacttcaggatgaaattttcagctttatatctcttcacagaaactctaacaactcttgctaccatgaagagatgacatataacctgtttataatccttttctttttgtacaaagggaaagcaaaatatagtttaaaggccacaaatcaagttttgttcctcccatagccgtagaacttctttgatgcaaatattttactgcacagtttaaccgcagaatcttttctatttatctgtaaacatagtgaataacacaggcaacttgtatggtacagatgtctgaataaaggaaggatgaaggaaaattgattgactatgttccttgttgtttccttctgactaatgaatacaatgtttccatttttttagtcctgagctagacaaaatcagctag

SEQ ID NO: 213622 - DNA, 3120 bp, Zea Mays
cgccctcatcctgttttgcttgcccgcatccccgtcagtcattttggtgaaaaccgaaaagcgcctcccctcctgctctgctcctgcctctctcgtcactcgtcattgcggccgggcactgggccactggcatcgtaacaactgccgatacgcccgagacagcgcgggcggagccagcgagagggaaggccatgaggtcgcagctcaacgcgtccttctcgccgccgccctcgctccggcgagctctcccctctgccacgccccgcgccctcaggttccacgcgttcccgtggcggttccgcgctcctcagcaccacggccgcggcgctggagctcgctgcgctaccaatctgcccgcgcccggcagccatggagtcggagtgctcgcctccgagaggagggccgacgatggcgacactaccgtgaaaaatgcagatgcgcctagcacttcaacggcgacgcagggaaacctcaacatggctgccattgttagcatagcattctgctttctacacagaattgtttctggacggatgcagtcgatgatgaatttgttcccttggatgtcaaacggcattgcaagcttgccatttgcttgcatatctgatcctaccagaaaacccatgcctcttaagctagatttgactcttccaccactgcctgatttcggatggaatttttcgcgactgtactatcggttcaattctcagcttgatcggaacattgccttgtctatcattaccttgctcatcacttgcttttcatttgtcattgttggaggattactgtttcataagttcaggaagcaacaacaatccctggaggactgcttttgggaagcttgggcatgtctatgttcatcatctacccatctaaggcaaaagacacgtgttgagcgtgtcattgggttctttcttgctatctggggtatattattctattctcgattattaagtgcaatgacagaacaatttagaaaccagatgcataaagtaagggaaggggcacaggtgcaggttattgaggatgatcatatcattatttgtggagtcaatagtcatctgatgtctatattgaaccaattgaataagtaccatgaatcatcaattcgcttaggtttagctacagcaaggaagcagaaaatccttcttctctccgatcttccaaggaagcagattgataaacttgcagatagcttggccaaagatttaaaccatattgatgtattcaccaagagttgtagtcttagcatgtcaacgtcatttgagagagcagcagcacacaaagcaaaatctataattatcttgccagcacagcatgaacgatatgaagtggatacagatgcatttgtctctctattggctctacaaccctgtaaacaaattgcacctgttcctatcattgtcgaggcttccaatgcaaccacttgtgaacttctgaaatcaatcactggcttaaatgtgcaacctgtggagatggttgcttctaagttatttgtgcagtgctctaggcaaaaggaccttctgaaaatctacaagcacttgcttaatcagcacaaaaatgttttcaaccttttcaggcggcctgaattagagggcatgaagtatatggatgtgagacgtaaaatccatgattcgtttgtggtatcttccggtctggaaaaattcattttcacccaagcgaggaagaactactgaaagaaacagacaaattgcttcttattgctcctgttcgtgggatgaaaagaccacaatatagagcattaagtgtacggaaagaaacacaaacattgagtcgtaactcagagccaagagagggtcaaggatcatttaatatggctactaccatggataatgaaacacggctaaataacattgtaaagcgccccttgaaatctctttctaagagcagtgattatatgcttggacccaaggaatgtgtacttattgttggttggcggccaaaagttaccgaaatgatacgggagtacgataattaccttggacctggtagtacagtggaaatcttgtcggaaacccctattaaagagaggagcagtatcatcaacccccttttgcagagccagcttaaaaatgttaaagttactcaccgggtggggtgtcctttgaactacgatactctgaaggaaacaataattaacgtacgagaatctgccaagtcagataaagaggttccactgtcaatagttgtgatatctgacagagactggtttgttggagatgctgcacaggctgataaacagttggcatacacccttcttcttgctgaaaacatttgccagaaacatggcgttatggttgagaatcttgtatcagaaatcgttgacatgggactaggaaaacaaatatctaaaataagaccatccctttcatttattggagcagaggaaataatgagtcgtgtgacagcacaagttgcggaaagtagtgagctgaatgaagtatggaaggatatcctgaacgctgaaggcgatgagatctatattaaggaaattgggctgtacatgaaggaaggagagaaaatatcattcttggagctctctgaaagagcagttttacgccgtgaagttgcgattggttacatcaaggacggcaagcagcatattaatcctatcaacaaatcggagccgctgtcccttgaaatgaatgattcgctcattgtgatatcggagtttgaaggtgaacaaccaattatgatgggcggagaaacttcaggatgaaattttcagctttatatctcttcacagaaactctaacaactcttgctaccatgaagagatgacatataacctgtttataatccttttctttttgtacaaagggaaagcaaaatatagtttaaaggccacaaatcaagttttgttcctcccatagccgtagaacttctttgatgcaaatattttactgcacagtttaaccgcagaatcttttctatttatctgtaaacatagtgaataacacaggcaacttgtatggtacagatgtctgaataaaggaaggatgaaggaaaattgattgactatgttccttgttgtttccttctgactaatgaatacaatgtttccatttttttagtcctgagctagacaaaatcagctag

SEQ ID NO: 213623 - DNA, 1435 bp, Zea Mays
gttgaatcatccatcagagtgagttgcttcttattgctcctgttcgtgggatgaaaagaccacaatatagagcattaagtgtacggaaagaaacacaaacattgagtcgtaactcagagccaagagagggtcaaggatcatttaatatggctactaccatggataatgaaacacggctaaataacattgtaaagcgccccttgaaatctctttctaagagcagtgattatatgcttggacccaaggaatgtgtacttattgttggttggcggccaaaagttaccgaaatgatacgggagtacgataattaccttggacctggtagtacagtggaaatcttgtcggaaacccctattaaagagaggagcagtatcatcaacccccttttgcagagccagcttaaaaatgttaaagttactcaccgggtggggtgtcctttgaactacgatactctgaaggaaacaataattaacgtacgagaatctgccaagtcagataaagaggttccactgtcaatagttgtgatatctgacagagactggtttgttggagcagatgctgcacaggctgataaacagttggcatacacccttcttcttgctgaaaacatttgccagaaacatggcgttatggttgagaatcttgtatcagaaatcgttgacatgggactaggaaaacaaatatctaaaataagaccatccctttcatttattggagcagaggaaataatgagtcgtgtgacagcacaagttgcggaaagtagtgagctgaatgaagtatggaaggatatcctgaacgctgaaggcgatgagatctatattaaggaaattgggctgtacatgaaggaaggagagaaaatatcattcttggagctctctgaaagagcagttttacgccgtgaagttgcgattggttacatcaaggacggcaagcagcatattaatcctatcaacaaatcggagccgctgtcccttgaaatgaatgattcgctcattgtgatatcggagtttgaaggtgaacaaccaattatgatgggcggagaaacttcaggatgaaattttcagctttatatctcttcacagaaactctaacaactcttgctaccatgaagagatgacatataacctgtttataatccttttctttttgtacaaagggaaagcaaaatatagtttaaaggccacaaatcaagttttgttcctcccatagccgtagaacttctttgatgcaaatattttactgcacagtttaaccgcagaatcttttctatttatctgtaaacatagtgaataacacaggcaacttgtatggtacagatgtctgaataaaggaaggatgaaggaaaattgattgactatgttccttgttgtttccttctgactaatgaatacaatgtttccatttttttagtcctgagctagacaaaatcagctag

SEQ ID NO: 213624 - DNA, 3352 bp, Zea Mays
ccaggggcgaatcgcggacgccgcccacctcccccatctccttccccagcacgtcgcaaacccttcgtcgccacccccgcctcccgccgcggctcccgtcgtcgcgtggccgtcgcgagccaccgctggcgtctctcgtccggttctctgagtctcggcgacctgttcctccgccgagttctcggggccctgctgtcgccaccgccgaatcctgctgtcctcgccgcagccggggaacgcggtgtgttgcgggagctggcaccgcctccttcgagagttttggtaagaaggatatgcatcatcctcaggaagagatacattcttctcccaatacaatgtcattaccaagtccatgcagactcaatggagacgtcacaccttgtgaagcggagaaaatagcagaggatcgtggcaaagtagatgggattgtagatgctgtaagtaaggaagtcaaaactgacttggtaggatgccatgcacggcaggaagaattgcaatgcacgctccaagatctatcagaaatagcctgcagtattgatttagtacgtaataaatcttctccacaagaagagaagaagtctgtttcccctttgaatgacatgggccataatgtggataacaatagttgtaatggtgataccaattataaagggcaggagctcaatatggggaatgttggagatgaggatcatgctgtagcactttgggtgaagtggagaggaaaatggcaaactggaatccgatgctgtagagcagattgtcctttacctactctaagggcaaaaccaacacatgacaggaagacctatatagttgttttcttcccacgaacaaaaacttactcttgggtagacatgctacttgttcttccaatagaggaatgtcctttgccacttgtgaatggaactcatcgtaaatggagaaagctggtaaaggatttgaacattcctcgacgattcaacatacagaatcttgccattttaatgataaatttaattgatgagcttcatattgaggctgtagttgataatgcacggaaggctacaacatggaaagaatttgccctggaagcatcttgctgtagagattacactgatcttgggaagatgctcctcaaatttcaaaatatgattcttcctgactgcataagctgtgaatgggtacaaaattctattgagacgtggaatcaaaagtgtatgaacgcacatgatgccgagactattgaaatgctttgtgagttcaggcttcttgatgtccctcagcgaccaagtggtcaatctgctcaacaaacagaagggatgagtggtctgcccctttatgatagccacaacgttgaggatgaaaatggctcacagaagtttgtctgcagattatgtgggctcaaatttgatcttctgccagatcttggccgccaccataaagtcgctcatatggtctcaggtgctgttggccacattccactgggccgtgggaagtaccagcttaaccgcggccgacactactattccgctttcaagaaaagtttgcgaccaacaagtacattaaagaagagcagtagctctggaatcgataaaaatttgaagtttcagatctctggcttaacatctcaaatagttgaatctgaaacatccagccttggtaagttacaggatttccaatgcttagatgttgcacaaactttattttccaagattcaaaagacaagaccccatccaagcaactttgatgttttatcggttgcccgctctgtatgctgtaagacaagtcttcttgctgcgttggaagttaaatacggacctttacctgagaacatatttgtgaaagctgcaaagctttgcagtgacaatggcatccaaattgattggcatcaagagggattcatatgccctaaagggtgcaagtctagatataattcaaatgctctgcttcctatgcaactcacggcagttgattttcttgaagctcctgttgattcccgtaatgatgatgaaatgtggggaatggaagaataccattatgttcttgattcaaagcacttcggatggaagcctaaaaatgagagtgttgttctctgtgaagacataagctttggcagggagaaagttccaattgtctgtgtcattgatgtggatgcaaaagattctttaggtatgaagcctgaagaacttttgccacatggcagttctttgccttgggaaggatttcactatatcacaaaccgtgtgatggattcatctcttattgattcagagaactctatgcctgggtgtgcatgttctcatcctgaatgttctcctgagaactgtggtcacgtgagtctctttgatggtgtctacaatagcctggtggatatcaatggaacaccaatgcatggcagatttgcatatgatgaagatagtaaaattattttacaggaagggtatccaatatatgagtgcaattcatcatgtatttgtgactcgtcctgccagaataaagtattgcagaaagggctgcttgttaagttggaactctttagaagtgagaataagggttgggctattagggctgctgaacctattctacagggtacctttgtctgcgagtatattggtgaagttgtgaaggctgacaaggctatgaaaaatgcagaaagtgtgtcatcaaagggtgggtgcagttacttgtttagcattgcttcccagattgatagggaaagagttcggactgtaggggctattgaatactttattgatgccacaaggtctggaaatgtttcccgttatattagtcacagttgttccccgaatctcagtacccggttggttttggtagagagcaaagattgccagcttgctcacattggattgtttgctaatcaagatattgccgtaggagaagaactcgcctatgattaccgacaaaagcttgtagcaggcgatggctgcccatgccattgtggaactaccaattgccgaggccgtgtctattgattttgcaggaatacactaactgttcaatgctcggttgcagaactccagagatttcaacagttgtgtaggcttgctgagcgatttagcattgcaattttcctacagcttgagtgcagggctaggatctcattgttaatgctacaaatagtgattgtgatataggactcaggcaagcattaggcaataacatagtgtcgattttagtcatggtaccatcatgtttaactgattatttgttagaagcagcctgaaatgaaactgattcaggctgctctgttcgtaggcgagaattctctctgtaaaattccttcattcatattttatggttcatgagcaccatcattgacgtgaagtaataaactagttatcccagtggccta

SEQ ID NO: 213625 - DNA, 5083 bp, Zea Mays
ccaggggcgaatcgcggacgccgcccacctcccccatctccttccccagcacgtcgcaaacccttcgtcgccacccccgcctcccgccgcggctcccgtcgtcgcgtggccgtcgcgagccaccgctggcgtctctcgtccggttctctgagtctcggcgacctgttcctccgccgagttctcggggccctgctgtcgccaccgccgaatcctgctgtcctcgccgcagccggggaacgcggtgtgttgcgggagctggcaccgcctccttcgagagttttggtaagaaggatatgcatcatcctcaggaagagatacattcttctcccaatacaatgtcattaccaagtccatgcagactcaatggagacgtcacaccttgtgaagcggagaaaatagcagaggatcgtggcaaagtagatgggattgtagatgctgtaagtaaggaagtcaaaactgacttggtaggatgccatgcacggcaggaagaattgcaatgcacgctccaagatctatcagaaatagcctgcagtattgatttagtacgtaataaatcttctccacaagaagagaagaagtctgtttcccctttgaatgacatgggccataatgtggataacaatagttgtaatggtgataccaattataaagggcaggagctcaatatggggaatgttggagatgaggatcatgctgtagcactttgggtgaagtggagaggaaaatggcaaactggaatccgatgctgtagagcagattgtcctttacctactctaagggcaaaaccaacacatgacaggaagacctatatagttgttttcttcccacgaacaaaaacttactcttgggtagacatgctacttgttcttccaatagaggaatgtcctttgccacttgtgaatggaactcatcgtaaatggagaaagctggtaaaggatttgaacattcctcgacgattcaacatacagaatcttgccattttaatgataaatttaattgatgagcttcatattgaggctgtagttgataatgcacggaaggctacaacatggaaagaatttgccctggaagcatcttgctgtagagattacactgatcttgggaagatgctcctcaaatttcaaaatatgattcttcctgactgcataagctgtgaatgggtacaaaattctattgagacgtggaatcaaaagtgtatgaacgcacatgatgccgagactattgaaatgctttgtgaggaacttcgacagtccattcttgggaacaagcttaaggaattgcgggatgcatcagtgcagcctgaattagtccctgagtggaagacgtggaaacaagaattgctgaaacagtacttttcattacatcctgctggtaatgttggcaacttcgagaaaactaattgttacgacgatccagctttagatcaacaaggtagtagaaagcgtccaaaacttgaggttcgaagaggagagatccaaattttacacatgggtgaagctgactacaggactccaactgaggacccaaaccaaaataagcttcctagtaactctgtcatgcatgaaaatataggggcattaggagcaacaagtcaaaaaaatgctgtcatgttccctggaagttctggcaccaatgagaatacaatatctggtagttccaatgcagctttacagaatgctagacttgatttagattcattcaagagctctcggcagtgttctgcgtacattgaagcaaaggggaggcagtgtggtaggtgggcaaatgatggtgatatttactgttgtgtgcatcaaagtatgcattttcttgatcattcttcaagggaggataagacacttaccattgaagctccattgtgtagtggtatgactaacatgggtagaaaatgcaagcatcgagctcagcatggttctactttttgtaaaaagcaccgcctacagacaaacttggatgtaatgcacccaggaaatttgttggatccatctgaggtactccatatgggcgaagaacctccgaataagtgggtggaaggaatttctaagtcgcaagcattgtatagcatagacttagaaacagacaaaaatgtccaggctgttgtacaagtgaaactgatgcccactgtggctatagagaactctggtgaaaaaggttgtgcaatggagaaaactgatatgtgtgctgcgtcaacgtccatgacaaatactgatgatacttctctttgtattggaattcgctctcatgacagtattgttgaatgccaggattatgccaaacgacatactctttattgtgagaagcaccttccaaagttccttaaacgtgccaggaatggaaagagtcgactcgtttctaaagatgtctttgtcaatctgttgaagggctgctcatcaagaaaagataagatatgtttacaccaggcttgcgaatttctttattggttcttgagaaacaacctttctcatcaacgcaccggtcttgctagtgaacatatgccccagatactggctgaagtgtcgaaaaatccagattttggagaatttttgttaaagttgatatctactgagagagagaaactagcaaatatctggggatttggtacagatagatctaagcaaatatattctgaaaacaaagaaggatctgtagcgttgcaggaagagaaaactaatctttcatctggtcctaagtgcaaaatctgtggtcaccagttctctgatgatcaagctcttggattacattggacaactgtccacaaaaaggaagcccggtggctgtttagaggttactcttgtgctgcatgcatggaatcatttaccaacaaaaaagtccttgaaagacatgtacaggatgtacatggggctcaatacctccagtattcaattctcattcgatgtatgtcatgtaacagcaattttttgaacactgatctgctataccctcacattgtttccgaccatgcccaacagttcaggcttcttgatgtccctcagcgaccaagtggtcaatctgctcaacaaacagaagggatgagtggtctgcccctttatgatagccacaacgttgaggatgaaaatggctcacagaagtttgtctgcagattatgtgggctcaaatttgatcttctgccagatcttggccgccaccataaagtcgctcatatggtctcaggtgctgttggccacattccactgggccgtgggaagtaccagcttaaccgcggccgacactactattccgctttcaagaaaagtttgcgaccaacaagtacattaaagaagagcagtagctctggaatcgataaaaatttgaagtttcagatctctggcttaacatctcaaatagttgaatctgaaacatccagccttggtaagttacaggatttccaatgcttagatgttgcacaaactttattttccaagattcaaaagacaagaccccatccaagcaactttgatgttttatcggttgcccgctctgtatgctgtaagacaagtcttcttgctgcgttggaagttaaatacggacctttacctgagaacatatttgtgaaagctgcaaagctttgcagtgacaatggcatccaaattgattggcatcaagagggattcatatgccctaaagggtgcaagtctagatataattcaaatgctctgcttcctatgcaactcacggcagttgattttcttgaagctcctgttgattcccgtaatgatgatgaaatgtggggaatggaagaataccattatgttcttgattcaaagcacttcggatggaagcctaaaaatgagagtgttgttctctgtgaagacataagctttggcagggagaaagttccaattgtctgtgtcattgatgtggatgcaaaagattctttaggtatgaagcctgaagaacttttgccacatggcagttctttgccttgggaaggatttcactatatcacaaaccgtgtgatggattcatctcttattgattcagagaactctatgcctgggtgtgcatgttctcatcctgaatgttctcctgagaactgtggtcacgtgagtctctttgatggtgtctacaatagcctggtggatatcaatggaacaccaatgcatggcagatttgcatatgatgaagatagtaaaattattttacaggaagggtatccaatatatgagtgcaattcatcatgtatttgtgactcgtcctgccagaataaagtattgcagaaagggctgcttgttaagttggaactctttagaagtgagaataagggttgggctattagggctgctgaacctattctacagggtacctttgtctgcgagtatattggtgaagttgtgaaggctgacaaggctatgaaaaatgcagaaagtgtgtcatcaaagggtgggtgcagttacttgtttagcattgcttcccagattgatagggaaagagttcggactgtaggggctattgaatactttattgatgccacaaggtctggaaatgtttcccgttatattagtcacagttgttccccgaatctcagtacccggttggttttggtagagagcaaagattgccagcttgctcacattggattgtttgctaatcaagatattgccgtaggagaagaactcgcctatgattaccgacaaaagcttgtagcaggcgatggctgcccatgccattgtggaactaccaattgccgaggccgtgtctattgattttgcaggaatacactaactgttcaatgctcggttgcagaactccagagatttcaacagttgtgtaggcttgctgagcgatttagcattgcaattttcctacagcttgagtgcagggctaggatctcattgttaatgctacaaatagtgattgtgatataggactcaggcaagcattaggcaataacatagtgtcgattttagtcatggtaccatcatgtttaactgattatttgttagaagcagcctgaaatgaaactgattcaggctgctctgttcgtaggcgagaattctctctgtaaaattccttcattcatattttatggttcatgagcaccatcattgacgtgaagtaataaactagttatcccagtggccta

SEQ ID NO: 213626 - DNA, 5292 bp, Zea Mays
aactaagtcaacagtctttatgggcttcatgctagtagatgatagttcctggcttcctgcactgcttttggaagacctgccttttcaatcatagaggattggtagaccagatcctggcaaagcaatgctgatggaccctcctgttatgcaaatggactgcaagttgaaaaatgctatggataaaacaccacaaatcgcctatgataggaagctgaccgtctcacatgatgattatgggtgggcaggctctgatgtccacctaaaagatgatacaatagtatgtagccctgtcgatcttagcgatgcttgtcaatcaggcatggatcgggtattagattctgcttccaaaaattcatctcttaatttgggcgatttatctcaggggacagaactaagagagaagaatagcgacagttcttactccgatgtaaaacttcagttaaatttaagtgctggaaattataatggcttgcaaactgatgattatagctttaataaacagagttttggtaagaaggatatgcatcatcctcaggaagagatacattcttctcccaatacaatgtcattaccaagtccatgcagactcaatggagacgtcacaccttgtgaagcggagaaaatagcagaggatcgtggcaaagtagatgggattgtagatgctgtaagtaaggaagtcaaaactgacttggtaggatgccatgcacggcaggaagaattgcaatgcacgctccaagatctatcagaaatagcctgcagtattgatttagtacgtaataaatcttctccacaagaagagaagaagtctgtttcccctttgaatgacatgggccataatgtggataacaatagttgtaatggtgataccaattataaagggcaggagctcaatatggggaatgttggagatgaggatcatgctgtagcactttgggtgaagtggagaggaaaatggcaaactggaatccgatgctgtagagcagattgtcctttacctactctaagggcaaaaccaacacatgacaggaagacctatatagttgttttcttcccacgaacaaaaacttactcttgggtagacatgctacttgttcttccaatagaggaatgtcctttgccacttgtgaatggaactcatcgtaaatggagaaagctggtaaaggatttgaacattcctcgacgattcaacatacagaatcttgccattttaatgataaatttaattgatgagcttcatattgaggctgtagttgataatgcacggaaggctacaacatggaaagaatttgccctggaagcatcttgctgtagagattacactgatcttgggaagatgctcctcaaatttcaaaatatgattcttcctgactgcataagctgtgaatgggtacaaaattctattgagacgtggaatcaaaagtgtatgaacgcacatgatgccgagactattgaaatgctttgtgaggaacttcgacagtccattcttgggaacaagcttaaggaattgcgggatgcatcagtgcagcctgaattagtccctgagtggaagacgtggaaacaagaattgctgaaacagtacttttcattacatcctgctggtaatgttggcaacttcgagaaaactaattgttacgacgatccagctttagatcaacaaggtagtagaaagcgtccaaaacttgaggttcgaagaggagagatccaaattttacacatgggtgaagctgactacaggactccaactgaggacccaaaccaaaataagcttcctagtaactctgtcatgcatgaaaatataggggcattaggagcaacaagtcaaaaaaatgctgtcatgttccctggaagttctggcaccaatgagaatacaatatctggtagttccaatgcagctttacagaatgctagacttgatttagattcattcaagagctctcggcagtgttctgcgtacattgaagcaaaggggaggcagtgtggtaggtgggcaaatgatggtgatatttactgttgtgtgcatcaaagtatgcattttcttgatcattcttcaagggaggataagacacttaccattgaagctccattgtgtagtggtatgactaacatgggtagaaaatgcaagcatcgagctcagcatggttctactttttgtaaaaagcaccgcctacagacaaacttggatgtaatgcacccaggaaatttgttggatccatctgaggtactccatatgggcgaagaacctccgaataagtgggtggaaggaatttctaagtcgcaagcattgtatagcatagacttagaaacagacaaaaatgtccaggctgttgtacaagtgaaactgatgcccactgtggctatagagaactctggtgaaaaaggttgtgcaatggagaaaactgatatgtgtgctgcgtcaacgtccatgacaaatactgatgatacttctctttgtattggaattcgctctcatgacagtattgttgaatgccaggattatgccaaacgacatactctttattgtgagaagcaccttccaaagttccttaaacgtgccaggaatggaaagagtcgactcgtttctaaagatgtctttgtcaatctgttgaagggctgctcatcaagaaaagataagatatgtttacaccaggcttgcgaatttctttattggttcttgagaaacaacctttctcatcaacgcaccggtcttgctagtgaacatatgccccagatactggctgaagtgtcgaaaaatccagattttggagaatttttgttaaagttgatatctactgagagagagaaactagcaaatatctggggatttggtacagatagatctaagcaaatatattctgaaaacaaagaaggatctgtagcgttgcaggaagagaaaactaatctttcatctggtcctaagtgcaaaatctgtggtcaccagttctctgatgatcaagctcttggattacattggacaactgtccacaaaaaggaagcccggtggctgtttagaggttactcttgtgctgcatgcatggaatcatttaccaacaaaaaagtccttgaaagacatgtacaggatgtacatggggctcaatacctccagtattcaattctcattcgatgtatgtcatgtaacagcaattttttgaacactgatctgctataccctcacattgtttccgaccatgcccaacagttcaggcttcttgatgtccctcagcgaccaagtggtcaatctgctcaacaaacagaagggatgagtggtctgcccctttatgatagccacaacgttgaggatgaaaatggctcacagaagtttgtctgcagattatgtgggctcaaatttgatcttctgccagatcttggccgccaccataaagtcgctcatatggtctcaggtgctgttggccacattccactgggccgtgggaagtaccagcttaaccgcggccgacactactattccgctttcaagaaaagtttgcgaccaacaagtacattaaagaagagcagtagctctggaatcgataaaaatttgaagtttcagatctctggcttaacatctcaaatagttgaatctgaaacatccagccttggtaagttacaggatttccaatgcttagatgttgcacaaactttattttccaagattcaaaagacaagaccccatccaagcaactttgatgttttatcggttgcccgctctgtatgctgtaagacaagtcttcttgctgcgttggaagttaaatacggacctttacctgagaacatatttgtgaaagctgcaaagctttgcagtgacaatggcatccaaattgattggcatcaagagggattcatatgccctaaagggtgcaagtctagatataattcaaatgctctgcttcctatgcaactcacggcagttgattttcttgaagctcctgttgattcccgtaatgatgatgaaatgtggggaatggaagaataccattatgttcttgattcaaagcacttcggatggaagcctaaaaatgagagtgttgttctctgtgaagacataagctttggcagggagaaagttccaattgtctgtgtcattgatgtggatgcaaaagattctttaggtatgaagcctgaagaacttttgccacatggcagttctttgccttgggaaggatttcactatatcacaaaccgtgtgatggattcatctcttattgattcagagaactctatgcctgggtgtgcatgttctcatcctgaatgttctcctgagaactgtggtcacgtgagtctctttgatggtgtctacaatagcctggtggatatcaatggaacaccaatgcatggcagatttgcatatgatgaagatagtaaaattattttacaggaagggtatccaatatatgagtgcaattcatcatgtatttgtgactcgtcctgccagaataaagtattgcagaaagggctgcttgttaagttggaactctttagaagtgagaataagggttgggctattagggctgctgaacctattctacagggtacctttgtctgcgagtatattggtgaagttgtgaaggctgacaaggctatgaaaaatgcagaaagtgtgtcatcaaagggtgggtgcagttacttgtttagcattgcttcccagattgatagggaaagagttcggactgtaggggctattgaatactttattgatgccacaaggtctggaaatgtttcccgttatattagtcacagtacccggttggttttggtagagagcaaagattgccagcttgctcacattggattgtttgctaatcaagatattgccgtaggagaagaactcgcctatgattaccgacaaaagcttgtagcaggcgatggctgcccatgccattgtggaactaccaattgccgaggccgtgtctattgattttgcaggaatacactaactgttcaatgctcggttgcagaactccagagatttcaacagttgtgtaggcttgctgagcgatttagcattgcaattttcctacagcttgagtgcagggctaggatctcattgttaatgctacaaatagtgattgtgatataggactcaggcaagcattaggcaataacatagtgtcgattttagtcatggtaccatcatgtttaactgattatttgttagaagcagcctgaaatgaaactgattcaggctgctctgttcgtaggcgagaattctctctgtaaaattccttcattcatattttatggttcatgagcaccatcattgacgtgaagtaataaactagttatcccagtggccta

SEQ ID NO: 213627 - DNA, 2784 bp, Zea Mays
cgcaacttgctcacaggacacagccgataagcagcggccaaaacagaaagcgcgatttgtttgatcgcttcctcctccactaccactagctagcctgccgccgtccgccgtgcagtgtgcgagctccgcccgccggtgccggaggcagaggaggaagatgcaggtgctgccgaggaagaggaggcgctccgggtcctggcttctagacgttgtgaaccagatcttggtgcggttgcccgagtagtttactcgtctagaggaggggtttggttctcgacccgattcggtgggggcttcgccactgggatagggggacagtttggcctgctggatctttatcgccagttgttggttctgtcctttccattgggctggtactttcttgacggattggttaagcgctgtctgtggggttgttgtgctgctcctcccttcatctcgttttgtggtgattggtggggggaggaggaagagctaggaggattctctctcttgttcttgggtcagttcttggcacggcaggatgaagtatatgaagcttggatcaaagccggatgtccttcagacggaggggagcaatatcaggtttgtcgcgacagatttggcaacagacgttgttatattgattggggatgtcaagttttaccttcacaagttccctcttctatcaaagagttcacgcctgcaaagattagttgcttcaatcaatgaggagaaaaatgacgaagtggatatctctgacatccctggtgggccttcagcatttgaaatatgtgctaagttctgctatggcatgattgtgacactcaatgcgtataatgtcctcgccgcccggtgcgcagccgagtacctagagatgttcgagaccattgacaaaggaaacctcatatacaagatcgatgtgtttctgacatcaagtgtgttccgcacctggaaggactcgatcatagttctacagagcacaaggtcactggtaccttggtgtgaggatttgaaagtgatcagccactgcatcgactctatcgcgtcgaaggcgtcgattgatccatcagaggttgagtggtcatacacttacaacagaaagaaactcccgtctgagaacggtatcgattcgcattggaatggtgtcaggatgcaacctatggtccctactgactggtgggtagaggacctctgtgagcttgaagtggactcgtacaagcgggtgatcatgagcatcaaggcaaagggaagcacgccagctgttgtcgtcggagaagcattgagggcctacgcgtaccgacggctgcttggctccctggaagacgctgtgagcaatggagttgattgcgcaaagcctcgtgcagttcttgacgctattgtatctctcttgcccgctgaggaaggctcggtgtcatgtggttttcttcttaagctgctgggagctgcatgtttgctggaatctgcatagatctggtcatggcaatagtggaggaatttcatgtcgttacagaatagcgacagtggcaaggagaaatttcaagatgatgaagagatcgtggagactgagaaacgtggcatcggtttccagcacgtcaaagctgggcagttgcaaagctgatcgatggatatcttgctgaggttgccaaaggatcccaaccttcctcttccgaagctgaccgcgcttgctgaaatgggtgtcttccctaccccggccaacgcatgacggcctctaccgtgccattgacatgtatctgaaggagcaccccagcctgtcgaagagcgagaagaagaaactatgcgggctgatggactgcaagcagctgtcgcacgatgcgtgcatgcacgccgtgcagaacgagcgtctccccttgcgtgtggtcgtgcaggttctcttcttcgagcaggtccgggcgtctgtcgcctctgcgaggagtgacccttcttcagctgagcttccatctgccgttcgctcgcttcttcccagagagaacggtaactctgttggcagctccaggtcagctgccacgacgacaacggaggaggacggatgtggggtcccgacgtcgagtgacgtcaactcgttgaggtcaacaaggctcgccaacaacagcggcggaagcgagaggagcagtggcagcagcgacatcaacaggagcgccgcggggaggggggcaagggggattctgatgccgaagaagatgctgagcaagctctggtctgggaaaacgaacgccggtgagaacagcagctcagacacgtcgcagagccctgggtccgtcaacaacccggaggaggtgaagtccacgcagtcaaggatcacaaggcgctcggtatcctagtcgcggaggggtaaccgcggtcacagcctagttttgttcttgctcttgatttttgccttcactggagagtagtggcaatctaaaaaatgtggagttactggagtaggtttggtcattgatgatgttttcagccatgttccatgggaactttttacatacaaagaaagtataggttgttataattgatgtatttttgctggcaaaatcatagtgttttagtttgctttttacggccaccggccaagcccggcacgattaatttcaagggctgaagacagagtgaagtaaatgctttatgatgtgattggatttgttagagcaactataaagagactctctctagcctttctaattgttaagaataaaaatattggtaaaagaatatactttagtaactttttaaatggttatctaaatatagtcatctttagttctgaatttgtcgctagtcaaaaataaaaaa

SEQ ID NO: 213628 - DNA, 3048 bp, Zea Mays
tgccgctgttgttttctgtccccgacttggaattcatttctgcgtcgaggaagctttttctcaaatctgcatcgcgtattttccgcaatgtccttttttcgcagaacaaaaaagccgttttttcctttcctgttagttattggagtcagttaggaatgtttttctgatgatgttggtttggtcctttcctcgtcctgaaaagctgcctcttcttctgccctttgtccagttccctctctgaaaaaatcgcagatttctgttagtatcatcaccagttcgccatcatctccgctctgtgggggcagaagctccgcttcgttccaagaaaggcccccgcgtcttcctccgcaaaacctcccgggtcatctcatatccttggcgctggccgagaggctcctctcgttgcctgccggcgcactggcgcagatgcaggtgctgccgaggaagaggaggcgctccgggtcctggcttctagacgttgtgaaccagatcttggtgcggttgcccgagtagtttactcgtctagaggaggggtttggttctcgacccgattcggtgggggcttcgccactgggatagggggacagtttggcctgctggatctttatcgccagttgttggttctgtcctttccattgggctggtactttcttgacggattggttaagcgctgtctgtggggttgttgtgctgctcctcccttcatctcgttttgtggtgattggtggggggaggaggaagagctaggaggattctctctcttgttcttgggtcagttcttggcacggcaggatgaagtatatgaagcttggatcaaagccggatgtccttcagacggaggggagcaatatcaggtttgtcgcgacagatttggcaacagacgttgttatattgattggggatgtcaagttttaccttcacaagttccctcttctatcaaagagttcacgcctgcaaagattagttgcttcaatcaatgaggagaaaaatgacgaagtggatatctctgacatccctggtgggccttcagcatttgaaatatgtgctaagttctgctatggcatgattgtgacactcaatgcgtataatgtcctcgccgcccggtgcgcagccgagtacctagagatgttcgagaccattgacaaaggaaacctcatatacaagatcgatgtgtttctgacatcaagtgtgttccgcacctggaaggactcgatcatagttctacagagcacaaggtcactggtaccttggtgtgaggatttgaaagtgatcagccactgcatcgactctatcgcgtcgaaggcgtcgattgatccatcagaggttgagtggtcatacacttacaacagaaagaaactcccgtctgagaacggtatcgattcgcattggaatggtgtcaggatgcaacctatggtccctactgactggtgggtagaggacctctgtgagcttgaagtggactcgtacaagcgggtgatcatgagcatcaaggcaaagggaagcacgccagctgttgtcgtcggagaagcattgagggcctacgcgtaccgacggctgcttggctccctggaagacgctgtgagcaatggagttgattgcgcaaagcctcgtgcagttcttgacgctattgtatctctcttgcccgctgaggaaggctcggtgtcatgtggttttcttcttaagctgctgggagctgcatgtttgctggaatctgatctggtcatggcaatagtggaggaatttcatgtcgttacagaatagcgacagtggcaaggagaaatttcaagatgatgaagagatcgtggagactgagaaacgtggcatcggtttccagcacgtcaaagctgggcagttgcaaagctgatcgatggatatcttgctgaggttgccaaaggatcccaaccttcctcttccgaagctgaccgcgcttgctgaaatgggtgtcttccctaccccggccaacgcatgacggcctctaccgtgccattgacatgtatctgaaggagcaccccagcctgtcgaagagcgagaagaagaaactatgcgggctgatggactgcaagcagctgtcgcacgatgcgtgcatgcacgccgtgcagaacgagcgtctccccttgcgtgtggtcgtgcaggttctcttcttcgagcaggtccgggcgtctgtcgcctctgcgaggagtgacccttcttcagctgagcttccatctgccgttcgctcgcttcttcccagagagaacggtaactctgttggcagctccaggtcagctgccacgacgacaacggaggaggacggatgtggggtcccgacgtcgagtgacgtcaactcgttgaggtcaacaaggctcgccaacaacagcggcggaagcgagaggagcagtggcagcagcgacatcaacaggagcgccgcggggaggggggcaagggggattctgatgccgaagaagatgctgagcaagctctggtctgggaaaacgaacgccggtgagaacagcagctcagacacgtcgcagagccctgggtccgtcaacaacccggaggaggtgaagtccacgcagtcaaggatcacaaggcgctcggtatcctagtcgcggaggggtaaccgcggtcacagcctagttttgttcttgctcttgatttttgccttcactggagagtagtggcaatctaaaaaatgtggagttactggagtaggtttggtcattgatgatgttttcagccatgttccatgggaactttttacatacaaagaaagtataggttgttataattgatgtatttttgctggcaaaatcatagtgttttagtttgctttttacggccaccggccaagcccggcacgattaatttcaagggctgaagacagagtgaagtaaatgctttatgatgtgattggatttgttagagcaactataaagagactctctctagcctttctaattgttaagaataaaaatattggtaaaagaatatactttagtaactttttaaatggttatctaaatatagtcatctttagttctgaatttgtcgctagtcaaaaataaaaaa

SEQ ID NO: 213629 - DNA, 910 bp, Zea Mays
gctcccgtggattcactcaaatttccataccaaaccagcccgtaggctctagggcgcagtcaggtggagggatttttccccttttgcggcttcctgaactccatcttgccactgccacgagcccacgacgcccgcagccgcagcgaaccagagaggagagcgggagatgaagggcgtcgggggcggcgcggcctccccgggggactatgtctacttcaaatctgtcgtcccgctccacaagatctccattgggtcaaaactgtggaggtactatgactttggacccaaggttgtgccacctcttgtttgtatcccaggaattgcaggaacggctgatgtatactataaacagattatgtccctttgtatgaagggttatcgagtaatatctattgacgttcctcaagtttggaatcaccatgaatggattcattcatttgaaaaatttttggactccatgaatatccatcatgttcacatttatggtacatctcttggtggattcctggcacaaatatttgctgaacaccgtccaaggagagtaaagtcattggtcctatcaaatacttttcttgagacgcacaagtttgctgctgccatgccttggtctccagtgaatccgagatggtccccatgaaccattcatcgcagactcagtagattttgttgtgggtcaggtggagacattgtcaagagatgatctttcatcaaggttgatgttaaatgttaatgttgcatccgttgggtcgttaatgttgcctgattcactcatcactataatggatgtaagttacctactctagcagtccccaggctgcacccctcaatgctggcgcacagggccaccttctctgctcctctgcgtcgccgcacccccagccgcgtgtgcagttctctccccctgctcgtc

SEQ ID NO: 213630 - DNA, 5299 bp, Zea Mays
aggcaaaggtagaggtggagataggctgggtctgggtgtgatgcgcaccgacaatgatggtgagtttacctgtgttgagttcgaggagtactacgccaaacatggcgtcgagcgacaacacacgaggagtactgcgccaaacacgacatcgagaggtagcaaacaacgtcgtacacgccacgacagcaacagaaccaggggcgaagccagacaacaaagccatcagggttggcatatgaacagtttgtgttttgtgatatatttcaccaaaaggaatcaggatggagagactgctcattttgtgggaagcgcctccattgtgggtgtgttgcttcaaagaactcttatgatctacttgacagtggaggagttcattgtgtcacttgcatgaaaaattcattagcccagtccgcttctggtcaagtggttccaaagctttttccatctccaatcaatctacgttttttcggtaaaagtgacgagttattgtcaagtagaaattttgaacagccaccctctcttacattggattccagaaatgatgatattgcttttgtaaataagagcaatcacctgttcatggtaaaaggtatagaggctggacaaagcagtaacatcttgagacaaaaagagatagagaatggttcaaggcagattaaatgggaacaaccaacccttagttttggggacatgggaaggcctttcctaactaggtctcaaagtgcattagagtcacctcaatgtactcgaagagatgacaataaggatccaactacagatagcacaagtgagtcattttcagaagcatgtctgagcatgagcctaggtattgcaaacaatgtaaacaggatggaggctacttcaacagcggaaaggcctgtgctattgtcaacaacagccattgctgaaggaagagaacttgccactacactatctccctttcaacacgcacaaagggcacggcatttcctgaccagacctccaaggattggtgaaggtgctgcttttgatccaacaagagacatgtttccacatcttcgtgttgctagaccacctgctgatggaaggggacgcaatcaattacttcctcgttattggccaagaataacagaccaagagctgcaacagatatctggagattcaaattccacgattgttccattgtttgagaaggtcctgagtgcgagtgatgcaggccgcatagggcgccttgttcttccaaaagcttgtgctgaggcatatttccccccaatttcccaaccggaaggtcgccccttgacaattcaagatgcaagaggaaaagaatggcattttcagtttaggttttggccaaataataacagcagaatgtatgtcttggagggtgttacaccatgcatacagtctttgcaattacaagctggcgatacagtgacctttagtcgtatagatcctggagggaaacttgttatgggctttcggaaggccacaaatactgtcagtctgccagactcacagatctcagctattgcaaatggttcccttctcagtgagacactcttttctactgcaaatgagaacataggtgtcgtaagtggttatcctggatttcttcactcaataaagggagccgcagatctccatccaaactctctatatgatcatcatatgaacttagttgatggggatgtcagttggaataaggcagataaatttggcagcaggccagatgagggatccttgcaatttttacaaaaacgtagtcacaatattggttccaaaagcaggaggttcttaatcgatgctgaagatgccatggaactaaagcttacctgggaagaggctcaagagttgttgcgccctgctcccactgcaaaaccaactgttgtgatgattgaggactatgaatttgaagaatatgatgaaccccctgtctttgcaaagagatcaattttcaccatccgtgcaacaggggaacaagatcagtggattcaatgtgacgactgctcaaaatggcgccggttgcctcttaatgttattgttgcgcccaaatggacatgcaccgacaactcatgggactcaaaatgctgctcctgctctgcgcctgaagagttgaccccaagagagttgcaaagtgttctgcagcagtatgaagaaatgaggaggcgaaagggcagttatggtctgaagctgaacgtcgctgaaatggatgcatccagccttgatgctttcgccaccgccgcagtatttggcgaagtcgggaaccaaggcagcgcctcagtggcgacaaccacaaagcacccccgacatcgccctggctgcacatgcatcgtgtgcatccagccgcccagcggcaagggcccgaagcacagccccgcgtgcacctgcaacgtgtgcatgacggtcaggcgccggttcaagacgctgatgatgaggaagaagcagcggcagtcggagcgcgaggaggcggaggccggcaagaagatcgcatgggtgaacagagacgagcctgaggggagcagcctgtcgagatccccgcagacgcttgacagcacccgagacaacagtgatgtgacggcgaccatgttggacaaggtgtccgacgtgaacaagcaggggcacatcgacgtcgacctcaacctccaccctgctgcccctgccgtccaggctgcgcagcagcagccccggccggtgagcatgatgggtctcttggaagtggcgggccggccgcttgacaactacatgaagcagaatggcctgacgagcctggtgggggagcaaggtggtggcagctccagcacggccacggtccctcctccggctctggtggagagtgaggagcggacgtccaacgagggcctcgtcccatcagcatcggcagagcgggaaccgaacgccatggccgtcgacgaggctggcgagaaccagcaggacaaggctgccgacgacgacgacgacgccgtcgctgccgccgctacttgacgtgattttttttcatggagctgcttctcctggaggctgggagtaacttacgtgtacgtatgaggcttgtgttggttggtgttgtaatctgacgcttaaacattggcttcaataactcatacagagtgagaacctgaaagtatcagtctagagcaagttctttttactggtgctgaaagtatcagtcttgcgcaacccaaaaggaggaaacaaaaattttagaccctccaaaattgtactcccctttggtatgtacaatctgaagtggtaacaaaaatgcactacttttttctaatagaactccgatccaagacatgcttgttttttgtttaggaaaaaaggctaggttcacctgattgtttctgatcttcttccatgtaatattttaacacatttttctttcgaacaaaatataactcagctgtttcaaaaccgtcaaaaaaaaacaacttatgattagctgctcctttttttactgctccaaggctggcctgtgagcaacattgcacccccaccacaggtcaggttcatccagcccatttattattctaaaaaaaaactctactccaaaagatgtgtccagcccagtgaagcccgaaaggaaagaagccagccgctcccgtgggcgacgacatggtcctgtgtccgtgtgaggtacacatgactacgggggccccacctccttcgttcccaatcccagatcccgcactctctttcagaacccaacacgccactgcctagctagtagctagcagagcagctagccaagcaacccagccgagtagccgaccagagagagcgagagaggcagagaggagcggacctgcccgtcgcaatggcgatgccgccgaagcccggcgacccgccgcagcgctcgcctgcgcggagccccaacctcaacctgccctgcccgctgccgccggtcccgggcgggccgcctgcgccgtcggccgccgggttgcccccgccgcgcgcgagtcaccaccgccgcgccagatctgaggtggcctttcgcttctcggacgacctggccggcggcgtgggcggcggcttcgacgagatcggctccgaggacgacctcttctccaccttcatggacatggacaagatcgccggcgccgaccgcgaccgtgccgccgagacctcctcgccgccgcgcccagccaagcaccgccacagcgcctcctttgacggcttcgggatgggggctgccgccggtggcctggccgggcagcaggacggcggcggaggcatgtttggagaggtgatggaggccaagaaggccatgtcttccgagcagcttgccgagctcgctgccatcgaccccaagcgcgccaaaagaataattgcaaacagacaatctgcagcacggtcaaaggaaagaaaatctagatatataacagaactggagcggaaggttcaaactcttcagacagaggctactactctttcagcgcagctcacactattccagagagacacaactggactttcggcagaaaatgctgagctgaagataaggttgcaggccatggagcagcaggctcaactgcgggatgctctaaacgatgcgctgaagcaagaagtggagaggctcaagatagcgacgggcgagatgccgaagtccaacgaacaattcaacatggggatgcagcacgtctcgtacagcggcccttctttcttccatctcccggagcagcacgtagacattcagctgccgcaccatttccagcagcctccgcggaacgtccagatgctgtcccaccccaactccctctcggatatggcgcagcaagactcgcttgggcggctccgggggctggacattggaaaagggtccatggctatgaagccagaggcagaggtcgtggtgaagtcagagggcagctctgtatctgcaggtgaaagcaacaccaccttctagctatacaatacatctgccttccaagaagcctccgtttggtttagagttcttttgttcatagtctgacatcctccttccttgagctgcttcgtccttctcagtaggcctattttttttattccattggttatatctactagttaacattggtcggttgccaatcgttgttgtcgtggtggctgatttctatagggacattgatgtgttggtttcgagtttgttgttgttgttgtgtgtgtggttggttgtttcgagctaggggctgaaagggcaccgagtgtttttttctccacctgttttagttttgttatagatttgacaacaatcgttatgatttctccttctggaaaggtgtacattgtgttgctatgctaatttgtagtgatatttttgatgattccaactgtaccctgc

SEQ ID NO: 213631 - DNA, 6014 bp, Zea Mays
cagcagcgctgcagcgaccacccgcggctgggtgcgcgcgttcgttgtcccttccacatccaccggaaagctacgcctcctcctcctcctccaccacctcgtctcctctccactctcaatcgctctctctctctccgtgggcgatgcgctcagcctgctcaggtcagcgttgatctatcggagggaggactgcctgcgctcgccggccacccatggctatggcggcagcggcggcggcggctaccaagaggtgcatgaacccggcatgcggcgcgccggcgtcggtgctgggggcgggaggggactggaggaagggctggccgctgcggtccggatgcttcgccctactctgcgacaagtgcgggttggcatatgaacagtttgtgttttgtgatatatttcaccaaaaggaatcaggatggagagactgctcattttgtgggaagcgcctccattgtgggtgtgttgcttcaaagaactcttatgatctacttgacagtggaggagttcattgtgtcacttgcatgaaaaattcattagcccagtccgcttctggtcaagtggttccaaagctttttccatctccaatcaatctacgttttttcggtaaaagtgacgagttattgtcaagtagaaattttgaacagccaccctctcttacattggattccagaaatgatgatattgcttttgtaaataagagcaatcacctgttcatggtaaaaggtatagaggctggacaaagcagtaacatcttgagacaaaaagagatagagaatggttcaaggcagattaaatgggaacaaccaacccttagttttggggacatgggaaggcctttcctaactaggtctcaaagtgcattagagtcacctcaatgtactcgaagagatgacaataaggatccaactacagatagcacaagtgagtcattttcagaagcatgtctgagcatgagcctaggtattgcaaacaatgtaaacaggatggaggctacttcaacagcggaaaggcctgtgctattgtcaacaacagccattgctgaaggaagagaacttgccactacactatctccctttcaacacgcacaaagggcacggcatttcctgaccagacctccaaggattggtgaaggtgctgcttttgatccaacaagagacatgtttccacatcttcgtgttgctagaccacctgctgatggaaggggacgcaatcaattacttcctcgttattggccaagaataacagaccaagagctgcaacagatatctggagattcaaattccacgattgttccattgtttgagaaggtcctgagtgcgagtgatgcaggccgcatagggcgccttgttcttccaaaagcttgtgctgaggcatatttccccccaatttcccaaccggaaggtcgccccttgacaattcaagatgcaagaggaaaagaatggcattttcagtttaggttttggccaaataataacagcagaatgtatgtcttggagggtgttacaccatgcatacagtctttgcaattacaagctggcgatacagtgacctttagtcgtatagatcctggagggaaacttgttatgggctttcggaaggccacaaatactgtcagtctgccagtaagttagattttccataagataatctattgctgatgcaagtgcttgtttttcatctcctttctcatgtttttgcttcgatgtttgtttattacttttacgcaggactcacagatctcagctattgcaaatggttcccttctcagtgagacactcttttctactgcaaatgagaacataggtgtcgtaagtggttatcctggatttcttcactcaataaagggagccgcagatctccatccaaactctctatatgatcatcatatgaacttagttgatggggatgtcagttggaataaggcagataaatttggcagcaggccagatgagggatccttgcaatttttacaaaaacgtagtcacaatattggttccaaaagcaggaggttcttaatcgatgctgaagatgccatggaactaaagcttacctgggaagaggctcaagagttgttgcgccctgctcccactgcaaaaccaactgttgtgatgattgaggactatgaatttgaagaatatgatgaaccccctgtctttgcaaagagatcaattttcaccatccgtgcaacaggggaacaagatcagtggattcaatgtgacgactgctcaaaatggcgccggttgcctcttaatgttattgttgcgcccaaatggacatgcaccgacaactcatgggactcaaaatggtaatgttatattgtgttctctgttgatgtgttgtgcgatgtgtgatccgatcaatctttagccttaaaaattctgaaactttggtgtgatgatcttattggtgtggaacaatgaattttatatggacttcatctgtttcattccatgttacagtcttggtcaatccagaatttcagtcacacttgatccttgatttgctagattaatccatgtactttgaaatatgctcttttctctcgtatccctctcaacaattcgtattggaaaaactttttggcatcaggccaattgtctgtgatactgtcccttgttttttttgagaccctatctaggcatgtacgtatttcacactatctcttgccggaggccattcggtctgtgacactgtcccttactccgttgctggactgctctagccttacttttgttactcctacttattctcattgtactttaaattcaactgttgcagctgctcctgctctgcgcctgaagagttgaccccaagagagttgcaaagtgttctgcagcagtatgaagaaatgaggaggcgaaagggcagttatggtctgaagctgaacgtcgctgaaatggatgcatccagccttgatgctttcgccaccgccgcagtatttggcgaagtcgggaaccaaggcagcgcctcagtggcgacaaccacaaagcacccccgacatcgccctggctgcacatgcatcgtgtgcatccagccgcccagcggcaagggcccgaagcacagccccgcgtgcacctgcaacgtgtgcatgacggtcaggcgccggttcaagacgctgatgatgaggaagaagcagcggcagtcggagcgcgaggaggcggaggccggcaagaagatcgcatgggtgaacagagacgagcctgaggggagcagcctgtcgagatccccgcagacgcttgacagcacccgagacaacagtgatgtgacggcgaccatgttggacaaggtgtccgacgtgaacaagcaggggcacatcgacgtcgacctcaacctccaccctgctgcccctgccgtccaggctgcgcagcagcagccccggccggtgagcatgatgggtctcttggaagtggcgggccggccgcttgacaactacatgaagcagaatggcctgacgagcctggtgggggagcaaggtggtggcagctccagcacggccacggtccctcctccggctctggtggagagtgaggagcggacgtccaacgagggcctcgtcccatcagcatcggcagagcgggaaccgaacgccatggccgtcgacgaggctggcgagaaccagcaggacaaggctgccgacgacgacgacgacgccgtcgctgccgccgctacttgacgtgattttttttcatggagctgcttctcctggaggctgggagtaacttacgtgtacgtatgaggcttgtgttggttggtgttgtaatctgacgcttaaacattggcttcaataactcatacagagtgagaacctgaaagtatcagtctagagcaagttctttttactggtgctgaaagtatcagtcttgcgcaacccaaaaggaggaaacaaaaattttagaccctccaaaattgtactcccctttggtatgtacaatctgaagtggtaacaaaaatgcactacttttttctaatagaactccgatccaagacatgcttgttttttgtttaggaaaaaaggctaggttcacctgattgtttctgatcttcttccatgtaatattttaacacatttttctttcgaacaaaatataactcagctgtttcaaaaccgtcaaaaaaaaacaacttatgattagctgctcctttttttactgctccaaggctggcctgtgagcaacattgcacccccaccacaggtcaggttcatccagcccatttattattctaaaaaaaaactctactccaaaagatgtgtccagcccagtgaagcccgaaaggaaagaagccagccgctcccgtgggcgacgacatggtcctgtgtccgtgtgaggtacacatgactacgggggccccacctccttcgttcccaatcccagatcccgcactctctttcagaacccaacacgccactgcctagctagtagctagcagagcagctagccaagcaacccagccgagtagccgaccagagagagcgagagaggcagagaggagcggacctgcccgtcgcaatggcgatgccgccgaagcccggcgacccgccgcagcgctcgcctgcgcggagccccaacctcaacctgccctgcccgctgccgccggtcccgggcgggccgcctgcgccgtcggccgccgggttgcccccgccgcgcgcgagtcaccaccgccgcgccagatctgaggtggcctttcgcttctcggacgacctggccggcggcgtgggcggcggcttcgacgagatcggctccgaggacgacctcttctccaccttcatggacatggacaagatcgccggcgccgaccgcgaccgtgccgccgagacctcctcgccgccgcgcccagccaagcaccgccacagcgcctcctttgacggcttcgggatgggggctgccgccggtggcctggccgggcagcaggacggcggcggaggcatgtttggagaggtgatggaggccaagaaggccatgtcttccgagcagcttgccgagctcgctgccatcgaccccaagcgcgccaaaagaataattgcaaacagacaatctgcagcacggtcaaaggaaagaaaatctagatatataacagaactggagcggaaggttcaaactcttcagacagaggctactactctttcagcgcagctcacactattccagagagacacaactggactttcggcagaaaatgctgagctgaagataaggttgcaggccatggagcagcaggctcaactgcgggatgctctaaacgatgcgctgaagcaagaagtggagaggctcaagatagcgacgggcgagatgccgaagtccaacgaacaattcaacatggggatgcagcacgtctcgtacagcggcccttctttcttccatctcccggagcagcacgtagacattcagctgccgcaccatttccagcagcctccgcggaacgtccagatgctgtcccaccccaactccctctcggatatggcgcagcaagactcgcttgggcggctccgggggctggacattggaaaagggtccatggctatgaagccagaggcagaggtcgtggtgaagtcagagggcagctctgtatctgcaggtgaaagcaacaccaccttctagctatacaatacatctgccttccaagaagcctccgtttggtttagagttcttttgttcatagtctgacatcctccttccttgagctgcttcgtccttctcagtaggcctattttttttattccattggttatatctactagttaacattggtcggttgccaatcgttgttgtcgtggtggctgatttctatagggacattgatgtgttggtttcgagtttgttgttgttgttgtgtgtgtggttggttgtttcgagctaggggctgaaagggcaccgagtgtttttttctccacctgttttagttttgttatagatttgacaacaatcgttatgatttctccttctggaaaggtgtacattgtgttgctatgctaatttgtagtgatatttttgatgattccaactgtaccctgc

SEQ ID NO: 213632 - DNA, 5309 bp, Zea Mays
ccaactgtttgaatgtaattcgtagagacaaaaacacaagcacgcaccaatcaccaccagcagcgctgcagcgaccacccgcggctgggtgcgcgcgttcgttgtcccttccacatccaccggaaagctacgcctcctcctcctcctccaccacctcgtctcctctccactctcaatcgctctctctctctccgtgggcgatgcgctcagcctgctcaggtcagcgttgatctatcggagggaggactgcctgcgctcgccggccacccatggctatggcggcagcggcggcggcggctaccaagaggtgcatgaacccggcatgcggcgcgccggcgtcggtgctgggggcgggaggggactggaggaagggctggccgctgcggtccggatgcttcgccctactctgcgacaagtgcgggcttctggtcaagtggttccaaagctttttccatctccaatcaatctacgttttttcggtaaaagtgacgagttattgtcaagtagaaattttgaacagccaccctctcttacattggattccagaaatgatgatattgcttttgtaaataagagcaatcacctgttcatggtaaaaggtatagaggctggacaaagcagtaacatcttgagacaaaaagagatagagaatggttcaaggcagattaaatgggaacaaccaacccttagttttggggacatgggaaggcctttcctaactaggtctcaaagtgcattagagtcacctcaatgtactcgaagagatgacaataaggatccaactacagatagcacaagtgagtcattttcagaagcatgtctgagcatgagcctaggtattgcaaacaatgtaaacaggatggaggctacttcaacagcggaaaggcctgtgctattgtcaacaacagccattgctgaaggaagagaacttgccactacactatctccctttcaacacgcacaaagggcacggcatttcctgaccagacctccaaggattggtgaaggtgctgcttttgatccaacaagagacatgtttccacatcttcgtgttgctagaccacctgctgatggaaggggacgcaatcaattacttcctcgttattggccaagaataacagaccaagagctgcaacagatatctggagattcaaattccacgattgttccattgtttgagaaggtcctgagtgcgagtgatgcaggccgcatagggcgccttgttcttccaaaagcttgtgctgaggcatatttccccccaatttcccaaccggaaggtcgccccttgacaattcaagatgcaagaggaaaagaatggcattttcagtttaggttttggccaaataataacagcagaatgtatgtcttggagggtgttacaccatgcatacagtctttgcaattacaagctggcgatacagtgacctttagtcgtatagatcctggagggaaacttgttatgggctttcggaaggccacaaatactgtcagtctgccagactcacagatctcagctattgcaaatggttcccttctcagtgagacactcttttctactgcaaatgagaacataggtgtcgtaagtggttatcctggatttcttcactcaataaagggagccgcagatctccatccaaactctctatatgatcatcatatgaacttagttgatggggatgtcagttggaataaggcagataaatttggcagcaggccagatgagggatccttgcaatttttacaaaaacgtagtcacaatattggttccaaaagcaggaggttcttaatcgatgctgaagatgccatggaactaaagcttacctgggaagaggctcaagagttgttgcgccctgctcccactgcaaaaccaactgttgtgatgattgaggactatgaatttgaagaatatgatgaaccccctgtctttgcaaagagatcaattttcaccatccgtgcaacaggggaacaagatcagtggattcaatgtgacgactgctcaaaatggcgccggttgcctcttaatgttattgttgcgcccaaatggacatgcaccgacaactcatgggactcaaaatgctgctcctgctctgcgcctgaagagttgaccccaagagagttgcaaagtgttctgcagcagtatgaagaaatgaggaggcgaaagggcagttatggtctgaagctgaacgtcgctgaaatggatgcatccagccttgatgctttcgccaccgccgcagtatttggcgaagtcgggaaccaaggcagcgcctcagtggcgacaaccacaaagcacccccgacatcgccctggctgcacatgcatcgtgtgcatccagccgcccagcggcaagggcccgaagcacagccccgcgtgcacctgcaacgtgtgcatgacggtcaggcgccggttcaagacgctgatgatgaggaagaagcagcggcagtcggagcgcgaggaggcggaggccggcaagaagatcgcatgggtgaacagagacgagcctgaggggagcagcctgtcgagatccccgcagacgcttgacagcacccgagacaacagtgatgtgacggcgaccatgttggacaaggtgtccgacgtgaacaagcaggggcacatcgacgtcgacctcaacctccaccctgctgcccctgccgtccaggctgcgcagcagcagccccggccggtgagcatgatgggtctcttggaagtggcgggccggccgcttgacaactacatgaagcagaatggcctgacgagcctggtgggggagcaaggtggtggcagctccagcacggccacggtccctcctccggctctggtggagagtgaggagcggacgtccaacgagggcctcgtcccatcagcatcggcagagcgggaaccgaacgccatggccgtcgacgaggctggcgagaaccagcaggacaaggctgccgacgacgacgacgacgccgtcgctgccgccgctacttgacgtgattttttttcatggagctgcttctcctggaggctgggagtaacttacgtgtacgtatgaggcttgtgttggttggtgttgtaatctgacgcttaaacattggcttcaataactcatacagagtgagaacctgaaagtatcagtctagagcaagttctttttactggtgctgaaagtatcagtcttgcgcaacccaaaaggaggaaacaaaaattttagaccctccaaaattgtactcccctttggtatgtacaatctgaagtggtaacaaaaatgcactacttttttctaatagaactccgatccaagacatgcttgttttttgtttaggaaaaaaggctaggttcacctgattgtttctgatcttcttccatgtaatattttaacacatttttctttcgaacaaaatataactcagctgtttcaaaaccgtcaaaaaaaaacaacttatgattagctgctcctttttttactgctccaaggctggcctgtgagcaacattgcacccccaccacaggtcaggttcatccagcccatttattattctaaaaaaaaactctactccaaaagatgtgtccagcccagtgaagcccgaaaggaaagaagccagccgctcccgtgggcgacgacatggtcctgtgtccgtgtgaggtacacatgactacgggggccccacctccttcgttcccaatcccagatcccgcactctctttcagaacccaacacgccactgcctagctagtagctagcagagcagctagccaagcaacccagccgagtagccgaccagagagagcgagagaggcagagaggagcggacctgcccgtcgcaatggcgatgccgccgaagcccggcgacccgccgcagcgctcgcctgcgcggagccccaacctcaacctgccctgcccgctgccgccggtcccgggcgggccgcctgcgccgtcggccgccgggttgcccccgccgcgcgcgagtcaccaccgccgcgccagatctgaggtggcctttcgcttctcggacgacctggccggcggcgtgggcggcggcttcgacgagatcggctccgaggacgacctcttctccaccttcatggacatggacaagatcgccggcgccgaccgcgaccgtgccgccgagacctcctcgccgccgcgcccagccaagcaccgccacagcgcctcctttgacggcttcgggatgggggctgccgccggtggcctggccgggcagcaggacggcggcggaggcatgtttggagaggtgatggaggccaagaaggccatgtcttccgagcagcttgccgagctcgctgccatcgaccccaagcgcgccaaaagaataattgcaaacagacaatctgcagcacggtcaaaggaaagaaaatctagatatataacagaactggagcggaaggttcaaactcttcagacagaggctactactctttcagcgcagctcacactattccagagagacacaactggactttcggcagaaaatgctgagctgaagataaggttgcaggccatggagcagcaggctcaactgcgggatgctctaaacgatgcgctgaagcaagaagtggagaggctcaagatagcgacgggcgagatgccgaagtccaacgaacaattcaacatggggatgcagcacgtctcgtacagcggcccttctttcttccatctcccggagcagcacgtagacattcagctgccgcaccatttccagcagcctccgcggaacgtccagatgctgtcccaccccaactccctctcggatatggcgcagcaagactcgcttgggcggctccgggggctggacattggaaaagggtccatggctatgaagccagaggcagaggtcgtggtgaagtcagagggcagctctgtatctgcaggtgaaagcaacaccaccttctagctatacaatacatctgccttccaagaagcctccgtttggtttagagttcttttgttcatagtctgacatcctccttccttgagctgcttcgtccttctcagtaggcctattttttttattccattggttatatctactagttaacattggtcggttgccaatcgttgttgtcgtggtggctgatttctatagggacattgatgtgttggtttcgagtttgttgttgttgttgtgtgtgtggttggttgtttcgagctaggggctgaaagggcaccgagtgtttttttctccacctgttttagttttgttatagatttgacaacaatcgttatgatttctccttctggaaaggtgtacattgtgttgctatgctaatttgtagtgatatttttgatgattccaactgtaccctgc

SEQ ID NO: 213633 - DNA, 3366 bp, Zea Mays
ctaccatggcttcgcccgagccggcggccacccctcctaagccaactgtttgaatgtaattcgtagagacaaaaacacaagcacgcaccaatcaccaccagcagcgctgcagcgaccacccgcggctgggtgcgcgcgttcgttgtcccttccacatccaccggaaagctacgcctcctcctcctcctccaccacctcgtctcctctccactctcaatcgctctctctctctccgtgggcgatgcgctcagcctgctcaggtcagcgttgatctatcggagggaggactgcctgcgctcgccggccacccatggctatggcggcagcggcggcggcggctaccaagaggtgcatgaacccggcatgcggcgcgccggcgtcggtgctgggggcgggaggggactggaggaagggctggccgctgcggtccggatgcttcgccctactctgcgacaagtgcgggttggcatatgaacagtttgtgttttgtgatatatttcaccaaaaggaatcaggatggagagactgctcattttgtgggaagcgcctccattgtgggtgtgttgcttcaaagaactcttatgatctacttgacagtggaggagttcattgtgtcacttgcatgaaaaattcattagcccagtccgcttctggtcaagtggttccaaagctttttccatctccaatcaatctacgttttttcggtaaaagtgacgagttattgtcaagtagaaattttgaacagccaccctctcttacattggattccagaaatgatgatattgcttttgtaaataagagcaatcacctgttcatggtaaaaggtatagaggctggacaaagcagtaacatcttgagacaaaaagagatagagaatggttcaaggcagattaaatgggaacaaccaacccttagttttggggacatgggaaggcctttcctaactaggtctcaaagtgcattagagtcacctcaatgtactcgaagagatgacaataaggatccaactacagatagcacaagtgagtcattttcagaagcatgtctgagcatgagcctaggtattgcaaacaatgtaaacaggatggaggctacttcaacagcggaaaggcctgtgctattgtcaacaacagccattgctgaaggaagagaacttgccactacactatctccctttcaacacgcacaaagggcacggcatttcctgaccagacctccaaggattggtgaaggtgctgcttttgatccaacaagagacatgtttccacatcttcgtgttgctagaccacctgctgatggaaggggacgcaatcaattacttcctcgttattggccaagaataacagaccaagagctgcaacagatatctggagattcaaattccacgattgttccattgtttgagaaggtcctgagtgcgagtgatgcaggccgcatagggcgccttgttcttccaaaagcttgtgctgaggcatatttccccccaatttcccaaccggaaggtcgccccttgacaattcaagatgcaagaggaaaagaatggcattttcagtttaggttttggccaaataataacagcagaatgtatgtcttggagggtgttacaccatgcatacagtctttgcaattacaagctggcgatacagtgacctttagtcgtatagatcctggagggaaacttgttatgggctttcggaaggccacaaatactgtcagtctgccagactcacagatctcagctattgcaaatggttcccttctcagtgagacactcttttctactgcaaatgagaacataggtgtcgtaagtggttatcctggatttcttcactcaataaagggagccgcagatctccatccaaactctctatatgatcatcatatgaacttagttgatggggatgtcagttggaataaggcagataaatttggcagcaggccagatgagggatccttgcaatttttacaaaaacgtagtcacaatattggttccaaaagcaggaggttcttaatcgatgctgaagatgccatggaactaaagcttacctgggaagaggctcaagagttgttgcgccctgctcccactgcaaaaccaactgttgtgatgattgaggactatgaatttgaagaatatgatgaaccccctgtctttgcaaagagatcaattttcaccatccgtgcaacaggggaacaagatcagtggattcaatgtgacgactgctcaaaatggcgccggttgcctcttaatgttattgttgcgcccaaatggacatgcaccgacaactcatgggactcaaaatgctgctcctgctctgcgcctgaagagttgaccccaagagagttgcaaagtgttctgcagcagtatgaagaataattgcaaacagacaatctgcagcacggtcaaaggaaagaaaatctagatatataacagaactggagcggaaggttcaaactcttcagacagaggctactactctttcagcgcagctcacactattccagagagacacaactggactttcggcagaaaatgctgagctgaagataaggttgcaggccatggagcagcaggctcaactgcgggatgctctaaacgatgcgctgaagcaagaagtggagaggctcaagatagcgacgggcgagatgccgaagtccaacgaacaattcaacatggggatgcagcacgtctcgtacagcggcccttctttcttccatctcccggagcagcacgtagacattcagctgccgcaccatttccagcagcctccgcggaacgtccagatgctgtcccaccccaactccctctcggatatggcgcagcaagactcgcttgggcggctccgggggctggacattggaaaagggtccatggctatgaagccagaggcagaggtcgtggtgaagtcagagggcagctctgtatctgcaggtgaaagcaacaccaccttctagctatacaatacatctgccttccaagaagcctccgtttggtttagagttcttttgttcatagtctgacatcctccttccttgagctgcttcgtccttctcagtaggcctattttttttattccattggttatatctactagttaacattggtcggttgccaatcgttgttgtcgtggtggctgatttctatagggacattgatgtgttggtttcgagtttgttgttgttgttgtgtgtgtggttggttgtttcgagctaggggctgaaagggcaccgagtgtttttttctccacctgttttagttttgttatagatttgacaacaatcgttatgatttctccttctggaaaggtgtacattgtgttgctatgctaatttgtagtgatatttttgatgattccaactgtaccctgc

SEQ ID NO: 213634 - DNA, 213 bp, Zea Mays
ccatgtcgaagccacctccacacattcaagcacctcctcctcccccgccggccaacaactcagccgccgcaaccgccacatcagccatgggcgcctgcgcaaccaagcccaagacgcttgaggggcaggccccagctgaggccgccgtctccacacccaaggttgcgcccgaggccactccaatctccgttgagctttcccggccttgatgtg

SEQ ID NO: 213635 - DNA, 266 bp, Zea Mays
ctaaatttagccgaaaggaacccaacccacgaagcatccgccacagccgaactggcccgatgtcgctggttgcctacgatgcctcctccgatgaggaagacgccggcgagcctgccgccgccgcggcgccacaccctgcccccatcggtccgcagccaaggcctccgtctcctacggcagtgagccctgctcctcggcctacgcctacgcttacgccgccgccgccagcagccagccaggatgcagtgtcacatcggcagccttgg

SEQ ID NO: 213636 - DNA, 476 bp, Zea Mays
cgcacggcacggtgccccgttgccacacatacggatccaacaaaatctcccgcaaagacaacggcgagccaaccaccaccagcgtcccgcgctagctgcggcaccgcatggctgccgtgaccagcaccgcctccatctgcccggccgcagccggcgccctctcttcgctgccgtccttcatcacgcgcaagcccaccagcggcagcaggaggttgcagcaggcagcagcgacgacagtctgccactgccgctctgctcgggtagaggaggggctgctgggccggagggacgccttattgctcggcatcgtcttctccgccgcgacgccgccgctgctcgcccctgccggcgctctggcggacgaggccaccgccgagtcgcaggagggcttcactacgtacgaggatgaggccaacaagttcagcattcaagttccgcaaggctatatataaagctctgtgcgcgtgtgtctgcag

SEQ ID NO: 213637 - DNA, 1061 bp, Zea Mays
cgcgcgccactctccctggcagccgccgtcaggaagcctccactccttctccctcttctctctcttctctcctccccttgctcttctctggccgccgccacttgcccggacttcctgcagccgagcgcccctgcagctccctgcaccttcatcctgcgcgctccagtcgaccgcgcactgggaccagcgcagtgcccagccgagcagcgcgacgcccggtggcgttcatgtgcttctcgcgggctgattgcaaatttgttcccctaggactttggccgttggatggtgtactctgcgggatccgcaacctcctactgagctcccgcacagaggggcaggcatggaagtgcaggcagccggccgtcgacaccaagcaggccttgcgcttatggcagccgtggtgctcggtcttatcaccagtggtgtcgttagatgccaaatgcagtttgctctgcatggggattttgctttctggtgtctgtcccgttggaaatgggtagttcctgagtgacgaacagacttcccatggcagctattctgttgaggatgtgcgaaaggtgcactgcagagtctgagaagtgagagaaaaaaatgacaagtgctgtttaccgctcacccatttttaaccaatgccacggtgatacaattatctgtgctaaagggacaattgtttcaactaaaccaagcaccacagttggaggccagatccttggaaggcaatattgtgaaattattgtaacttgtgtgctaaaacgagatacaattttgcctcgccctggagtgatgtcgctggtggtgcttttgtgactgatcatctctggagcttttgtgaatgatctagatctagctatctatctgtaaatgatctagttgtgaatgatattataattgtgatgcttttgtgaatatataattgtggtgcttttgtgtttatgtgatggatctatgactatggtatactaattaactgtgtatgtctttatgattcgtgtataaaaatctgtgatttgtggtgcttaattaaatgtaaattattattaataacaactgtaaaaatggcg

SEQ ID NO: 213638 - DNA, 1057 bp, Zea Mays
gtcaggaagcctccactccttctccctcttctctctcttctctcctccccttgctcttctctggccgccgccacttgcccggacttcctgcagccgagcgcccctgcagctccctgcaccttcatcctgcgcgctccagtcgaccgcgcactgggaccagcgcagtgcccagccgagcagcgcgacgcccggtggcgttcatgtgcttctcggtacggtgaaacctttattgtcgttcctaccacactttcctcatttcttgagactttggccgttggatggtgtactctgcgggatccgcaacctcctactgagctcccgcacagaggggcaggcatggaagtgcaggcagccggccgtcgacaccaagcaggccttgcgcttatggcagccgtggtgctcggtcttatcaccagtggtgtcgttagatgccaaatgcagtttgctctgcatggggattttgctttctggtgtctgtcccgttggaaatgggtagttcctgagtgacgaacagacttcccatggcagctattctgttgaggatgtgcgaaaggtgcactgcagagtctgagaagtgagagaaaaaaatgacaagtgctgtttaccgctcacccatttttaaccaatgccacggtgatacaattatctgtgctaaagggacaattgtttcaactaaaccaagcaccacagttggaggccagatccttggaaggcaatattgtgaaattattgtaacttgtgtgctaaaacgagatacaattttgcctcgccctggagtgatgtcgctggtggtgcttttgtgactgatcatctctggagcttttgtgaatgatctagatctagctatctatctgtaaatgatctagttgtgaatgatattataattgtgatgcttttgtgaatatataattgtggtgcttttgtgtttatgtgatggatctatgactatggtatactaattaactgtgtatgtctttatgattcgtgtataaaaatctgtgatttgtggtgcttaattaaatgtaaattattattaataacaactgtaaaaatggcg

SEQ ID NO: 213639 - DNA, 2263 bp, Zea Mays
  misc_feature (2262)..(2263): n is a, c, g, or t
gtactgcagtcaatctggttccgctgctccttcctcggcaccgccgcctcgcaatccgctcccgcttcgcccgtaaaaccctagctaaaccctagccgaaagaaacaatgtctctcctcccctgagcgcgctcgtggccgccccttgttggccatggctctccagctccgccgcctcctcccgcacggatacgcccagcgacaccgcgccgtcatccacgcgctatcgctgctgccgccgccgcccgcaatgcttcaattcgaggtgtttcagagatattcttcttcaccctggcccttttcacctttccgcccttgtaaaatgtgtggggttgcatttaggagcaattcaacaaggaaaatatcttcaagaaataattttggggttgccttacagcccaaaagtagtgcctttattactcctcggctctttggcagctatagttctgtatgtttcagagccacagccagctgtggaattgctttaaaggctaataatattggcaattcacgaccattctcaactacatacagtaaaaaaataaggtttcttgttaaaaataagatttcattcagtaatctaaatatgagaaggaaagacggaagtgttgcacatagtttgcttcatagatctgagaaatgccaaagcacattagctacatgtagcaccattgttgatgaggcttcaacatctactagtaacaacagcaagagtgttactgatgctaagactgacactgccaagaggaagagttcaagaggaagcaaaaaggaagttgatggagatatgaaagaaaaggaagtacataccaataaaaagaggatatttgctagaactcgtaaagctgcaacaaagacgtctgataatattagcacgaaccaagaaaacaagaagactgataattgtaaattgaaaaggggtgctgatagtttcaaagagaaaaaagtaaataatagggcaaagtcaaaagcagaggtttctgctgcttcttctgtacctgaaatttgtatgcaatcctctattgatggttcagttattgagaaaaagccactggtgccattgtatcctcccagagccaaatcagttgtggttgtggaatcagccacaaaagcaaaagttattcagaagtaccttggggacatgtatgaagtgttaccaagctatggtcatgtgagagatttagcaggtagatctaaatctgtccgccccgatgatgacttcagcatggtctgggaggtgcctgctgctgcctggacacaccttaagagcattaaagttgcactgcaaagagcagaaaatttaattcttgcatctgatcctgaccgtgaaggtgaagcgattgcttggcacatcaaagaaatgcttgaacaacaaggtgtactgggttttgatgtgactgttgcaagagttgttttccatgaaatatctgaggatgcaataaagaaggctttaatgtccccgaggtatattgacatggacttagtcaatgcttatcttgcacgccgttcccttgattatctaattgggtttggcatatcaccacttctgtggaggaagttgcctggttgccaatcagctggacgggtccaatctgctgctttggcccttgtgtgcgatcgagaagctgaaatagaacagtttaaggcacatgagtactggacagtacagacagacttcaaaatacaatcagcagatccttcaaatgccacatgtattccattctgtataaagcatttgaattcaaaaaagctggatcaactttccataccctctcaagaagaagcgcaagctatagaaaagatgattcattcttctacatttgaagttttaggtgttaaaagaagtaaaattcacaagaatcctccattgccatatattacatccagccttcagcaggatgcagcaaacaaactccattttactgcaggatataccatgaagattgcccaaaacctttatgagggtatcaacctttcctcagaagaaacaactgggttaataacgtacataagaactgatgggttccatatttctgatggagctgtggaggacattcgttcactagttaaagaaagatatggtcagaagtacgtttcggaggacattaggaagtatttaaagaaggtgaaaaatgctcaagaagcccatgaagccattaggcccaccagtataaggaggccgccatattcaagtggatgttggcattcctgaaggagagatgaattttcattccactgcatcaaaactggacttcaagggatnn

SEQ ID NO: 213640 - DNA, 588 bp, Zea Mays
  misc_feature (587)..(588): n is a, c, g, or t
gtactgcagtcaatctggttccgctgctccttcctcggcaccgccgcctcgcaatccgctcccgcttcgcccgtaaaaccctagctaaaccctagccgaaagaaacaatgtctctcctcccctgagcgcgctcgtggccgccccttgttggccatggctctccagctccgccgcctcctcccgcacggatacgcccagcgacaccgcgccgtcatccacgcgctatcgctgctgccgccgccgcccgcaatgatttctgatggagctgtggaggacattcgttcactagttaaagaaagatatggtcagaagtacgtttcggaggacattaggaagtatttaaagaaggtgaaaaatgctcaagaagcccatgaagccattaggcccaccagtataaggaggccgccatcatcattggttggaatacttgatgatgattctctaaaactgtacactctaatatggaaaaggacaatggcttgccaaatggaagcttccagaactgagatgattcaagtggatgttggcattcctgaaggagagatgaattttcattccactgcatcaaaactggacttcaagggatnn

SEQ ID NO: 213641 - DNA, 2371 bp, Zea Mays
  misc_feature (2370)..(2371): n is a, c, g, or t
atgcagcctgcagtactgcagtcaatctggttccgctgctccttcctcggcaccgccgcctcgcaatccgctcccgcttcgcccgtaaaaccctagctaaaccctagccgaaagaaacaatgtctctcctcccctgagcgcgctcgtggccgccccttgttggccatggctctccagctccgccgcctcctcccgcacggatacgcccagcgacaccgcgccgtcatccacgcgctatcgctgctgccgccgccgcccgcaatgcttcaattcgaggtgtttcagagatattcttcttcaccctggcccttttcacctttccgcccttgtaaaatgtgtggggttgcatttaggagcaattcaacaaggaaaatatcttcaagaaataattttggggttgccttacagcccaaaagtagtgcctttattactcctcggctctttggcagctatagttctgtatgtttcagagccacagccagctgtggaattgctttaaaggctaataatattggcaattcacgaccattctcaactacatacagtaaaaaaataaggtttcttgttaaaaataagatttcattcagtaatctaaatatgagaaggaaagacggaagtgttgcacatagtttgcttcatagatctgagaaatgccaaagcacattagctacatgtagcaccattgttgatgaggcttcaacatctactagtaacaacagcaagagtgttactgatgctaagactgacactgccaagaggaagagttcaagaggaagcaaaaaggaagttgatggagatatgaaagaaaaggaagtacataccaataaaaagaggatatttgctagaactcgtaaagctgcaacaaagacgtctgataatattagcacgaaccaagaaaacaagaagactgataattgtaaattgaaaaggggtgctgatagtttcaaagagaaaaaagtaaataatagggcaaagtcaaaagcagaggtttctgctgcttcttctgtacctgaaatttgtatgcaatcctctattgatggttcagttattgagaaaaagccactggtgccattgtatcctcccagagccaaatcagttgtggttgtggaatcagccacaaaagcaaaagttattcagaagtaccttggggacatgtatgaagtgttaccaagctatggtcatgtgagagatttagcaggtagatctaaatctgtccgccccgatgatgacttcagcatggtctgggaggtgcctgctgctgcctggacacaccttaagagcattaaagttgcactgcaaagaaaatttaattcttgcatctgatcctgaccgtgaaggtgaagcgattgcttggcacatcaaagaaatgcttgaacaacaaggtgtactgggttttgatgtgactgttgcaagagttgttttccatgaaatatctgaggatgcaataaagaaggctttaatgtccccgaggtatattgacatggacttagtcaatgcttatcttgcacgccgttcccttgattatctaattgggtttggcatatcaccacttctgtggaggaagttgcctggttgccaatcagctggacgggtccaatctgctgctttggcccttgtgtgcgatcgagaagctgaaatagaacagtttaaggcacatgagtactggacagtacagacagacttcaaaatacaatcagcagatccttcaaatgccacatgtattccattctgtataaagcatttgaattcaaaaaagctggatcaactttccataccctctcaagaagaagcgcaagctatagaaaagatgattcattcttctacatttgaagttttaggtgttaaaagaagtaaaattcacaagaatcctccattgccatatattacatccagccttcagcaggatgcagcaaacaaactccattttactgcaggatataccatgaagattgcccaaaacctttatgagggtatcaacctttcctcagaagaaacaactgggttaataacgtacataagaactgatgggttccatatttctgatggagctgtggaggacattcgttcactagttaaagaaagatatggtcagaagtacgtttcggaggacattaggaagtatttaaagaaggtgaaaaatgctcaagaagcccatgaagccattaggcccaccagtataaggaggccgccatcatcattggttggaatacttgatgatgattctctaaaactgtacactctaatatggaaaaggacaatggcttgccaaatggaagcttccagaactgagatgattcaagtggatgttggcattcctgaaggagagatgaattttcattccactgcatcaaaactggacttcaagggatnn

SEQ ID NO: 213642 - DNA, 2340 bp, Zea Mays
  misc_feature (2339)..(2340): n is a, c, g, or t
gggcaatgcagcctgcagtactgcagtcaatctggttccgctgctccttcctcggcaccgccgcctcgcaatccgctcccgcttcgcccgtaaaaccctagctaaaccctagccgaaagaaacaatgtctctcctcccctgagcgcgctcgtggccgccccttgttggccatggctctccagctccgccgcctcctcccgcacggatacgcccagcgacaccgcgccgtcatccacgcgctatcgctgctgccgccgccgcccgcaatgcttcaattcgaggtgtttcagagatattcttcttcaccctggcccttttcacctttccgcccttgtaaaatgtgtggggttgcatttaggagcaattcaacaaggaaaatatcttcaagaaataattttggggttgccttacagcccaaaagtagtgcctttattactcctcggctctttggcagctatagttctgtatgtttcagagccacagccagctgtggaattgctttaaaggctaataatattggcaattcacgaccattctcaactacatacagtaaaaaaataaggtttcttgttaaaaataagatttcattcagtaatctaaatatgagaaggaaagacggaagtgttgcacatagtttgcttcatagatctgagaaatgccaaagcacattagctacatgtagcaccattgttgatgaggcttcaacatctactagtaacaacagcaagagtgttactgatgctaagactgacactgccaagaggaagagttcaagaggaagcaaaaaggaagttgatggagatatgaaagaaaaggaagtacataccaataaaaagaggatatttgctagaactcgtaaagctgcaacaaagacgtctgataatattagcacgaaccaagaaaacaagaagactgataattgtaaattgaaaaggggtgctgatagtttcaaagagaaaaaagtaaataatagggcaaagtcaaaagcagaggtttctgctgcttcttctgtacctgaaatttgtatgcaatcctctattgatggttcagttattgagaaaaagccactggtgccattgtatcctcccagagccaaatcagttgtggttgtggaatcagccacaaaagcaaaagttattcagaagtaccttggggacatgtatgaagtgttaccaagctatggtcatgtgagagatttagcaggtagatctaaatctgtccgccccgatgatgacttcagcatggtctgggaggtgcctgctgctgcctggacacaccttaagagcattaaagttgcactgcaaaggtgaagcgattgcttggcacatcaaagaaatgcttgaacaacaaggtgtactgggttttgatgtgactgttgcaagagttgttttccatgaaatatctgaggatgcaataaagaaggctttaatgtccccgaggtatattgacatggacttagtcaatgcttatcttgcacgccgttcccttgattatctaattgggtttggcatatcaccacttctgtggaggaagttgcctggttgccaatcagctggacgggtccaatctgctgctttggcccttgtgtgcgatcgagaagctgaaatagaacagtttaaggcacatgagtactggacagtacagacagacttcaaaatacaatcagcagatccttcaaatgccacatgtattccattctgtataaagcatttgaattcaaaaaagctggatcaactttccataccctctcaagaagaagcgcaagctatagaaaagatgattcattcttctacatttgaagttttaggtgttaaaagaagtaaaattcacaagaatcctccattgccatatattacatccagccttcagcaggatgcagcaaacaaactccattttactgcaggatataccatgaagattgcccaaaacctttatgagggtatcaacctttcctcagaagaaacaactgggttaataacgtacataagaactgatgggttccatatttctgatggagctgtggaggacattcgttcactagttaaagaaagatatggtcagaagtacgtttcggaggacattaggaagtatttaaagaaggtgaaaaatgctcaagaagcccatgaagccattaggcccaccagtataaggaggccgccatcatcattggttggaatacttgatgatgattctctaaaactgtacactctaatatggaaaaggacaatggcttgccaaatggaagcttccagaactgagatgattcaagtggatgttggcattcctgaaggagagatgaattttcattccactgcatcaaaactggacttcaagggatnn

SEQ ID NO: 213643 - DNA, 2384 bp, Zea Mays
caggaaaaaaaattgcattggagaaccgttagatttagaatgaacgtgggcaatgcagcctgcagtactgcagtcaatctggttccgctgctccttcctcggcaccgccgcctcgcaatccgctcccgcttcgcccgtaaaaccctagctaaaccctagccgaaagaaacaatgtctctcctcccctgagcgcgctcgtggccgccccttgttggccatggctctccagctccgccgcctcctcccgcacggatacgcccagcgacaccgcgccgtcatccacgcgctatcgctgctgccgccgccgcccgcaatgcttcaattcgaggtgtttcagagatattcttcttcaccctggcccttttcacctttccgcccttgtaaaatgtgtggggttgcatttaggagcaattcaacaaggaaaatatcttcaagaaataattttggggttgccttacagcccaaaagtagtgcctttattactcctcggctctttggcagctatagttctgtatgtttcagagccacagccagctgtggaattgctttaaaggctaataatattggcaattcacgaccattctcaactacatacagtaaaaaaataaggtttcttgttaaaaataagatttcattcagtaatctaaatatgagaaggaaagacggaagtgttgcacatagtttgcttcatagatctgagaaatgccaaagcacattagctacatgtagcaccattgttgatgaggcttcaacatctactagtaacaacagcaagagtgttactgatgctaagactgacactgccaagaggaagagttcaagaggaagcaaaaaggaagttgatggagatatgaaagaaaaggaagtacataccaataaaaagaggatatttgctagaactcgtaaagctgcaacaaagacgtctgataatattagcacgaaccaagaaaacaagaagactgataattgtaaattgaaaaggggtgctgatagtttcaaagagaaaaaagtaaataatagggcaaagtcaaaagcagaggtttctgctgcttcttctgtacctgaaatttgtatgcaatcctctattgatggttcagttattgagaaaaagccactggtgccattgtatcctcccagagccaaatcagttgtggttgtggaatcagccacaaaagcaaaagttattcagaagtaccttggggacatgtatgaagtgttaccaagctatggtcatgtgagagatttagcaggtagatctaaatctgtccgccccgatgatgacttcagcatggtctgggaggtgcctgctgctgcctggacacaccttaagagcattaaagttgcactgcaaagagcagaaaatttaattcttgcatctgatcctgaccgtgaaggtgaagcgattgcttggcacatcaaagaaatgcttgaacaacaaggtgtactgggttttgatgtgactgttgcaagagttgttttccatgaaatatctgaggatgcaataaagaaggctttaatgtccccgaggtatattgacatggacttagtcaatgcttatcttgcacgccgttcccttgattatctaattgggtttggcatatcaccacttctgtggaggaagttgcctggttgccaatcagctggacgggtccaatctgctgctttggcccttgtgtgcgatcgagaagctgaaatagaacagtttaaggcacatgagtactggacagtacagacagacttcaaaatacaatcagcagatccttcaaatgccacatgtattccattctgtataaagcatttgaattcaaaaaagctggatcaactttccataccctctcaagaagaagcgcaagctatagaaaagatgattcattcttctacatttgaagttttaggtgttaaaagaagtaaaattcacaagaatcctccattgccatatattacatccagccttcagcaggatgcagcaaacaaactccattttactgcaggatataccatgaagattgcccaaaacctttatgagggtatcaacctttcctcagaagaaacaactgggttaataacgtacataagaactgatgggttccatatttctgatggagctgtggaggacattcgttcactagttaaagaaagatatggtcagaagtacgtttcggaggacattaggaagtatttaaagaaggtgaaaaatgctcaagaagcccatgaagccattaggcccaccagtataaggaggccgccatcatcattggttggaatacttgatgatgattctctaaaactgtacactctaatatggaaaaggacaatggcttgccaaatggaagcttccagaactgagatgcccgacgtcgagcgcggcgaccttcaactctcac

SEQ ID NO: 213644 - DNA, 1941 bp, Zea Mays
gcacacgtacgtacagcgtagcggggagcggaggattagtaaggcgcgtgatggcgctctcagcttgcccggctcaggaagaactgctgcagcctgctgggaggccgttgaggaagcagcttgctgcagccgcgaggagcatcaactggagctattccctcttctggtccatttcaagcactcaacgaccacgggtgctgacgtggacggacgggttctacaatggcgaggtgaagacgcgtaagatctcccactccgtggagctgacagccgaccagctgctcatgcagaggagcgagcagctccgggagctctacgaggccctccagtccggcgagtgcgaccgccgcgcggcgcggccggtgggctcgctgtcgccggaggacctcggggacaccgagtggtactacgtgatctgcatgacctacgccttcctgcctggccaaggcttgcccggcaggagttccgcgagcaacgagcatgtctggctgtgcaacgcgcacctcgccggcagcaaggacttcccccgcgcgctcctggccaaggtgccggaggacccggacttgatcaaccgagcaaccgcagcctttcgggagccgcaatgtccgatatactcggaacagccgagctccaacccgtcagcagacgaaaccggcgaggccgcagacatagctgtgttcgagggcctcgatcacaatgccatggacatggagaccgcaggcatagctgtgttcgagggcctcgatcacaatgccatggacatggagacggtgactgccgccgccgggagacacggaaccggacaggagctaggagaagccgacagcccgtcaaatgcaagcctggagcacatcaccaaggggatcgacgagttctacaacctctgcgaggaaatggacgtgcagccgctagaggatgcctggataatggacgggtctaatttcgaagtcccctcgtcagcgctcccggtggatggctcaagcgcacccgctgatggctctcgcgcgaccagtttcgtggcttggacgaggtcatcgcagtcctgctccggtgaagcggcggctgtgccggtcatcgaagagccgcagaaattgctgaagaaagcggtggccggcggcggtgcttgggcgaacacgaactgcggtggcgggggcacgacggtaacagcccaggaaaacggcgccaagaaccacgtcatgttagagcgaaagcgccgggagaagctcaacgagatgttcctcgttctcaagtcgttggttccctccattcacaaggtggacaaagcatccatcctcgccgaaactatagcctacctaaaggagcttcaacgaagggtacaagaactggaatccaggaggcaaggtggcagtgggtgtgtcagcaagaaagtctgtgtgggctccaactccaagaggaagagcccagagttcgccggtggcgcgaaggagcacccctgggtcctccccatggacggtaccagcaacgtcaccgtcaccgtctctgacagggacgtgctcctggaggtgcaatgcctgtgggagaagctcctgatgacacgggtgttcgacgccatcaagagcctccatttggacgctctctcggttcaggcttcggcactagatggcttcatgaggctcaagataggagctcagtttgcaggctccggcgccgtcgtgcccggaatgatcagccaatctcttcgtaaagctatagggaagcgatgaaagggcgctacatgtgaagcttaattaatggaagcaaacttgtatttcttgtgcaaaagcttactatatatttctgcaaaacctggtgtgccttgttttgattttcagtcgccaattgtgcccttgtttttatcaagtgatgatctacactatatatatggaatatttgaaaagagcgatgtcgtagggtttttttattacaaggaacaagtctttc

SEQ ID NO: 213645 - DNA, 2950 bp, Zea Mays
acttactcctcctccctatctccaccatcctccacctccgcatcgtcgtcctcccctccgggctccggctccgcccccacccacccagccatgttccggaccttcacgaggcttcgggatgcagcggcgccgctagccgcctcggcggtacggcggtgctcaggcgtcagcggccggatccgggccgaggccaattgcccgcgctgcgacgcccacatgtcggtccaattctccctccagcagctcccggcgccccctccggcctccgccggggccattgacggcgcccagcaccacaaccacgacggggcgggcgtgtgcccggcctgccggggcgcgttcctgttccgcgcccagcggatcgacccgctgcggggcgccttcctcgagatccctgccggcgtagcggccggcgacgaggacgcggagagcggagggttcgccgatcggatcaagaggatgttgtcggagcgcccgccggacgagttccccccgctgccgcagtcgcccccgatgcagatgccgcactatccgattcgacggaagccgcggaggagaccgagggaggaaggaggaggaggaggcggcggcggcggtggcggtaacggcaacggtaacggcggggactcgtcctcgggaggggacggcactagcgcttcgcctaagagggagtggtggggtggagccagcctcggcgatgacctgccgacccctcgggagttgtgccggaggcttgatgagttcgtcatcggccaggccaaggcaaaaaaggtgctatctgtagctgtatacaaccattacaagagaatatataatgcaaatgtacagaaagaatttgctggtaattctgggtttcctgatgctggacatgatgatcaaaatattgtagaaatagataaaagcaatgtactcttgatgggcccaactggctcaggaaaaacattgcttgcgaaaacattagcacgtattgtaaatgttccattcgttatagctgatgcgacatcattaacgcaggctggctatgtaggggaggatgtagagtcgatacttcagaaattgcttgtggctgctgagtataatgttcaggctgcacaacaagggatagtgtacatagatgaaatagataaaataacaaagaaggcagagagtgcaaatgttagtagagatgtatctggagaaggtgttcaacaagcattgttgaaaatcctagaaggaactgttgtcagtattcctgagaaaggatcacgcaagaattctcgcaatgacagtatacaggttacatgctctatatggtctttaatgaatacatgtgccatatatcatatgggttaaatttggattcaattgaatgaaaaaggatctttaaaacgttcttttttacgtcataaggactctgtactacagtacatagtgaacagaggaagtattacctcaaaagcatttcttgacacccagataacagcaacacacgctggttgtgttaaaaatgtgcaaggcataaatattgtactccctccgtcttaaaatatataagggatctagagttcaaaaattgtaccaaaatacaagtattctggagcctccctcctttgtctttttagcagcaaatattgagattcctttttaacttggcatcactcaaacagacactcagtacttaaggaaaataacaactgaagtactccctccatcctaattagtgaaggacaaggtggtcttttgccaggattcttatttcgtctggaaatcgcttggataccttgtatttaaggatggagggagtatatgtttgccactttgtatttgcttatatattatgggcatcgtaaatccatagtggtacttcactgttttcagtgcgacaatacagaatcttttgaatcatgatactgcagatagacacgacagatattctttttatatgtggtggtgcttttgtggacttggaaaagactatttctgaaaggcgccaagattcatccataggatttggggcacccattcgtacgaacatgagaagttctggagctagctgtccaatggttacctcatctttattagaatctgttgaaagtggtgatcttgtaagatatggtctaattccggagttcattggtcgtttgcccattctagtaagtttggcagctctgaatgaaggtcagctcgttcaggttctgacagaaccaaagaattcactttccaaacaatacaggaaaatgtttaacctgaacaaagttaagctgcactttactgatggtgcacttagattgttagctaagaaggcgatagctaaaagcactggtgctcgtggtttaagagccatcttggaaactgttcttttggaggccatgtatgaggttccagacgaaaaaacaggaaatgagcgagttgacgctgttgtggtggatgaggaggcgattggttccgttgataggccaggttgtggggctaaaattctccgaggggatggtgcattggaccagtacataacaagaaccaatgtgatgaatttacaggaaactaacgatggtttggccggggagctcgaggaagcgtacatgctgtctagaattgttagcttgtaatttgaaaggctggggaggaagcgtatatgctgagttctgaccaacttcgtacatcgtgtaacatgtctaccccaacacaggccggctactttttgctcacaaaatcacctgtactctgtctccattcctgttaagctctaacgagcagatagatccggggcaccttttccatgtaaacaggagttgccttttgattgagcaaccgtcctgcggagtaaattgttgcccatttttccccgctgcccccaactgggcagctcgattgtggttgacagagttgtaaagatcatcaatttactgatatgatatgataagaaggagcactttcacaaagcacaccagatcaaatgtagctcgattatctg

SEQ ID NO: 213646 - DNA, 2255 bp, Zea Mays
acttactcctcctccctatctccaccatcctccacctccgcatcgtcgtcctcccctccgggctccggctccgcccccacccacccagccatgttccggaccttcacgaggcttcgggatgcagcggcgccgctagccgcctcggcggtacggcggtgctcaggcgtcagcggccggatccgggccgaggccaattgcccgcgctgcgacgcccacatgtcggtccaattctccctccagcagctcccggcgccccctccggcctccgccggggccattgacggcgcccagcaccacaaccacgacggggcgggcgtgtgcccggcctgccggggcgcgttcctgttccgcgcccagcggatcgacccgctgcggggcgccttcctcgagatccctgccggcgtagcggccggcgacgaggacgcggagagcggagggttcgccgatcggatcaagaggatgttgtcggagcgcccgccggacgagttccccccgctgccgcagtcgcccccgatgcagatgccgcactatccgattcgacggaagccgcggaggagaccgagggaggaaggaggaggaggaggcggcggcggcggtggcggtaacggcaacggtaacggcggggactcgtcctcgggaggggacggcactagcgcttcgcctaagagggagtggtggggtggagccagcctcggcgatgacctgccgacccctcgggagttgtgccggaggcttgatgagttcgtcatcggccaggccaaggcaaaaaaggtgctatctgtagctgtatacaaccattacaagagaatatataatgcaaatgtacagaaagaatttgctggtaattctgggtttcctgatgctggacatgatgatcaaaatattgtagaaatagataaaagcaatgtactcttgatgggcccaactggctcaggaaaaacattgcttgcgaaaacattagcacgtattgtaaatgttccattcgttatagctgatgcgacatcattaacgcaggctggctatgtaggggaggatgtagagtcgatacttcagaaattgcttgtggcagagagtgcaaatgttagtagagatgtatctggagaaggtgttcaacaagcattgttgaaaatcctagaaggaactgttgtcagtattcctgagaaaggatcacgcaagaattctcgcaatgacagtatacagatagacacgacagatattctttttatatgtggtggtgcttttgtggacttggaaaagactatttctgaaaggcgccaagattcatccataggatttggggcacccattcgtacgaacatgagaagttctggagctagctgtccaatggttacctcatctttattagaatctgttgaaagtggtgatcttgtaagatatggtctaattccggagttcattggtcgtttgcccattctagtaagtttggcagctctgaatgaaggtcagctcgttcaggttctgacagaaccaaagaattcactttccaaacaatacaggaaaatgtttaacctgaacaaagttaagctgcactttactgatggtgcacttagattgttagctaagaaggcgatagctaaaagcactggtgctcgtggtttaagagccatcttggaaactgttcttttggaggccatgtatgaggttccagacgaaaaaacaggaaatgagcgagttgacgctgttgtggtggatgaggaggcgattggttccgttgataggccaggttgtggggctaaaattctccgaggggatggtgcattggaccagtacataacaagaaccaatgtgatgaatttacaggaaactaacgatggtttggccggggagctcgaggaagcgtacatgctgtctagaattgttagcttgtaatttgaaaggctggggaggaagcgtatatgctgagttctgaccaacttcgtacatcgtgtaacatgtctaccccaacacaggccggctactttttgctcacaaaatcacctgtactctgtctccattcctgttaagctctaacgagcagatagatccggggcaccttttccatgtaaacaggagttgccttttgattgagcaaccgtcctgcggagtaaattgttgcccatttttccccgctgcccccaactgggcagctcgattgtggttgacagagttgtaaagatcatcaatttactgatatgatatgataagaaggagcactttcacaaagcacaccagatcaaatgtagctcgattatctg

SEQ ID NO: 213647 - DNA, 2319 bp, Zea Mays
acttactcctcctccctatctccaccatcctccacctccgcatcgtcgtcctcccctccgggctccggctccgcccccacccacccagccatgttccggaccttcacgaggcttcgggatgcagcggcgccgctagccgcctcggcggtacggcggtgctcaggcgtcagcggccggatccgggccgaggccaattgcccgcgctgcgacgcccacatgtcggtccaattctccctccagcagctcccggcgccccctccggcctccgccggggccattgacggcgcccagcaccacaaccacgacggggcgggcgtgtgcccggcctgccggggcgcgttcctgttccgcgcccagcggatcgacccgctgcggggcgccttcctcgagatccctgccggcgtagcggccggcgacgaggacgcggagagcggagggttcgccgatcggatcaagaggatgttgtcggagcgcccgccggacgagttccccccgctgccgcagtcgcccccgatgcagatgccgcactatccgattcgacggaagccgcggaggagaccgagggaggaaggaggaggaggaggcggcggcggcggtggcggtaacggcaacggtaacggcggggactcgtcctcgggaggggacggcactagcgcttcgcctaagagggagtggtggggtggagccagcctcggcgatgacctgccgacccctcgggagttgtgccggaggcttgatgagttcgtcatcggccaggccaaggcaaaaaaggtgctatctgtagctgtatacaaccattacaagagaatatataatgcaaatatttgctggtaattctgggtttcctgatgctggacatgatgatcaaaatattgtagaaatagataaaagcaatgtactcttgatgggcccaactggctcaggaaaaacattgcttgcgaaaacattagcacgtattgtaaatgttccattcgttatagctgatgcgacatcattaacgcaggctggctatgtaggggaggatgtagagtcgatacttcagaaattgcttgtggctgctgagtataatgttcaggctgcacaacaagggatagtgtacatagatgaaatagataaaataacaaagaaggcagagagtgcaaatgttagtagagatgtatctggagaaggtgttcaacaagcattgttgaaaatcctagaaggaactgttgtcagtattcctgagaaaggatcacgcaagaattctcgcaatgacagtatacagatagacacgacagatattctttttatatgtggtggtgcttttgtggacttggaaaagactatttctgaaaggcgccaagattcatccataggatttggggcacccattcgtacgaacatgagaagttctggagctagctgtccaatggttacctcatctttattagaatctgttgaaagtggtgatcttgtaagatatggtctaattccggagttcattggtcgtttgcccattctagtaagtttggcagctctgaatgaaggtcagctcgttcaggttctgacagaaccaaagaattcactttccaaacaatacaggaaaatgtttaacctgaacaaagttaagctgcactttactgatggtgcacttagattgttagctaagaaggcgatagctaaaagcactggtgctcgtggtttaagagccatcttggaaactgttcttttggaggccatgtatgaggttccagacgaaaaaacaggaaatgagcgagttgacgctgttgtggtggatgaggaggcgattggttccgttgataggccaggttgtggggctaaaattctccgaggggatggtgcattggaccagtacataacaagaaccaatgtgatgaatttacaggaaactaacgatggtttggccggggagctcgaggaagcgtacatgctgtctagaattgttagcttgtaatttgaaaggctggggaggaagcgtatatgctgagttctgaccaacttcgtacatcgtgtaacatgtctaccccaacacaggccggctactttttgctcacaaaatcacctgtactctgtctccattcctgttaagctctaacgagcagatagatccggggcaccttttccatgtaaacaggagttgccttttgattgagcaaccgtcctgcggagtaaattgttgcccatttttccccgctgcccccaactgggcagctcgattgtggttgacagagttgtaaagatcatcaatttactgatatgatatgataagaaggagcactttcacaaagcacaccagatcaaatgtagctcgattatctg

SEQ ID NO: 213648 - DNA, 2939 bp, Zea Mays
acttactcctcctccctatctccaccatcctccacctccgcatcgtcgtcctcccctccgggctccggctccgcccccacccacccagccatgttccggaccttcacgaggcttcgggatgcagcggcgccgctagccgcctcggcggtacggcggtgctcaggcgtcagcggccggatccgggccgaggccaattgcccgcgctgcgacgcccacatgtcggtccaattctccctccagcagctcccggcgccccctccggcctccgccggggccattgacggcgcccagcaccacaaccacgacggggcgggcgtgtgcccggcctgccggggcgcgttcctgttccgcgcccagcggatcgacccgctgcggggcgccttcctcgagatccctgccggcgtagcggccggcgacgaggacgcggagagcggagggttcgccgatcggatcaagaggatgttgtcggagcgcccgccggacgagttccccccgctgccgcagtcgcccccgatgcagatgccgcactatccgattcgacggaagccgcggaggagaccgagggaggaaggaggaggaggaggcggcggcggcggtggcggtaacggcaacggtaacggcggggactcgtcctcgggaggggacggcactagcgcttcgcctaagagggagtggtggggtggagccagcctcggcgatgacctgccgacccctcgggagttgtgccggaggcttgatgagttcgtcatcggccaggccaaggcaaaaaaggtgctatctgtagctgtatacaaccattacaagagaatatataatgcaaatatttgctggtaattctgggtttcctgatgctggacatgatgatcaaaatattgtagaaatagataaaagcaatgtactcttgatgggcccaactggctcaggaaaaacattgcttgcgaaaacattagcacgtattgtaaatgttccattcgttatagctgatgcgacatcattaacgcaggctggctatgtaggggaggatgtagagtcgatacttcagaaattgcttgtggctgctgagtataatgttcaggctgcacaacaagggatagtgtacatagatgaaatagataaaataacaaagaaggcagagagtgcaaatgttagtagagatgtatctggagaaggtgttcaacaagcattgttgaaaatcctagaaggaactgttgtcagtattcctgagaaaggatcacgcaagaattctcgcaatgacagtatacaggttacatgctctatatggtctttaatgaatacatgtgccatatatcatatgggttaaatttggattcaattgaatgaaaaaggatctttaaaacgttcttttttacgtcataaggactctgtactacagtacatagtgaacagaggaagtattacctcaaaagcatttcttgacacccagataacagcaacacacgctggttgtgttaaaaatgtgcaaggcataaatattgtactccctccgtcttaaaatatataagggatctagagttcaaaaattgtaccaaaatacaagtattctggagcctccctcctttgtctttttagcagcaaatattgagattcctttttaacttggcatcactcaaacagacactcagtacttaaggaaaataacaactgaagtactccctccatcctaattagtgaaggacaaggtggtcttttgccaggattcttatttcgtctggaaatcgcttggataccttgtatttaaggatggagggagtatatgtttgccactttgtatttgcttatatattatgggcatcgtaaatccatagtggtacttcactgttttcagtgcgacaatacagaatcttttgaatcatgatactgcagatagacacgacagatattctttttatatgtggtggtgcttttgtggacttggaaaagactatttctgaaaggcgccaagattcatccataggatttggggcacccattcgtacgaacatgagaagttctggagctagctgtccaatggttacctcatctttattagaatctgttgaaagtggtgatcttgtaagatatggtctaattccggagttcattggtcgtttgcccattctagtaagtttggcagctctgaatgaaggtcagctcgttcaggttctgacagaaccaaagaattcactttccaaacaatacaggaaaatgtttaacctgaacaaagttaagctgcactttactgatggtgcacttagattgttagctaagaaggcgatagctaaaagcactggtgctcgtggtttaagagccatcttggaaactgttcttttggaggccatgtatgaggttccagacgaaaaaacaggaaatgagcgagttgacgctgttgtggtggatgaggaggcgattggttccgttgataggccaggttgtggggctaaaattctccgaggggatggtgcattggaccagtacataacaagaaccaatgtgatgaatttacaggaaactaacgatggtttggccggggagctcgaggaagcgtacatgctgtctagaattgttagcttgtaatttgaaaggctggggaggaagcgtatatgctgagttctgaccaacttcgtacatcgtgtaacatgtctaccccaacacaggccggctactttttgctcacaaaatcacctgtactctgtctccattcctgttaagctctaacgagcagatagatccggggcaccttttccatgtaaacaggagttgccttttgattgagcaaccgtcctgcggagtaaattgttgcccatttttccccgctgcccccaactgggcagctcgattgtggttgacagagttgtaaagatcatcaatttactgatatgatatgataagaaggagcactttcacaaagcacaccagatcaaatgtagctcgattatctg

SEQ ID NO: 213649 - DNA, 2936 bp, Zea Mays
acttactcctcctccctatctccaccatcctccacctccgcatcgtcgtcctcccctccgggctccggctccgcccccacccacccagccatgttccggaccttcacgaggcttcgggatgcagcggcgccgctagccgcctcggcggtacggcggtgctcaggcgtcagcggccggatccgggccgaggccaattgcccgcgctgcgacgcccacatgtcggtccaattctccctccagcagctcccggcgccccctccggcctccgccggggccattgacggcgcccagcaccacaaccacgacggggcgggcgtgtgcccggcctgccggggcgcgttcctgttccgcgcccagcggatcgacccgctgcggggcgccttcctcgagatccctgccggcgtagcggccggcgacgaggacgcggagagcggagggttcgccgatcggatcaagaggatgttgtcggagcgcccgccggacgagttccccccgctgccgcagtcgcccccgatgcagatgccgcactatccgattcgacggaagccgcggaggagaccgagggaggaaggaggaggaggaggcggcggcggcggtggcggtaacggcaacggtaacggcggggactcgtcctcgggaggggacggcactagcgcttcgcctaagagggagtggtggggtggagccagcctcggcgatgacctgccgacccctcgggagttgtgccggaggcttgatgagttcgtcatcggccaggccaaggcaaaaaaggtgctatctgtagctgtatacaaccattacaagagaatatataatgcaaatgtacagaaagaatttgctggtaattctgggtttcctgatgctggacatgatgatcaaaatattgtagaaatagataaaagcaatgtactcttgatgggcccaactggctcaggaaaaacattgcttgcgaaaacattagcacgtattgtaaatgttccattcgttatagctgatgcgacatcattaacgcaggctggctatgtaggggaggatgtagagtcgatacttcagaaattgcttgtggctgctgagtataatgttcaggctgcacaacaagggatagtgtacatagatgaaatagataaaataacaaagaaggcagagagtgcaaatgttagtagagatgtatctggagaaggtgttcaacaagcattgttgaaaatcctagaaggaactgttgtcagtattcctgagaaaggatcacgcaagaattctcgcaatgacagtatacaggttacatgctctatatggtctttaatgaatacatgtgccatatatcatatgggttaaatttggattcaattgaatgaaaaaggatctttaaaacgttcttttttacgtcataaggactctgtactacagtacatagtgaacagaggaagtattacctcaaaagcatttcttgacacccagataacagcaacacacgctggttgtgttaaaaatgtgcaaggcataaatattgtactccctccgtcttaaaatatataagggatctagagttcaaaaattgtaccaaaatacaagtattctggagcctccctcctttgtctttttagcagcaaatattgagattcctttttaacttggcatcactcaaacagacactcagtacttaaggaaaataacaactgaagtactccctccatcctaattagtgaaggacaaggtggtcttttgccaggattcttatttcgtctggaaatcgcttggataccttgtatttaaggatggagggagtatatgtttgccactttgtatttgcttatatattatgggcatcgtaaatccatagtggtacttcactgttttcagtgcgacaatacagaatcttttgaatcatgatactgcagatagacacgacagatattctttttatatgtggtggtgcttttgtggacttggaaaagactatttctgaaaggcgccaagattcatccataggatttggggcacccattcgtacgaacatgagaagttctggagctagctgtccaatggttacctcatctttattagaatctgttgaaagtggtgatcttgtaagatatggtctaattccggagttcattggtcgtttgcccattctagtaagtttggcagctctgaatgaaggttctgacagaaccaaagaattcactttccaaacaatacaggaaaatgtttaacctgaacaaagttaagctgcactttactgatggtgcacttagattgttagctaagaaggcgatagctaaaagcactggtgctcgtggtttaagagccatcttggaaactgttcttttggaggccatgtatgaggttccagacgaaaaaacaggaaatgagcgagttgacgctgttgtggtggatgaggaggcgattggttccgttgataggccaggttgtggggctaaaattctccgaggggatggtgcattggaccagtacataacaagaaccaatgtgatgaatttacaggaaactaacgatggtttggccggggagctcgaggaagcgtacatgctgtctagaattgttagcttgtaatttgaaaggctggggaggaagcgtatatgctgagttctgaccaacttcgtacatcgtgtaacatgtctaccccaacacaggccggctactttttgctcacaaaatcacctgtactctgtctccattcctgttaagctctaacgagcagatagatccggggcaccttttccatgtaaacaggagttgccttttgattgagcaaccgtcctgcggagtaaattgttgcccatttttccccgctgcccccaactgggcagctcgattgtggttgacagagttgtaaagatcatcaatttactgatatgatatgataagaaggagcactttcacaaagcacaccagatcaaatgtagctcgattatctg

SEQ ID NO: 213650 - DNA, 2907 bp, Zea Mays
acttactcctcctccctatctccaccatcctccacctccgcatcgtcgtcctcccctccgggctccggctccgcccccacccacccagccatgttccggaccttcacgaggcttcgggatgcagcggcgccgctagccgcctcggcggtacggcggtgctcaggcgtcagcggccggatccgggccgaggccaattgcccgcgctgcgacgcccacatgtcggtccaattctccctccagcagctcccggcgccccctccggcctccgccggggccattgacggcgcccagcaccacaaccacgacggggcgggcgtgtgcccggcctgccggggcgcgttcctgttccgcgcccagcggatcgacccgctgcggggcgccttcctcgagatccctgccggcgtagcggccggcgacgaggacgcggagagcggagggttcgccgatcggatcaagaggatgttgtcggagcgcccgccggacgagttccccccgctgccgcagtcgcccccgatgcagatgccgcactatccgattcgacggaagccgcggaggagaccgagggaggaaggaggaggaggaggcggcggcggcggtggcggtaacggcaacggtaacggcggggactcgtcctcgggaggggacggcactagcgcttcgcctaagagggagtggtggggtggagccagcctcggcgatgacctgccgacccctcgggagttgtgccggaggcttgatgagttcgtcatcggccaggccaaggcaaaaaaggtgctatctgtagctgtatacaaccattacaagagaatatataatgcaaatgtacagaaagaatttgctggtaattctgggtttcctgatgctggacatgatgatcaaaatattgtagaaatagataaaagcaatgtactcttgatgggcccaactggctcaggaaaaacattgcttgcgaaaacattagcacgtattgtaaatgttccattcgttatagctgatgcgacatcattaacgcaggctggctatgtaggggaggatgtagagtcgatacttcagaaattgcttgtggctgctgagtataatgttcaggctgcacaacaagggatagtgtacatagatgaaatagataaaataacaaagaagagagtgcaaatgttagtagagatgtatctggagaaggtgttcaacaagcattgttgaaaatcctagaaggaactgttgtcagtattcctgagaaaggatcacgcaagaattctcgcaatgacagtatacaggttacatgctctatatggtctttaatgaatacatgtgccatatatcatatgggttaaatttggattcaattgaatgaaaaaggatctttaaaacgttcttttttacgtcataaggactctgtactacagtacatagtgaacagaggaagtattacctcaaaagcatttcttgacacccagataacagcaacacacgctggttgtgttaaaaatgtgcaaggcataaatattgtactccctccgtcttaaaatatataagggatctagagttcaaaaattgtaccaaaatacaagtattctggagcctccctcctttgtctttttagcagcaaatattgagattcctttttaacttggcatcactcaaacagacactcagtacttaaggaaaataacaactgaagtactccctccatcctaattagtgaaggacaaggtggtcttttgccaggattcttatttcgtctggaaatcgcttggataccttgtatttaaggatggagggagtatatgtttgccactttgtatttgcttatatattatgggcatcgtaaatccatagtggtacttcactgttttcagtgcgacaatacagaatcttttgaatcatgatactgcagatagacacgacagatattctttttatatgtggtggtgcttttgtggacttggaaaagactatttctgaaaggcgccaagattcatccataggatttggggcacccattcgtacgaacatgagaagttctggagctagctgtccaatggttacctcatctttattagaatctgttgaaagtggtgatcttgtaagatatggtctaattccggagttcattggtcgtttgcccattctagttctgacagaaccaaagaattcactttccaaacaatacaggaaaatgtttaacctgaacaaagttaagctgcactttactgatggtgcacttagattgttagctaagaaggcgatagctaaaagcactggtgctcgtggtttaagagccatcttggaaactgttcttttggaggccatgtatgaggttccagacgaaaaaacaggaaatgagcgagttgacgctgttgtggtggatgaggaggcgattggttccgttgataggccaggttgtggggctaaaattctccgaggggatggtgcattggaccagtacataacaagaaccaatgtgatgaatttacaggaaactaacgatggtttggccggggagctcgaggaagcgtacatgctgtctagaattgttagcttgtaatttgaaaggctggggaggaagcgtatatgctgagttctgaccaacttcgtacatcgtgtaacatgtctaccccaacacaggccggctactttttgctcacaaaatcacctgtactctgtctccattcctgttaagctctaacgagcagatagatccggggcaccttttccatgtaaacaggagttgccttttgattgagcaaccgtcctgcggagtaaattgttgcccatttttccccgctgcccccaactgggcagctcgattgtggttgacagagttgtaaagatcatcaatttactgatatgatatgataagaaggagcactttcacaaagcacaccagatcaaatgtagctcgattatctg

SEQ ID NO: 213651 - DNA, 2326 bp, Zea Mays
acttactcctcctccctatctccaccatcctccacctccgcatcgtcgtcctcccctccgggctccggctccgcccccacccacccagccatgttccggaccttcacgaggcttcgggatgcagcggcgccgctagccgcctcggcggtacggcggtgctcaggcgtcagcggccggatccgggccgaggccaattgcccgcgctgcgacgcccacatgtcggtccaattctccctccagcagctcccggcgccccctccggcctccgccggggccattgacggcgcccagcaccacaaccacgacggggcgggcgtgtgcccggcctgccggggcgcgttcctgttccgcgcccagcggatcgacccgctgcggggcgccttcctcgagatccctgccggcgtagcggccggcgacgaggacgcggagagcggagggttcgccgatcggatcaagaggatgttgtcggagcgcccgccggacgagttccccccgctgccgcagtcgcccccgatgcagatgccgcactatccgattcgacggaagccgcggaggagaccgagggaggaaggaggaggaggaggcggcggcggcggtggcggtaacggcaacggtaacggcggggactcgtcctcgggaggggacggcactagcgcttcgcctaagagggagtggtggggtggagccagcctcggcgatgacctgccgacccctcgggagttgtgccggaggcttgatgagttcgtcatcggccaggccaaggcaaaaaaggtgctatctgtagctgtatacaaccattacaagagaatatataatgcaaatgtacagaaagaatttgctggtaattctgggtttcctgatgctggacatgatgatcaaaatattgtagaaatagataaaagcaatgtactcttgatgggcccaactggctcaggaaaaacattgcttgcgaaaacattagcacgtattgtaaatgttccattcgttatagctgatgcgacatcattaacgcaggctggctatgtaggggaggatgtagagtcgatacttcagaaattgcttgtggctgctgagtataatgttcaggctgcacaacaagggatagtgtacatagatgaaatagataaaataacaaagaagagagtgcaaatgttagtagagatgtatctggagaaggtgttcaacaagcattgttgaaaatcctagaaggaactgttgtcagtattcctgagaaaggatcacgcaagaattctcgcaatgacagtatacagatagacacgacagatattctttttatatgtggtggtgcttttgtggacttggaaaagactatttctgaaaggcgccaagattcatccataggatttggggcacccattcgtacgaacatgagaagttctggagctagctgtccaatggttacctcatctttattagaatctgttgaaagtggtgatcttgtaagatatggtctaattccggagttcattggtcgtttgcccattctagtaagtttggcagctctgaatgaaggtcagctcgttcaggttctgacagaaccaaagaattcactttccaaacaatacaggaaaatgtttaacctgaacaaagttaagctgcactttactgatggtgcacttagattgttagctaagaaggcgatagctaaaagcactggtgctcgtggtttaagagccatcttggaaactgttcttttggaggccatgtatgaggttccagacgaaaaaacaggaaatgagcgagttgacgctgttgtggtggatgaggaggcgattggttccgttgataggccaggttgtggggctaaaattctccgaggggatggtgcattggaccagtacataacaagaaccaatgtgatgaatttacaggaaactaacgatggtttggccggggagctcgaggaagcgtacatgctgtctagaattgttagcttgtaatttgaaaggctggggaggaagcgtatatgctgagttctgaccaacttcgtacatcgtgtaacatgtctaccccaacacaggccggctactttttgctcacaaaatcacctgtactctgtctccattcctgttaagctctaacgagcagatagatccggggcaccttttccatgtaaacaggagttgccttttgattgagcaaccgtcctgcggagtaaattgttgcccatttttccccgctgcccccaactgggcagctcgattgtggttgacagagttgtaaagatcatcaatttactgatatgatatgataagaaggagcactttcacaaagcacaccagatcaaatgtagctcgattatctg

SEQ ID NO: 213652 - DNA, 1417 bp, Zea Mays
aaattcgcctgctcccactagttcatggggctgtttcgtcaggttgtaggaaccccaaactatatgtgcccagaaatactagcagacataccttatggatacaaatccgatatatggtcacttggttgctgtatgtttgagattttagcacaccgacctgcatttaaagctacagacatggcagcattagtcaacaaaataaacagatcttcaatatctccaatgcccccaatatactcatcagcactgaagcagatcgtgaagagcatgctaaggaaaaatccagaacataggcctactgctggggagctgctgaggcatccacatctgcaaccatatctttctgaatcgtccaactgttcaccgatctatcttccggtgaaacccaccaaaggtaacctggtagacaagcagtcaaagaagccaagcagtggcagaaagcgagctgtcaaagccaatggatccaatggaacattagaaactgcagcagagcacgctgtggaagcaagagacagctccacaaacttctcagatgtatcaactataggtacccaggaagccttgatattgcaaatgccggtggatcctgatgccggaagcaaagaagagcagaacgttgatgttgtaccgtttcagcatgcggcagagaatctgatggcgacaaccgatagacaggtcgatgcgaccatacgtcttaaagccataagaaccagtaacgcaaaagaggcggccccggtcacagttgcagaccaaaagttcaacgaggcgccaataccaaatgaggaactgacaatcggggtagtgcaggaacaaaggaaggacgtgaagccacgctcttaccaggcaggaaaaccagagatgtgtgacacaaccgtaacggaggaatcgtcgcccatcagcacgctaaagctggcgcacacggagagcgcgcccgcggagtgggaccacctgaacatagtccagcagagggccgacgcgctggagtcgctcctggagctctgcgcgaagctcctggagcaggagaggctcgacgagctcgcgggcgttctccggccgttcggcgagggcgccgtgtcgtctagggagacggcgatctggctgaccaagagcctgatgacccccccacccaagttcggagagtccccgacgaagcttttgtaaaacagtgattcgtttgagagtttttgtttttttttcgagtgccattttcgagagtgtacatagcatcaacagaatttgagttcaagattgctgtgcttacctaggcctgagctttatttatcttggatgtatatggtttgcatggcaccgactgttgtgagcgatgactggttatttaccagccgccttgttttatttattgtgctggaaatcatgccgagtccatttctgtttactgagtactagtagtactttc

SEQ ID NO: 213653 - DNA, 697 bp, Zea Mays
ctccgtctctcatccagtccatggcgagattggccctacagctgtcatggtgctccatggcgtggcggtgtcctttctccttccatctttccggtgacgagcaagggatggtctatggctgcacatgggtatgaggcagcagggtggtctgcagcagcacaaatgcacatggacacagctatggggaggggaagtgggagcgttgttgcctgtggttgggacgttactacagtttagtcctgacgagctcaagaagtgccagcaaggtgtcctttcgagtgtggtctcttcacaagctactgcagtgtcagatggcacaaccacacagaattcgttctttgcaagattctcgttctgaggcattgccctcgaagatcagcagtttagctgggggagaggatgtcctgagccttcagattcacagttttgttgaccgtagaaaacgtttattcatttattagttacaagcgtccttacccccccccccccccccctctccttttgtaaaagtagtgcatatagcaggattaagataaacacatgtaatggagtatatattgtgcaactgccatatattatatgatatatagcggctcatattaggttgccgaatgtagaagggaatggtttttacactttttttttctcgaacgcgcatgagaactgcgcccaattatatattaagcagaggaataga

SEQ ID NO: 213654 - DNA, 1579 bp, Zea Mays
cacgacggcagcacgcgggaagcagctgtggcctcggtcatcccatccaacgggcgaaaatgagagagatcttgcacatccagggagggcaatgtggcaaccagatcggtgccaagttctgggaggtcgtgtgtgacgaacacggcattgacactacaggtcggtacactggcacttctgaccttcagttggagcgcgtcaatgtctactacaatgaggcctcctgtggccgctttgtgccccgtgctgttctcatggacctagagcctgggacaatggacagtgtccgcactggaccctatgggcagatcttccgccctgacaactttgtgtttgggcaatctggtgctggcaacaactgggcgaaggggcattatactgagggcgctgagctcattgactctgttctcgatgttgtgaggaaggaagccgagaactgtgactgcttgcaaggattccaagtatgccactcccttggtggcggtactggatctggtatgggtacgctgttgatctcaaagatcagggaggagtaccctgaccgcatgatgctgacattctcagttttcccctcaccgaaagtatctgatactgtggttgagccatacaacgccactctttctgtccaccagttggttgagaacgctgatgagtgtatggttcttgacaacgaggccctctacgacatttgcttcaggactcttaagttgaccacccctagctttggtgatttgaaccatttgatctctgcaaccatgagtggagtcacctgctgcctaaggttccctggtcagctgaactccgacctcaggaagctggcagtgaacctaatccccttcccccgcctccacttcttcatggttggcttcgcgccgctgacgtcccgtggctcccagcagtaccgagcactcaccgtccccgagctcacgcagcagatgtgggacgccaagaacatgatgtgcgccgctgaccctcgccacgggcgttacctcaccgcctcggccatgttccgcgggaagatgagcaccaaggaggtcgacgagcagatgatcaacgtgcagaacaagaactcgtcctacttcgtggagtggatccccaacaacgtgaagtccagcgtgtgtgacatcccgccgaggggcctgtccatggcgtccaccttcgtcggcaactcaacttccatccaggagatgttccggagggtgagcgagcagttcactgccatgttcaggaggaaggctttcttgcactggtacacgggcgagggcatggacgagatggagttcaccgaggccgagagcaatatgaatgacctcgtgtcggagtaccagcagtaccaggatgcgactgctgatgacgatgaggaggccgagtatgaggacgaggaggagccagctgatggcatgtgaggggaggctgttaaatgtgaagcctggtgatgtcccctttcgtgttgtcgccatgttatactagtacactagcataccaccctcgtggcccattccgtcgatcgtggctgttgatgcttgtgtttccttgttctatagaaccttgcttttgtcaaaaaaaattattaaaaaaa

SEQ ID NO: 213655 - DNA, 5864 bp, Zea Mays
ccagcacacaatttttattccataagttccaagagtctgtatggggaaggcaagaaagaaaatacaaaaggaaaaaaaaaaatagtcgtcttcttcctcgtgaaggacggtctaggtgagattgtcctcttgtcgagatcctcacgtcccggtcctcaccaccggtggcgacggggtgtgacagttggtaccagagacggtgtatcctcggcgtggggggcgacggacggccaccagctcttctctgcgctagctatcggggtggcgacgacgattgttggcgcgtcgacggcggatccagcggtccggcgtggtgacctcattgatccggcgcgacctacctccttcagctaacggtggcgctccagcggcccttggctcgagttccgttttgttccgcgatggcttccctttcccccggcaactccttcatcgaggcggtgtcgacggcggtggttgcggcggatttggcggtgctgggctgacgggaggtctcgatttggcggtgctggtggcggcgactccatcaagttgcctgtgtgctccctcaactttcttcctcagatccccttcggcaggcggcgtgcccacgacgccactgtttgggatatctggtgacgagtgctctcagtcacggcactggtgacgggttccctttctctgagactccaaccactggcggcaacacgggatttggtgcgtgtgtgcggcagctacgggagattgtggagctcgagtggctctgcatcccgctcgtagcgctcagatcgtgattggctgctttcatcctctacaatcactagttgagcagattttgggtgagcgcggtgttaatttgttgatgctaaggcaagccagtaacctggcacacaacatgttcgatgatatgtcatttacagaggtggtctgggatgatgaaggggcactattcgatgaaatgcattgcacggatgtcatctgggatgaggagacacatcatggctttgactcacatggcctattgcagcaccatgctgaagcaatggataaccagatgcagggcaaggagaaattggctcaaagtggagattactatgatgagaggaaagtcaatattgaaccagacatcaacaacttgctcattcatgtcaatgaccatttctctatgttggtgattggtgcggattctaggcgaagtgatgttgtgtgggacgaggacatgttatctgacctcgatactcatggtggcttattacagttactggcatgttgtaaagatgatgagctcaaccaggacagagacactccttttctcttgggccttggtatggatcaggtggatgagatgctggccagcccgtccagccttggcatgaatgaggacttgccatctgtacctgagacacatggctcgttattgcagcaagtggcatgggacaggaagcactttgcttatgaaatgtgcacgcttattgctgagatggtcctggaagatgttctcaccgatgttggcaacctcgctttcagcattgattcaagcatgcagatcagtgatcaaccttccaaatatgcgctagtcatcgatgcttatctgctgaagacgcagtacaaaaaaccatacatttctataagccaatgggatccaggaatttggtgcaaaggtactatggcccatgagcagcaacagcttgagatatataggatgtttgagaaacaatgggattcagttatccttaaatggttcaggaatccttttgtgctgctgcaatcatgcaatggggaggatctgaatgaacaaggcacagtgcctgtaaatgacattttcgatgtattggctgctggccaggagttgaattttggcaacgtcaccttgatcatttatgggggatgccaaggagcaatgggtctgcaggttctttttgcagaattacacccttggcaccacaatgtctttacctccatagaattagcaatacagtcatggagaatcaatggtttcagtccaggaagctgcaagctcaacagacaatctatacttgttgctactaacttgcagttcaattataaagcttccaagtttgtatcctttactgatacttatcagatatacaagaacacatgcatttgtatcggagaattggaacctgctagttggagagatacttgttggctacctgagatctcacatgccaatgtgtccacacttgctagtgaggaaatagataacatgcttttccaggttggtgattttcatccaggagagagtgagcagcttgagctttacatgataacattgatacagtgggatctaggtccagtagaattttacaaatcaaactgtaggtgccctgctgcagaactgatagggtggtgctgattctagtttgttcatacaatctgtttatgttatgctgaaagctagtttcttctttatcatgaggtactacttggcccaacagtcatggaatttctgggatctttagtcaccaagatacaattcatggtcatgcggttgtttggggacaagcaaccatttgtgggggtggaaaggatatatggcaacacaggttaaagtcgtgttttaaaatggaaatgcatgctacagtcctgggtgtcaatgatgtattgcagcatatcagtgcttgttctctattcctgcagcttggtcgcagaaaactatatagggtggtgatgacttctgttctaaggcccagagatttgctgctgaagagctatacaacattcttgaccaagtcgatgaactattgttgcttcctgaccaaaagctcgggagaccatggtgtgacactgatctaatatgtgaaccgattctgtcttggagactcaatggtggcagcccaagcaaatgtttgttgcaactcaagacatacatagtcagacagtgggatccaggaatttctgggatctttagtcatcgagatacaattcaaggtcatgcggttgcttggggacaagcaacattttgtgagggtggaaatgtaacatccatgaatagcaacatgtccagggctttagctgacaagcgggccacccacccatgggacccaggtggaagaccagatgctgggtataagttccaagagtctgtatgggggaaggcaagaaagaaaatacaaaaaaatagtcgtcttcttcctcgtgaaggacggtctaggtgagattgtcctcttgtcgagatcctcacgtcccggtcctcaccacgggtggccacggggtgtgacatgatactaggagatgtaacggagcaaagaattctgagaggagccaaagatgaggataagggatactgaagatcctcgtcgagctggacaaggatctcaagtctgctctgtgcgatttggaagacgtcctggatgttattgaatatcgctgaatcgagaagaaagtcatcggtggtgacaaaaagttgatcagcactactatttgcatctgggcgctgcaagctattggcgattggatcacctactggaagcgtagctcgttcgggcaaaagctgttgcagtgcgcgcgcccagaaccagtatcagaagctcagggaccttggagagaagctgcagaagtgcgctcaggatctggatctgaagttttgggaccttgtagctaagctacagcagtgcgcccagaacctgaatcacatgttctgggactttcaagctaagttcttgcagtgcacccaaagcctgccactgtatatccatcagggagcagctgggcaaccaccaatgcggcaatgcctgattcacccgccgcaagatccactgcagaattcagggatgacattgaacaaggaccatcgacgcctgatgatgcaccctcgaatccaccgtcgcctaatgccctcccgaatgctgctggctccaccactggcaatcaacacggatcagctgaggaggcaccgacgcctgatgcaccctcgaattccctggtgcagatgatctgcgactgattggtctatgggtttacagcactccgttctttttatttggctgcgcgtcatcttcgggactggtcatatgaaccgattggcatcaaagaatgatggtggtactgcaacagattgggaccttcctactaatgagataatcagcttgaggaaaaggataaagaacatagaatatattgtcagtgagacaaataaatcacctctgtcgaaacatagtagcagcagcacaaagaatgaaattgatgacaaggaaagcagcagcaccaagaacagcggcaatgtaaggagcaccaaacagaaggaaattgactacgtatacagaagcattgaaaagaaagttaaagttttcggtcgagacaaggtccatgaagatataaggtgcttcataatggaccggctaccgatgcaccaagctccgactccagtaaaccttattctgtgattggcatatatggaattacaggttctgggaagactactctggcacaatatgtttgtgagtatgagaagggtgaggtttcaatcctatcatgttcatccatgtgggaactacattcagtgccggtgaaatattttgtgatatgctggaccagatcacgcaacagcggccctctgatgccaacggtcctaaaagcctaaaaacagagttaaaagatctaacactacagcaaacgccaaaatatacagctactcttgttgactgtccaaattcaaaatacacagcttataagcaaggctgtatatgtttgctactaactcatacctataggcagctaagaccggtgttatgccaagtgacattgaagtgtacatagctgaccataagggaccagacccttccaaacctgaggagttgtgcagtcaggcttgcacagatcggctggcagaatatggtcaagaaatggtgaggcgccatgaaaaggactacgaccggagaaaagcaccaatcgatcccatggtggtgtatgctactggaggcagaaagagtcatgggcggtactccatgtttaatggagtgattgactccagagaggttagatctcagaggtcggggtcttcctccgaacgatcaggggctagaactcatcgccaatcagagcatgagttggaggttgcaagggtgcaagaggagataaggcaacgtgatgcattccaaaggcacaacatgagtactttgcctcattcttggcgcagcagcagaccgtgcttcaagcaactttccaacagcaggggataaacgtagtccttccacaatttcaacctccaccactgccaccaatatggggatcgggtacccaataccttctgcaagtcaaggatcggcggcacaagggccccagatttaccatactccacctgcatagatactagcacctggagaccagttctacggccgatgctggaactacatttgtaaatgcaatcttcggtccaccctctggaggcagcggccaaaactccaatcatctgagaggtggcttgtcacactcggatttaagggcaaactcgggcgcatctcaaatgtgtgctaggatcaagtctcacacatatgatggctcatggtacagaaatcaatgtcatatctttattaaataatcggagtttttttacaaaataactaaatacaatacaccatatggcgacgagatcctccaccaacaaagttgactgggagacgacggcatagatctctccgaactcatcgtaacatccttcatgctctttatcttgcagtacctgtctttgacctggtgtgattatagcaagggtgagctcccatacggtcatcgctcagcaagtgtgggaaataatgtgtatgagctcacttacggtgggagctcatgtgtagtgtaaggctgatcaacaaataatggttaaggctgagcattgcttttaataagttggtcaaaattttattagc

SEQ ID NO: 213656 - DNA, 4778 bp, Zea Mays
tatggggaaggcaagaaagaaaatacaaaaggaaaaaaaaaaatagtcgtcttcttcctcgtgaaggacggtctaggtgagattgtcctcttgtcgagatcctcacgtcccggtcctcaccaccggtggcgacggggtgtgacagttggtaccagagacggtgtatcctcggcgtggggggcgacggacggccaccagctcttctctgcgctagctatcggggtggcgacgacgattgttggcgcgtcgacggcggatccagcggtccggcgtggtgacctcattgatccggcgcgacctacctccttcagctaacggtggcgctccagcggcccttggctcgagttccgttttgttccgcgatggcttccctttcccccggcaactccttcatcgaggcggtgtcgacggcggtggttgcggcggatttggcggtgctgggctgacgggaggtctcgatttggcggtgctggtggcggcgactccatcaagttgcctgtgtgctccctcaactttcttcctcagatccccttcggcaggcggcgtgcccacgacgccactgtttgggatatctggtgacgagtgctctcagtcacggcactggtgacgggttccctttctctgagactccaaccactggcggcaacacgggatttggtgcgtgtgtgcggcagctacgggagattgtggagctcgagtggctctgcatcccgctcgtagcgctcagatcgtgattggctgctttcatcctctacaatcactagttgagcagattttgggtgagcgcggtgttaatttgttgatgctaaggcaagccagtaacctggcacacaacatgttcgatgatatgtcatttacagaggtggtctgggatgatgaaggggcactattcgatgaaatgcattgcacggatgtcatctgggatgaggagacacatcatggctttgactcacatggcctattgcagcaccatgctgaagcaatggataaccagatgcagggcaaggagaaattggctcaaagtggagattactatgatgagaggaaagtcaatattgaaccagacatcaacaacttgctcattcatgtcaatgaccatttctctatgttggtgattggtgcggattctaggcgaagtgatgttgtgtgggacgaggacatgttatctgacctcgatactcatggtggcttattacagttactggcatgttgtaaagatgatgagctcaaccaggacagagacactccttttctcttgggccttggtatggatcaggtggatgagatgctggccagcccgtccagccttggcatgaatgaggacttgccatctgtacctgagacacatggctcgttattgcagcaagtggcatgggacaggaagcactttgcttatgaaatgtgcacgcttattgctgagatggtcctggaagatgttctcaccgatgttggcaacctcgctttcagcattgattcaagcatgcagatcagtgatcaaccttccaaatatgcgctagtcatcgatgcttatctgctgaagacgcagtacaaaaaaccatacatttctataagccaatgggatccaggaatttggtgcaaaggtactatggcccatgagcagcaacagcttgagatatataggatgtttgagaaacaatgggattcagttatccttaaatggttcaggaatccttttgtgctgctgcaatcatgcaatggggaggatctgaatgaacaaggcacagtgcctgtaaatgacattttcgatgtattggctgctggccaggagttgaattttggcaacgtcaccttgatcatttatgggggatgccaaggagcaatgggtctgcaggttctttttgcagaattacacccttggcaccacaatgtctttacctccatagaattagcaatacagtcatggagaatcaatggtttcagtccaggaagctgcaagctcaacagacaatctatacttgttgctactaacttgcagttcaattataaagcttccaagtttgtatcctttactgatacttatcagatatacaagaacacatgcatttgtatcggagaattggaacctgctagttggagagatacttgttggctacctgagatctcacatgccaatgtgtccacacttgctagtgaggaaatagataacatgcttttccaggttggtgattttcatccaggagagagtgagcagcttgagctttacatgataacattgatacagtgggatctaggtccagtagaattttacaaatcaaactgtaggtgccctgctgcagaactgatagggtggtgctgattctagtttgttcatacaatctgtttatgttatgctgaaagctagtttcttctttatcatgaggtactacttggcccaacagtcatggaatttctgggatctttagtcaccaagatacaattcatggtcatgcggttgtttggggacaagcaaccatttgtgggggtggaaaggatatatggcaacacaggttaaagtcgtgttttaaaatggaaatgcatgctacagtcctgggtgtcaatgatgtattgcagcatatcagtgcttgttctctattcctgcagcttggtcgcagaaaactatatagggtggtgatgacttctgttctaaggcccagagatttgctgctgaagagctatacaacattcttgaccaagtcgatgaactattgttgcttcctgaccaaaagctcgggagaccatggtgtgacactgatctaatatgtgaaccgattctgtcttggagactcaatggtggcagcccaagcaaatgtttgttgcaactcaagacatacatagtcagacagtgggatccaggaatttctgggatctttagtcatcgagatacaattcaaggtcatgcggttgcttggggacaagcaacattttgtgagggtggaaatgtaacatccatgaatagcaacatgtccagggctttagctgacaagcgggccacccacccatgggacccaggtggaagaccagatgctgggtataagttccaagagtctctattggcgattggatcacctactggaagcgtagctcgttcgggcaaaagctgttgcagtgcgcgcgcccagaaccagtatcagaagctcagggaccttggagagaagctgcagaagtgcgctcaggatctggatctgaagttttgggaccttgtagctaagctacagcagtgcgcccagaacctgaatcacatgttctgggactttcaagctaagttcttgcagtgcacccaaagcctgccactgtatatccatcagggagcagctgggcaaccaccaatgcggcaatgcctgattcacccgccgcaagatccactgcagaattcagggatgacattgaacaaggaccatcgacgcctgatgatgcaccctcgaatccaccgtcgcctaatgccctcccgaatgctgctggctccaccactggcaatcaacacggatcagctgaggaggcaccgacgcctgatgcaccctcgaattccctggtgcagatgatctgcgactgattggtctatgggtttacagcactccgttctttttatttggctgcgcgtcatcttcgggactggtcatatgaaccgattggcatcaaagaatgatggtggtactgcaacagattgggaccttcctactaatgagataatcagcttgaggaaaaggataaagaacatagaatatattgtcagtgagacaaataaatcacctctgtcgaaacatagtagcagcagcacaaagaatgaaattgatgacaaggaaagcagcagcaccaagaacagcggcaatgtaaggagcaccaaacagaaggaaattgactacgtatacagaagcattgaaaagaaagttaaagttttcggtcgagacaaggtccatgaagatataaggtgcttcataatggaccggctaccgatgcaccaagctccgactccagtaaaccttattctgtgattggcatatatggaattacaggttctgggaagactactctggcacaatatgtttgtgagtatgagaagggtgaggtttcaatcctatcatgttcatccatgtgggaactacattcagtgccggtgaaatattttgtgatatgctggaccagatcacgcaacagcggccctctgatgccaacggtcctaaaagcctaaaaacagagttaaaagatctaacactacagcaaacgccaaaatatacagctactcttgttgactgtccaaattcaaaatacacagcttataagcaaggctgtatatgtttgctactaactcatacctataggcagctaagaccggtgttatgccaagtgacattgaagtgtacatagctgaccataagggaccagacccttccaaacctgaggagttgtgcagtcaggcttgcacagatcggctggcagaatatggtcaagaaatggtgaggcgccatgaaaaggactacgaccggagaaaagcaccaatcgatcccatggtggtgtatgctactggaggcagaaagagtcatgggcggtactccatgtttaatggagtgattgactccagagaggttagatctcagaggtcggggtcttcctccgaacgatcaggggctagaactcatcgccaatcagagcatgagttggaggttgcaagggtgcaagaggagataaggcaacgtgatgcattccaaaggcacaacatgagtactttgcctcattcttggcgcagcagcagaccgtgcttcaagaatactcaggacatttga

SEQ ID NO: 213657 - DNA, 5748 bp, Zea Mays
tatggggaaggcaagaaagaaaatacaaaaggaaaaaaaaaaatagtcgtcttcttcctcgtgaaggacggtctaggtgagattgtcctcttgtcgagatcctcacgtcccggtcctcaccaccggtggcgacggggtgtgacagttggtaccagagacggtgtatcctcggcgtggggggcgacggacggccaccagctcttctctgcgctagctatcggggtggcgacgacgattgttggcgcgtcgacggcggatccagcggtccggcgtggtgacctcattgatccggcgcgacctacctccttcagctaacggtggcgctccagcggcccttggctcgagttccgttttgttccgcgatggcttccctttcccccggcaactccttcatcgaggcggtgtcgacggcggtggttgcggcggatttggcggtgctgggctgacgggaggtctcgatttggcggtgctggtggcggcgactccatcaagttgcctgtgtgctccctcaactttcttcctcagatccccttcggcaggcggcgtgcccacgacgccactgtttgggatatctggtgacgagtgctctcagtcacggcactggtgacgggttccctttctctgagactccaaccactggcggcaacacgggatttggtgcgtgtgtgcggcagctacgggagattgtggagctcgagtggctctgcatcccgctcgtagcgctcagatcgtgattggctgctttcatcctctacaatcactagttgagcagattttgggtgagcgcggtgttaatttgttgatgctaaggcaagccagtaacctggcacacaacatgttcgatgatatgtcatttacagaggtggtctgggatgatgaaggggcactattcgatgaaatgcattgcacggatgtcatctgggatgaggagacacatcatggctttgactcacatggcctattgcagcaccatgctgaagcaatggataaccagatgcagggcaaggagaaattggctcaaagtggagattactatgatgagaggaaagtcaatattgaaccagacatcaacaacttgctcattcatgtcaatgaccatttctctatgttggtgattggtgcggattctaggcgaagtgatgttgtgtgggacgaggacatgttatctgacctcgatactcatggtggcttattacagttactggcatgttgtaaagatgatgagctcaaccaggacagagacactccttttctcttgggccttggtatggatcaggtggatgagatgctggccagcccgtccagccttggcatgaatgaggacttgccatctgtacctgagacacatggctcgttattgcagcaagtggcatgggacaggaagcactttgcttatgaaatgtgcacgcttattgctgagatggtcctggaagatgttctcaccgatgttggcaacctcgctttcagcattgattcaagcatgcagatcagtgatcaaccttccaaatatgcgctagtcatcgatgcttatctgctgaagacgcagtacaaaaaaccatacatttctataagccaatgggatccaggaatttggtgcaaaggtactatggcccatgagcagcaacagcttgagatatataggatgtttgagaaacaatgggattcagttatccttaaatggttcaggaatccttttgtgctgctgcaatcatgcaatggggaggatctgaatgaacaaggcacagtgcctgtaaatgacattttcgatgtattggctgctggccaggagttgaattttggcaacgtcaccttgatcatttatgggggatgccaaggagcaatgggtctgcaggttctttttgcagaattacacccttggcaccacaatgtctttacctccatagaattagcaatacagtcatggagaatcaatggtttcagtccaggaagctgcaagctcaacagacaatctatacttgttgctactaacttgcagttcaattataaagcttccaagtttgtatcctttactgatacttatcagatatacaagaacacatgcatttgtatcggagaattggaacctgctagttggagagatacttgttggctacctgagatctcacatgccaatgtgtccacacttgctagtgaggaaatagataacatgcttttccaggttggtgattttcatccaggagagagtgagcagcttgagctttacatgataacattgatacagtgggatctaggtccagtagaattttacaaatcaaactgtaggtgccctgctgcagaactgatagggtggtgctgattctagtttgttcatacaatctgtttatgttatgctgaaagctagtttcttctttatcatgaggtactacttggcccaacagtcatggaatttctgggatctttagtcaccaagatacaattcatggtcatgcggttgtttggggacaagcaaccatttgtgggggtggaaaggatatatggcaacacaggttaaagtcgtgttttaaaatggaaatgcatgctacagtcctgggtgtcaatgatgtattgcagcatatcagtgcttgttctctattcctgcagcttggtcgcagaaaactatatagggtggtgatgacttctgttctaaggcccagagatttgctgctgaagagctatacaacattcttgaccaagtcgatgaactattgttgcttcctgaccaaaagctcgggagaccatggtgtgacactgatctaatatgtgaaccgattctgtcttggagactcaatggtggcagcccaagcaaatgtttgttgcaactcaagacatacatagtcagacagtgggatccaggaatttctgggatctttagtcatcgagatacaattcaaggtcatgcggttgcttggggacaagcaacattttgtgagggtggaaatgtaacatccatgaatagcaacatgtccagggctttagctgacaagcgggccacccacccatgggacccaggtggaagaccagatgctgggtataagttccaagagtctgtatgggggaaggcaagaaagaaaatacaaaaaaatagtcgtcttcttcctcgtgaaggacggtctaggtgagattgtcctcttgtcgagatcctcacgtcccggtcctcaccacgggtggccacggggtgtgacatgatactaggagatgtaacggagcaaagaattctgagaggagccaaagatgaggataagggatactgaagatcctcgtcgagctggacaaggatctcaagtctgctctgtgcgatttggaagacgtcctggatgttattgaatatcgctgaatcgagaagaaagtcatcggtggtgacaaaaagttgatcagcactactatttgcatctgggcgctgcaagctattggcgattggatcacctactggaagcgtagctcgttcgggcaaaagctgttgcagtgcgcgcgcccagaaccagtatcagaagctcagggaccttggagagaagctgcagaagtgcgctcaggatctggatctgaagttttgggaccttgtagctaagctacagcagtgcgcccagaacctgaatcacatgttctgggactttcaagctaagttcttgcagtgcacccaaagcctgccactgtatatccatcagggagcagctgggcaaccaccaatgcggcaatgcctgattcacccgccgcaagatccactgcagaattcagggatgacattgaacaaggaccatcgacgcctgatgatgcaccctcgaatccaccgtcgcctaatgccctcccgaatgctgctggctccaccactggcaatcaacacggatcagctgaggaggcaccgacgcctgatgcaccctcgaattccctggtgcagatgatctgcgactgattggtctatgggtttacagcactccgttctttttatttggctgcgcgtcatcttcgggactggtcatatgaaccgattggcatcaaagaatgatggtggtactgcaacagattgggaccttcctactaatgagataatcagcttgaggaaaaggataaagaacatagaatatattgtcagtgagacaaataaatcacctctgtcgaaacatagtagcagcagcacaaagaatgaaattgatgacaaggaaagcagcagcaccaagaacagcggcaatgtaaggagcaccaaacagaaggaaattgactacgtatacagaagcattgaaaagaaagttaaagttttcggtcgagacaaggtccatgaagatataaggtgcttcataatggaccggctaccgatgcaccaagctccgactccagtaaaccttattctgtgattggcatatatggaattacaggttctgggaagactactctggcacaatatgtttgtgagtatgagaagggtgaggtttcaatcctatcatgttcatccatgtgggaactacattcagtgccggtgaaatattttgtgatatgctggaccagatcacgcaacagcggccctctgatgccaacggtcctaaaagcctaaaaacagagttaaaagatctaacactacagcaaacgccaaaatatacagctactcttgttgactgtccaaattcaaaatacacagcttataagcaaggctgtatatgtttgctactaactcatacctataggcagctaagaccggtgttatgccaagtgacattgaagtgtacatagctgaccataagggaccagacccttccaaacctgaggagttgtgcagtcaggcttgcacagatcggctgaatatggtcaagaaatggtgaggcgccatgaaaaggactacgaccggagaaaagcaccaatcgatcccatggtggtgtatgctactggaggcagaaagagtcatgggcggtactccatgtttaatggagtgattgactccagagaggttagatctcagaggtcggggtcttcctccgaacgatcaggggctagaactcatcgccaatcagagcatgagttggaggttgcaagggtgcaagaggagataaggcaacgtgatgcattccaaaggcacaacatgagtactttgcctcattcttggcgcagcagcagaccgtgcttcaagcaactttccaacagcaggggataaacgtagtccttccacaatttcaacctccaccactgccaccaatatggggatcgggtacccaataccttctgcaagtcaaacggccgatgctggaactacatttgtaaatgcaatcttcggtccaccctctggaggcagcggccaaaactccaatcatctgagaggtggcttgtcacactcggatttaagggcaaactcgggcgcatctcaaatgtgtgctaggatcaagtctcacacatatgatggctcatggtacagaaatcaatgtcatatctttattaaataatcggagtttttttacaaaataactaaatacaatacaccatatggcgacgagatcctccaccaacaaagttgactgggagacgacggcatagatctctccgaactcatcgtaacatccttcatgctctttatcttgcagtacctgtctttgacctggtgtgattatagcaagggtgagctcccatacggtcatcgctcagcaagtgtgggaaataatgtgtatgagctcacttacggtgggagctcatgtgtagtgtaaggctgatcaacaaataatggttaaggctgagcattgcttttaataagttggtcaaaattttattagc

SEQ ID NO: 213658 - DNA, 5820 bp, Zea Mays
tatggggaaggcaagaaagaaaatacaaaaggaaaaaaaaaaatagtcgtcttcttcctcgtgaaggacggtctaggtgagattgtcctcttgtcgagatcctcacgtcccggtcctcaccaccggtggcgacggggtgtgacagttggtaccagagacggtgtatcctcggcgtggggggcgacggacggccaccagctcttctctgcgctagctatcggggtggcgacgacgattgttggcgcgtcgacggcggatccagcggtccggcgtggtgacctcattgatccggcgcgacctacctccttcagctaacggtggcgctccagcggcccttggctcgagttccgttttgttccgcgatggcttccctttcccccggcaactccttcatcgaggcggtgtcgacggcggtggttgcggcggatttggcggtgctgggctgacgggaggtctcgatttggcggtgctggtggcggcgactccatcaagttgcctgtgtgctccctcaactttcttcctcagatccccttcggcaggcggcgtgcccacgacgccactgtttgggatatctggtgacgagtgctctcagtcacggcactggtgacgggttccctttctctgagactccaaccactggcggcaacacgggatttggtgcgtgtgtgcggcagctacgggagattgtggagctcgagtggctctgcatcccgctcgtagcgctcagatcgtgattggctgctttcatcctctacaatcactagttgagcagattttgggtgagcgcggtgttaatttgttgatgctaaggcaagccagtaacctggcacacaacatgttcgatgatatgtcatttacagaggtggtctgggatgatgaaggggcactattcgatgaaatgcattgcacggatgtcatctgggatgaggagacacatcatggctttgactcacatggcctattgcagcaccatgctgaagcaatggataaccagatgcagggcaaggagaaattggctcaaagtggagattactatgatgagaggaaagtcaatattgaaccagacatcaacaacttgctcattcatgtcaatgaccatttctctatgttggtgattggtgcggattctaggcgaagtgatgttgtgtgggacgaggacatgttatctgacctcgatactcatggtggcttattacagttactggcatgttgtaaagatgatgagctcaaccaggacagagacactccttttctcttgggccttggtatggatcaggtggatgagatgctggccagcccgtccagccttggcatgaatgaggacttgccatctgtacctgagacacatggctcgttattgcagcaagtggcatgggacaggaagcactttgcttatgaaatgtgcacgcttattgctgagatggtcctggaagatgttctcaccgatgttggcaacctcgctttcagcattgattcaagcatgcagatcagtgatcaaccttccaaatatgcgctagtcatcgatgcttatctgctgaagacgcagtacaaaaaaccatacatttctataagccaatgggatccaggaatttggtgcaaaggtactatggcccatgagcagcaacagcttgagatatataggatgtttgagaaacaatgggattcagttatccttaaatggttcaggaatccttttgtgctgctgcaatcatgcaatggggaggatctgaatgaacaaggcacagtgcctgtaaatgacattttcgatgtattggctgctggccaggagttgaattttggcaacgtcaccttgatcatttatgggggatgccaaggagcaatgggtctgcaggttctttttgcagaattacacccttggcaccacaatgtctttacctccatagaattagcaatacagtcatggagaatcaatggtttcagtccaggaagctgcaagctcaacagacaatctatacttgttgctactaacttgcagttcaattataaagcttccaagtttgtatcctttactgatacttatcagatatacaagaacacatgcatttgtatcggagaattggaacctgctagttggagagatacttgttggctacctgagatctcacatgccaatgtgtccacacttgctagtgaggaaatagataacatgcttttccaggttggtgattttcatccaggagagagtgagcagcttgagctttacatgataacattgatacagtgggatctaggtccagtagaattttacaaatcaaactgtaggtgccctgctgcagaactgatagggtggtgctgattctagtttgttcatacaatctgtttatgttatgctgaaagctagtttcttctttatcatgaggtactacttggcccaacagtcatggaatttctgggatctttagtcaccaagatacaattcatggtcatgcggttgtttggggacaagcaaccatttgtgggggtggaaaggatatatggcaacacaggttaaagtcgtgttttaaaatggaaatgcatgctacagtcctgggtgtcaatgatgtattgcagcatatcagtgcttgttctctattcctgcagcttggtcgcagaaaactatatagggtggtgatgacttctgttctaaggcccagagatttgctgctgaagagctatacaacattcttgaccaagtcgatgaactattgttgcttcctgaccaaaagctcgggagaccatggtgtgacactgatctaatatgtgaaccgattctgtcttggagactcaatggtggcagcccaagcaaatgtttgttgcaactcaagacatacatagtcagacagtgggatccaggaatttctgggatctttagtcatcgagatacaattcaaggtcatgcggttgcttggggacaagcaacattttgtgagggtggaaatgtaacatccatgaatagcaacatgtccagggctttagctgacaagcgggccacccacccatgggacccaggtggaagaccagatgctgggtataagttccaagagtctgtatgggggaaggcaagaaagaaaatacaaaaaaatagtcgtcttcttcctcgtgaaggacggtctaggtgagattgtcctcttgtcgagatcctcacgtcccggtcctcaccacgggtggccacggggtgtgacatgatactaggagatgtaacggagcaaagaattctgagaggagccaaagatgaggataagggatactgaagatcctcgtcgagctggacaaggatctcaagtctgctctgtgcgatttggaagacgtcctggatgttattgaatatcgctgaatcgagaagaaagtcatcggtggtgacaaaaagttgatcagcactactatttgcatctgggcgctgcaagctattggcgattggatcacctactggaagcgtagctcgttcgggcaaaagctgttgcagtgcgcgcgcccagaaccagtatcagaagctcagggaccttggagagaagctgcagaagtgcgctcaggatctggatctgaagttttgggaccttgtagctaagctacagcagtgcgcccagaacctgaatcacatgttctgggactttcaagctaagttcttgcagtgcacccaaagcctgccactgtatatccatcagggagcagctgggcaaccaccaatgcggcaatgcctgattcacccgccgcaagatccactgcagaattcagggatgacattgaacaaggaccatcgacgcctgatgatgcaccctcgaatccaccgtcgcctaatgccctcccgaatgctgctggctccaccactggcaatcaacacggatcagctgaggaggcaccgacgcctgatgcaccctcgaattccctggtgcagatgatctgcgactgattggtctatgggtttacagcactccgttctttttatttggctgcgcgtcatcttcgggactggtcatatgaaccgattggcatcaaagaatgatggtggtactgcaacagattgggaccttcctactaatgagataatcagcttgaggaaaaggataaagaacatagaatatattgtcagtgagacaaataaatcacctctgtcgaaacatagtagcagcagcacaaagaatgaaattgatgacaaggaaagcagcagcaccaagaacagcggcaatgtaaggagcaccaaacagaaggaaattgactacgtatacagaagcattgaaaagaaagttaaagttttcggtcgagacaaggtccatgaagatataaggtgcttcataatggaccggctaccgatgcaccaagctccgactccagtaaaccttattctgtgattggcatatatggaattacaggttctgggaagactactctggcacaatatgtttgtgagtatgagaagggtgaggtttcaatcctatcatgttcatccatgtgggaactacattcagtgccggtgaaatattttgtgatatgctggaccagatcacgcaacagcggccctctgatgccaacggtcctaaaagcctaaaaacagagttaaaagatctaacactacagcaaacgccaaaatatacagctactcttgttgactgtccaaattcaaaatacacagcttataagcaaggctgtatatgtttgctactaactcatacctataggcagctaagaccggtgttatgccaagtgacattgaagtgtacatagctgaccataagggaccagacccttccaaacctgaggagttgtgcagtcaggcttgcacagatcggctggcagaatatggtcaagaaatggtgaggcgccatgaaaaggactacgaccggagaaaagcaccaatcgatcccatggtggtgtatgctactggaggcagaaagagtcatgggcggtactccatgtttaatggagtgattgactccagagaggttagatctcagaggtcggggtcttcctccgaacgatcaggggctagaactcatcgccaatcagagcatgagttggaggttgcaagggtgcaagaggagataaggcaacgtgatgcattccaaaggcacaacatgagtactttgcctcattcttggcgcagcagcagaccgtgcttcaagcaactttccaacagcaggggataaacgtagtccttccacaatttcaacctccaccactgccaccaatatggggatcgggtacccaataccttctgcaagtcaaggatcggcggcacaagggccccagatttaccatactccacctgcatagatactagcacctggagaccaacggccgatgctggaactacatttgtaaatgcaatcttcggtccaccctctggaggcagcggccaaaactccaatcatctgagaggtggcttgtcacactcggatttaagggcaaactcgggcgcatctcaaatgtgtgctaggatcaagtctcacacatatgatggctcatggtacagaaatcaatgtcatatctttattaaataatcggagtttttttacaaaataactaaatacaatacaccatatggcgacgagatcctccaccaacaaagttgactgggagacgacggcatagatctctccgaactcatcgtaacatccttcatgctctttatcttgcagtacctgtctttgacctggtgtgattatagcaagggtgagctcccatacggtcatcgctcagcaagtgtgggaaataatgtgtatgagctcacttacggtgggagctcatgtgtagtgtaaggctgatcaacaaataatggttaaggctgagcattgcttttaataagttggtcaaaattttattagc

SEQ ID NO: 213659 - DNA, 5752 bp, Zea Mays
tatggggaaggcaagaaagaaaatacaaaaggaaaaaaaaaaatagtcgtcttcttcctcgtgaaggacggtctaggtgagattgtcctcttgtcgagatcctcacgtcccggtcctcaccaccggtggcgacggggtgtgacagttggtaccagagacggtgtatcctcggcgtggggggcgacggacggccaccagctcttctctgcgctagctatcggggtggcgacgacgattgttggcgcgtcgacggcggatccagcggtccggcgtggtgacctcattgatccggcgcgacctacctccttcagctaacggtggcgctccagcggcccttggctcgagttccgttttgttccgcgatggcttccctttcccccggcaactccttcatcgaggcggtgtcgacggcggtggttgcggcggatttggcggtgctgggctgacgggaggtctcgatttggcggtgctggtggcggcgactccatcaagttgcctgtgtgctccctcaactttcttcctcagatccccttcggcaggcggcgtgcccacgacgccactgtttgggatatctggtgacgagtgctctcagtcacggcactggtgacgggttccctttctctgagactccaaccactggcggcaacacgggatttggtgcgtgtgtgcggcagctacgggagattgtggagctcgagtggctctgcatcccgctcgtagcgctcagatcgtgattggctgctttcatcctctacaatcactagttgagcagattttgggtgagcgcggtgttaatttgttgatgctaaggcaagccagtaacctggcacacaacatgttcgatgatatgtcatttacagaggtggtctgggatgatgaaggggcactattcgatgaaatgcattgcacggatgtcatctgggatgaggagacacatcatggctttgactcacatggcctattgcagcaccatgctgaagcaatggataaccagatgcagggcaaggagaaattggctcaaagtggagattactatgatgagaggaaagtcaatattgaaccagacatcaacaacttgctcattcatgtcaatgaccatttctctatgttggtgattggtgcggattctaggcgaagtgatgttgtgtgggacgaggacatgttatctgacctcgatactcatggtggcttattacagttactggcatgttgtaaagatgatgagctcaaccaggacagagacactccttttctcttgggccttggtatggatcaggtggatgagatgctggccagcccgtccagccttggcatgaatgaggacttgccatctgtacctgagacacatggctcgttattgcagcaagtggcatgggacaggaagcactttgcttatgaaatgtgcacgcttattgctgagatggtcctggaagatgttctcaccgatgttggcaacctcgctttcagcattgattcaagcatgcagatcagtgatcaaccttccaaatatgcgctagtcatcgatgcttatctgctgaagacgcagtacaaaaaaccatacatttctataagccaatgggatccaggaatttggtgcaaaggtactatggcccatgagcagcaacagcttgagatatataggatgtttgagaaacaatgggattcagttatccttaaatggttcaggaatccttttgtgctgctgcaatcatgcaatggggaggatctgaatgaacaaggcacagtgcctgtaaatgacattttcgatgtattggctgctggccaggagttgaattttggcaacgtcaccttgatcatttatgggggatgccaaggagcaatgggtctgcaggttctttttgcagaattacacccttggcaccacaatgtctttacctccatagaattagcaatacagtcatggagaatcaatggtttcagtccaggaagctgcaagctcaacagacaatctatacttgttgctactaacttgcagttcaattataaagcttccaagtttgtatcctttactgatacttatcagatatacaagaacacatgcatttgtatcggagaattggaacctgctagttggagagatacttgttggctacctgagatctcacatgccaatgtgtccacacttgctagtgaggaaatagataacatgcttttccaggttggtgattttcatccaggagagagtgagcagcttgagctttacatgataacattgatacagtgggatctaggtccagtagaattttacaaatcaaactgtaggtgccctgctgcagaactgatagggtggtgctgattctagtttgttcatacaatctgtttatgttatgctgaaagctagtttcttctttatcatgaggtactacttggcccaacagtcatggaatttctgggatctttagtcaccaagatacaattcatggtcatgcggttgtttggggacaagcaaccatttgtgggggtggaaaggatatatggcaacacaggttaaagtcgtgttttaaaatggaaatgcatgctacagtcctgggtgtcaatgatgtattgcagcatatcagtgcttgttctctattcctgcagcttggtcgcagaaaactatatagggtggtgatgacttctgttctaaggcccagagatttgctgctgaagagctatacaacattcttgaccaagtcgatgaactattgttgcttcctgaccaaaagctcgggagaccatggtgtgacactgatctaatatgtgaaccgattctgtcttggagactcaatggtggcagcccaagcaaatgtttgttgcaactcaagacatacatagtcagacagtgggatccaggaatttctgggatctttagtcatcgagatacaattcaaggtcatgcggttgcttggggacaagcaacattttgtgagggtggaaatgtaacatccatgaatagcaacatgtccagggctttagctgacaagcgggccacccacccatgggacccaggtggaagaccagatgctgggtataagttccaagagtctgtatgggggaaggcaagaaagaaaatacaaaaaaatagtcgtcttcttcctcgtgaaggacggtctaggtgagattgtcctcttgtcgagatcctcacgtcccggtcctcaccacgggtggccacggggtgtgacatgatactaggagatgtaacggagcaaagaattctgagaggagccaaagatgaggataagggatactgaagatcctcgtcgagctggacaaggatctcaagtctgctctgtgcgatttggaagacgtcctggatgttattgaatatcgctgaatcgagaagaaagtcatcggtggtgacaaaaagttgatcagcactactatttgcatctgggcgctgcaagctattggcgattggatcacctactggaagcgtagctcgttcgggcaaaagctgttgcagtgcgcgcgcccagaaccagtatcagaagctcagggaccttggagagaagctgcagaagtgcgctcaggatctggatctgaagttttgggaccttgtagctaagctacagcagtgcgcccagaacctgaatcacatgttctgggactttcaagctaagttcttgcagtgcacccaaagcctgccactgtatatccatcagggagcagctgggcaaccaccaatgcggcaatgcctgattcacccgccgcaagatccactgcagaattcagggatgacattgaacaaggaccatcgacgcctgatgatgcaccctcgaatccaccgtcgcctaatgccctcccgaatgctgctggctccaccactggcaatcaacacggatcagctgaggaggcaccgacgcctgatgcaccctcgaattccctggtgcagatgatctgcgactgattggtctatgggtttacagcactccgttctttttatttggctgcgcgtcatcttcgggactggtcatatgaaccgattggcatcaaagaatgatggtggtactgcaacagattgggaccttcctactaatgagataatcagcttgaggaaaaggataaagaacatagaatatattgtcagtgagacaaataaatcacctctgtcgaaacatagtagcagcagcacaaagaatgaaattgatgacaaggaaagcagcagcaccaagaacagcggcaatgtaaggagcaccaaacagaaggaaattgactacgtatacagaagcattgaaaagaaagttaaagttttcggtcgagacaaggtccatgaagatataaggtgcttcataatggaccggctaccgatgcaccaagctccgactccagtaaaccttattctgtgattggcatatatggaattacaggttctgggaagactactctggcacaatatgtttgtgagtatgagaagggtgaggtttcaatcctatcatgttcatccatgtgggaactacattcagtgccggtgaaatattttgtgatatgctggaccagatcacgcaacagcggccctctgatgccaacggtcctaaaagcctaaaaacagagttaaaagatctaacactacagcaaacgccaaaatatacagctactcttgttgactgtccaaattcaaaatacacagcttataagcaaggctgtatatgtttgctactaactcatacctataggcagctaagaccggtgttatgccaagtgacattgaagtgtacatagctgaccataagggaccagacccttccaaacctgaggagttgtgcagtcaggcttgcacagatcggctggcagaatatggtcaagaaatggtgaggcgccatgaaaaggactacgaccggagaaaagcaccaatcgatcccatggtggtgtatgctactggaggcagaaagagtcatgggcggtactccatgtttaatggagtgattgactccagagaggttagatctcagaggtcggggtcttcctccgaacgatcaggggctagaactcatcgccaatcagagcatgagttggaggttgcaagggtgcaagaggagataaggcaacgtgatgcattccaaaggcacaacatgagtactttgcctcattcttggcgcagcagcagaccgtgcttcaagcaactttccaacagcaggggataaacgtagtccttccacaatttcaacctccaccactgccaccaatatggggatcgggtacccaataccttctgcaagtcaaacggccgatgctggaactacatttgtaaatgcaatcttcggtccaccctctggaggcagcggccaaaactccaatcatctgagaggtggcttgtcacactcggatttaagggcaaactcgggcgcatctcaaatgtgtgctaggatcaagtctcacacatatgatggctcatggtacagaaatcaatgtcatatctttattaaataatcggagtttttttacaaaataactaaatacaatacaccatatggcgacgagatcctccaccaacaaagttgactgggagacgacggcatagatctctccgaactcatcgtaacatccttcatgctctttatcttgcagtacctgtctttgacctggtgtgattatagcaagggtgagctcccatacggtcatcgctcagcaagtgtgggaaataatgtgtatgagctcacttacggtgggagctcatgtgtagtgtaaggctgatcaacaaataatggttaaggctgagcattgcttttaataagttggtcaaaattttattagc

SEQ ID NO: 213660 - DNA, 5821 bp, Zea Mays
tatggggaaggcaagaaagaaaatacaaaaggaaaaaaaaaaatagtcgtcttcttcctcgtgaaggacggtctaggtgagattgtcctcttgtcgagatcctcacgtcccggtcctcaccaccggtggcgacggggtgtgacagttggtaccagagacggtgtatcctcggcgtggggggcgacggacggccaccagctcttctctgcgctagctatcggggtggcgacgacgattgttggcgcgtcgacggcggatccagcggtccggcgtggtgacctcattgatccggcgcgacctacctccttcagctaacggtggcgctccagcggcccttggctcgagttccgttttgttccgcgatggcttccctttcccccggcaactccttcatcgaggcggtgtcgacggcggtggttgcggcggatttggcggtgctgggctgacgggaggtctcgatttggcggtgctggtggcggcgactccatcaagttgcctgtgtgctccctcaactttcttcctcagatccccttcggcaggcggcgtgcccacgacgccactgtttgggatatctggtgacgagtgctctcagtcacggcactggtgacgggttccctttctctgagactccaaccactggcggcaacacgggatttggtgcgtgtgtgcggcagctacgggagattgtggagctcgagtggctctgcatcccgctcgtagcgctcagatcgtgattggctgctttcatcctctacaatcactagttgagcagattttgggtgagcgcggtgttaatttgttgatgctaaggcaagccagtaacctggcacacaacatgttcgatgatatgtcatttacagaggtggtctgggatgatgaaggggcactattcgatgaaatgcattgcacggatgtcatctgggatgaggagacacatcatggctttgactcacatggcctattgcagcaccatgctgaagcaatggataaccagatgcagggcaaggagaaattggctcaaagtggagattactatgatgagaggaaagtcaatattgaaccagacatcaacaacttgctcattcatgtcaatgaccatttctctatgttggtgattggtgcggattctaggcgaagtgatgttgtgtgggacgaggacatgttatctgacctcgatactcatggtggcttattacagttactggcatgttgtaaagatgatgagctcaaccaggacagagacactccttttctcttgggccttggtatggatcaggtggatgagatgctggccagcccgtccagccttggcatgaatgaggacttgccatctgtacctgagacacatggctcgttattgcagcaagtggcatgggacaggaagcactttgcttatgaaatgtgcacgcttattgctgagatggtcctggaagatgttctcaccgatgttggcaacctcgctttcagcattgattcaagcatgcagatcagtgatcaaccttccaaatatgcgctagtcatcgatgcttatctgctgaagacgcagtacaaaaaaccatacatttctataagccaatgggatccaggaatttggtgcaaaggtactatggcccatgagcagcaacagcttgagatatataggatgtttgagaaacaatgggattcagttatccttaaatggttcaggaatccttttgtgctgctgcaatcatgcaatggggaggatctgaatgaacaaggcacagtgcctgtaaatgacattttcgatgtattggctgctggccaggagttgaattttggcaacgtcaccttgatcatttatgggggatgccaaggagcaatgggtctgcaggttctttttgcagaattacacccttggcaccacaatgtctttacctccatagaattagcaatacagtcatggagaatcaatggtttcagtccaggaagctgcaagctcaacagacaatctatacttgttgctactaacttgcagttcaattataaagcttccaagtttgtatcctttactgatacttatcagatatacaagaacacatgcatttgtatcggagaattggaacctgctagttggagagatacttgttggctacctgagatctcacatgccaatgtgtccacacttgctagtgaggaaatagataacatgcttttccaggttggtgattttcatccaggagagagtgagcagcttgagctttacatgataacattgatacagtgggatctaggtccagtagaattttacaaatcaaactgtaggtgccctgctgcagaactgatagggtggtgctgattctagtttgttcatacaatctgtttatgttatgctgaaagctagtttcttctttatcatgaggtactacttggcccaacagtcatggaatttctgggatctttagtcaccaagatacaattcatggtcatgcggttgtttggggacaagcaaccatttgtgggggtggaaaggatatatggcaacacaggttaaagtcgtgttttaaaatggaaatgcatgctacagtcctgggtgtcaatgatgtattgcagcatatcagtgcttgttctctattcctgcagcttggtcgcagaaaactatatagggtggtgatgacttctgttctaaggcccagagatttgctgctgaagagctatacaacattcttgaccaagtcgatgaactattgttgcttcctgaccaaaagctcgggagaccatggtgtgacactgatctaatatgtgaaccgattctgtcttggagactcaatggtggcagcccaagcaaatgtttgttgcaactcaagacatacatagtcagacagtgggatccaggaatttctgggatctttagtcatcgagatacaattcaaggtcatgcggttgcttggggacaagcaacattttgtgagggtggaaatgtaacatccatgaatagcaacatgtccagggctttagctgacaagcgggccacccacccatgggacccaggtggaagaccagatgctgggtataagttccaagagtctgtatgggggaaggcaagaaagaaaatacaaaaaaatagtcgtcttcttcctcgtgaaggacggtctaggtgagattgtcctcttgtcgagatcctcacgtcccggtcctcaccacgggtggccacggggtgtgacatgatactaggagatgtaacggagcaaagaattctgagaggagccaaagatgaggataagggatactgaagatcctcgtcgagctggacaaggatctcaagtctgctctgtgcgatttggaagacgtcctggatgttattgaatatcgctgaatcgagaagaaagtcatcggtggtgacaaaaagttgatcagcactactatttgcatctgggcgctgcaagctattggcgattggatcacctactggaagcgtagctcgttcgggcaaaagctgttgcagtgcgcgcgcccagaaccagtatcagaagctcagggaccttggagagaagctgcagaagtgcgctcaggatctggatctgaagttttgggaccttgtagctaagctacagcagtgcgcccagaacctgaatcacatgttctgggactttcaagctaagttcttgcagtgcacccaaagcctgccactgtatatccatcagggagcagctgggcaaccaccaatgcggcaatgcctgattcacccgccgcaagatccactgcagaattcagggatgacattgaacaaggaccatcgacgcctgatgatgcaccctcgaatccaccgtcgcctaatgccctcccgaatgctgctggctccaccactggcaatcaacacggatcagctgaggaggcaccgacgcctgatgcaccctcgaattccctggtgcagatgatctgcgactgattggtctatgggtttacagcactccgttctttttatttggctgcgcgtcatcttcgggactggtcatatgaaccgattggcatcaaagaatgatggtggtactgcaacagattgggaccttcctactaatgagataatcagcttgaggaaaaggataaagaacatagaatatattgtcagtgagacaaataaatcacctctgtcgaaacatagtagcagcagcacaaagaatgaaattgatgacaaggaaagcagcagcaccaagaacagcggcaatgtaaggagcaccaaacagaaggaaattgactacgtatacagaagcattgaaaagaaagttaaagttttcggtcgagacaaggtccatgaagatataaggtgcttcataatggaccggctaccgatgcaccaagctccgactccagtaaaccttattctgtgattggcatatatggaattacaggttctgggaagactactctggcacaatatgtttgtgagtatgagaagggtgaggtttcaatcctatcatgttcatccatgtgggaactacattcagtgccggtgaaatattttgtgatatgctggaccagatcacgcaacagcggccctctgatgccaacggtcctaaaagcctaaaaacagagttaaaagatctaacactacagcaaacgccaaaatatacagctactcttgttgactgtccaaattcaaaatacacagcttataagcaaggctgtatatgtttgctactaactcatacctataggcagctaagaccggtgttatgccaagtgacattgaagtgtacatagctgaccataagggaccagacccttccaaacctgaggagttgtgcagtcaggcttgcacagatcggctgaatatggtcaagaaatggtgaggcgccatgaaaaggactacgaccggagaaaagcaccaatcgatcccatggtggtgtatgctactggaggcagaaagagtcatgggcggtactccatgtttaatggagtgattgactccagagaggttagatctcagaggtcggggtcttcctccgaacgatcaggggctagaactcatcgccaatcagagcatgagttggaggttgcaagggtgcaagaggagataaggcaacgtgatgcattccaaaggcacaacatgagtactttgcctcattcttggcgcagcagcagaccgtgcttcaagcaactttccaacagcaggggataaacgtagtccttccacaatttcaacctccaccactgccaccaatatggggatcgggtacccaataccttctgcaagtcaaggatcggcggcacaagggccccagatttaccatactccacctgcatagatactagcacctggagaccagttctacggccgatgctggaactacatttgtaaatgcaatcttcggtccaccctctggaggcagcggccaaaactccaatcatctgagaggtggcttgtcacactcggatttaagggcaaactcgggcgcatctcaaatgtgtgctaggatcaagtctcacacatatgatggctcatggtacagaaatcaatgtcatatctttattaaataatcggagtttttttacaaaataactaaatacaatacaccatatggcgacgagatcctccaccaacaaagttgactgggagacgacggcatagatctctccgaactcatcgtaacatccttcatgctctttatcttgcagtacctgtctttgacctggtgtgattatagcaagggtgagctcccatacggtcatcgctcagcaagtgtgggaaataatgtgtatgagctcacttacggtgggagctcatgtgtagtgtaaggctgatcaacaaataatggttaaggctgagcattgcttttaataagttggtcaaaattttattagc

SEQ ID NO: 213661 - DNA, 5648 bp, Zea Mays
tatggggaaggcaagaaagaaaatacaaaaggaaaaaaaaaaatagtcgtcttcttcctcgtgaaggacggtctaggtgagattgtcctcttgtcgagatcctcacgtcccggtcctcaccaccggtggcgacggggtgtgacagttggtaccagagacggtgtatcctcggcgtggggggcgacggacggccaccagctcttctctgcgctagctatcggggtggcgacgacgattgttggcgcgtcgacggcggatccagcggtccggcgtggtgacctcattgatccggcgcgacctacctccttcagctaacggtggcgctccagcggcccttggctcgagttccgttttgttccgcgatggcttccctttcccccggcaactccttcatcgaggcggtgtcgacggcggtggttgcggcggatttggcggtgctgggctgacgggaggtctcgatttggcggtgctggtggcggcgactccatcaagttgcctgtgtgctccctcaactttcttcctcagatccccttcggcaggcggcgtgcccacgacgccactgtttgggatatctggtgacgagtgctctcagtcacggcactggtgacgggttccctttctctgagactccaaccactggcggcaacacgggatttggtgcgtgtgtgcggcagctacgggagattgtggagctcgagtggctctgcatcccgctcgtagcgctcagatcgtgattggctgctttcatcctctacaatcactagttgagcagattttgggtgagcgcggtgttaatttgttgatgctaaggcaagccagtaacctggcacacaacatgttcgatgatatgtcatttacagaggtggtctgggatgatgaaggggcactattcgatgaaatgcattgcacggatgtcatctgggatgaggagacacatcatggctttgactcacatggcctattgcagcaccatgctgaagcaatggataaccagatgcagggcaaggagaaattggctcaaagtggagattactatgatgagaggaaagtcaatattgaaccagacatcaacaacttgctcattcatgtcaatgaccatttctctatgttggtgattggtgcggattctaggcgaagtgatgttgtgtgggacgaggacatgttatctgacctcgatactcatggtggcttattacagttactggcatgttgtaaagatgatgagctcaaccaggacagagacactccttttctcttgggccttggtatggatcaggtggatgagatgctggccagcccgtccagccttggcatgaatgaggacttgccatctgtacctgagacacatggctcgttattgcagcaagtggcatgggacaggaagcactttgcttatgaaatgtgcacgcttattgctgagatggtcctggaagatgttctcaccgatgttggcaacctcgctttcagcattgattcaagcatgcagatcagtgatcaaccttccaaatatgcgctagtcatcgatgcttatctgctgaagacgcagtacaaaaaaccatacatttctataagccaatgggatccaggaatttggtgcaaaggtactatggcccatgagcagcaacagcttgagatatataggatgtttgagaaacaatgggattcagttatccttaaatggttcaggaatccttttgtgctgctgcaatcatgcaatggggaggatctgaatgaacaaggcacagtgcctgtaaatgacattttcgatgtattggctgctggccaggagttgaattttggcaacgtcaccttgatcatttatgggggatgccaaggagcaatgggtctgcaggttctttttgcagaattacacccttggcaccacaatgtctttacctccatagaattagcaatacagtcatggagaatcaatggtttcagtccaggaagctgcaagctcaacagacaatctatacttgttgctactaacttgcagttcaattataaagcttccaagtttgtatcctttactgatacttatcagatatacaagaacacatgcatttgtatcggagaattggaacctgctagttggagagatacttgttggctacctgagatctcacatgccaatgtgtccacacttgctagtgaggaaatagataacatgcttttccaggttggtgattttcatccaggagagagtgagcagcttgagctttacatgataacattgatacagtgggatctaggtccagtagaattttacaaatcaaactgtaggtgccctgctgcagaactgatagggtggtgctgattctagtttgttcatacaatctgtttatgttatgctgaaagctagtttcttctttatcatgaggtactacttggcccaacagtcatggaatttctgggatctttagtcaccaagatacaattcatggtcatgcggttgtttggggacaagcaaccatttgtgggggtggaaaggatatatggcaacacaggttaaagtcgtgttttaaaatggaaatgcatgctacagtcctgggtgtcaatgatgtattgcagcatatcagtgcttgttctctattcctgcagcttggtcgcagaaaactatatagggtggtgatgacttctgttctaaggcccagagatttgctgctgaagagctatacaacattcttgaccaagtcgatgaactattgttgcttcctgaccaaaagctcgggagaccatggtgtgacactgatctaatatgtgaaccgattctgtcttggagactcaatggtggcagcccaagcaaatgtttgttgcaactcaagacatacatagtcagacagtgggatccaggaatttctgggatctttagtcatcgagatacaattcaaggtcatgcggttgcttggggacaagcaacattttgtgagggtggaaatgtaacatccatgaatagcaacatgtccagggctttagctgacaagcgggccacccacccatgggacccaggtggaagaccagatgctgggtataagttccaagagtctgtatgggggaaggcaagaaagaaaatacaaaaaaatagtcgtcttcttcctcgtgaaggacggtctaggtgagattgtcctcttgtcgagatcctcacgtcccggtcctcaccacgggtggccacggggtgtgacatgatactaggagatgtaacggagcaaagaattctgagaggagccaaagatgaggataagggatactgaagatcctcgtcgagctggacaaggatctcaagtctgctctgtgcgatttggaagacgtcctggatgttattgaatatcgctgaatcgagaagaaagtcatcggtggtgacaaaaagttgatcagcactactatttgcatctgggcgctgcaagctattggcgattggatcacctactggaagcgtagctcgttcgggcaaaagctgttgcagtgcgcgcgcccagaaccagtatcagaagctcagggaccttggagagaagctgcagaagtgcgctcaggatctggatctgaagttttgggaccttgtagctaagctacagcagtgcgcccagaacctgaatcacatgttctgggactttcaagctaagttcttgcagtgcacccaaagcctgccactgtatatccatcagggagcagctgggcaaccaccaatgcggcaatgcctgattcacccgccgcaagatccactgcagaattcagggatgacattgaacaaggaccatcgacgcctgatgatgcaccctcgaatccaccgtcgcctaatgccctcccgaatgctgctggctccaccactggcaatcaacacggatcagctgaggaggcaccgacgcctgatgcaccctcgaattccctggtgcagatgatctgcgactgattggtctatgggtttacagcactccgttctttttatttggctgcgcgtcatcttcgggactggtcatatgaaccgattggcatcaaagaatgatggtggtactgcaacagattgggaccttcctactaatgagataatcagcttgaggaaaaggataaagaacatagaatatattgtcagtgagacaaataaatcacctctgtcgaaacatagtagcagcagcacaaagaatgaaattgatgacaaggaaagcagcagcaccaagaacagcggcaatgtaaggagcaccaaacagaaggaaattgactacgtatacagaagcattgaaaagaaagttaaagttttcggtcgagacaaggtccatgaagatataaggtgcttcataatggaccggctaccgatgcaccaagctccgactccagtaaaccttattctgtgattggcatatatggaattacaggttctgggaagactactctggcacaatatgtttgtgagtatgagaagggtgaggtttcaatcctatcatgttcatccatgtgggaactacattcagtgccggtgaaatattttgtgatatgctggaccagatcacgcaacagcggccctctgatgccaacggtcctaaaagcctaaaaacagagttaaaagatctaacactacagcaaacgccaaaatatacagctactcttgttgactgtccaaattcaaaatacacagcttataagcaaggctgtatatgtttgctactaactcatacctataggcagctaagaccggtgttatgccaagtgacattgaagtgtacatagctgaccataagggaccagacccttccaaacctgaggagttgtgcagtcaggcttgcacagatcggctggcagaatatggtcaagaaatggtgaggcgccatgaaaaggactacgaccggagaaaagcaccaatcgatcccatggtggtgtatgctactggaggcagaaagagtcatgggcggtactccatgtttaatggagtgattgactccagagaggttagatctcagaggtcggggtcttcctccgaacgatcaggggctagaactcatcgccaatcagagcatgagttggaggttgcaagggtgcaagaggagataaggcaacgtgatgcattccaaaggcacaacatgagtactttgcctcattcttggcgcagcagcagaccgtgcttcaaacggccgatgctggaactacatttgtaaatgcaatcttcggtccaccctctggaggcagcggccaaaactccaatcatctgagaggtggcttgtcacactcggatttaagggcaaactcgggcgcatctcaaatgtgtgctaggatcaagtctcacacatatgatggctcatggtacagaaatcaatgtcatatctttattaaataatcggagtttttttacaaaataactaaatacaatacaccatatggcgacgagatcctccaccaacaaagttgactgggagacgacggcatagatctctccgaactcatcgtaacatccttcatgctctttatcttgcagtacctgtctttgacctggtgtgattatagcaagggtgagctcccatacggtcatcgctcagcaagtgtgggaaataatgtgtatgagctcacttacggtgggagctcatgtgtagtgtaaggctgatcaacaaataatggttaaggctgagcattgcttttaataagttggtcaaaattttattagc

SEQ ID NO: 213662 - DNA, 2083 bp, Zea Mays
cagcggtagagcctaccgtctgtaaccggaaggtcccgggttcgaaccccagcctctgcatattatgcgggtaaggcttggcgcttaaagatacccttccccagaccccgcacagtgcgggaagcctacggcactgggtacaaatgtagataatttagatttttgttttcaataatagcaggttggaaaatttagatttaaattacgtgggttctttttgtgccttgtgttagtctttcctataacaatgatggaagtgagtacattaaaatcatatatagaagtaccttaagattttatccataatggcagatgtagtgatgtataatgatggtggtactgcaacagattgggaccttcctactaatgagataatcagcttgaggaaaaggataaagaacatagaatatattgtcagtgagacaaataaatcacctctgtcgaaacatagtagcagcagcacaaagaatgaaattgatgacaaggaaagcagcagcaccaagaacagcggcaatgtaaggagcaccaaacagaaggaaattgactacgtatacagaagcattgaaaagaaagttaaagttttcggtcgagacaaggtccatgaagatataaggtgcttcataatggaccggctaccgatgcaccaagctccgactccagtaaaccttattctgtgattggcatatatggaattacaggttctgggaagactactctggcacaatatgtttgtgagtatgagaagggtgaggtttcaatcctatcatgttcatccatgtgggaactacattcagtgccggtgaaatattttgtgatatgctggaccagatcacgcaacagcggccctctgatgccaacggtcctaaaagcctaaaaacagagttaaaagatctaacactacagcaaacgccaaaatatacagctactcttgttgactgtccaaattcaaaatacacagcttataagcaaggctgtatatgtttgctactaactcatacctataggcagctaagaccggtgttatgccaagtgacattgaagtgtacatagctgaccataagggaccagacccttccaaacctgaggagttgtgcagtcaggcttgcacagatcggctggcagaatatggtcaagaaatggtgaggcgccatgaaaaggactacgaccggagaaaagcaccaatcgatcccatggtggtgtatgctactggaggcagaaagagtcatgggcggtactccatgtttaatggagtgattgactccagagaggttagatctcagaggtcggggtcttcctccgaacgatcaggggctagaactcatcgccaatcagagcatgagttggaggttgcaagggtgcaagaggagataaggcaacgtgatgcattccaaaggcacaacatgagtactttgcctcattcttggcgcagcagcagaccgtgcttcaagcaactttccaacagcaggggataaacgtagtccttccacaatttcaacctccaccactgccaccaatatggggatcgggtacccaataccttctgcaagtcaaacggccgatgctggaactacatttgtaaatgcaatcttcggtccaccctctggaggcagcggccaaaactccaatcatctgagaggtggcttgtcacactcggatttaagggcaaactcgggcgcatctcaaatgtgtgctaggatcaagtctcacacatatgatggctcatggtacagaaatcaatgtcatatctttattaaataatcggagtttttttacaaaataactaaatacaatacaccatatggcgacgagatcctccaccaacaaagttgactgggagacgacggcatagatctctccgaactcatcgtaacatccttcatgctctttatcttgcagtacctgtctttgacctggtgtgattatagcaagggtgagctcccatacggtcatcgctcagcaagtgtgggaaataatgtgtatgagctcacttacggtgggagctcatgtgtagtgtaaggctgatcaacaaataatggttaaggctgagcattgcttttaataagttggtcaaaattttattagc

SEQ ID NO: 213663 - DNA, 2152 bp, Zea Mays
cagcggtagagcctaccgtctgtaaccggaaggtcccgggttcgaaccccagcctctgcatattatgcgggtaaggcttggcgcttaaagatacccttccccagaccccgcacagtgcgggaagcctacggcactgggtacaaatgtagataatttagatttttgttttcaataatagcaggttggaaaatttagatttaaattacgtgggttctttttgtgccttgtgttagtctttcctataacaatgatggaagtgagtacattaaaatcatatatagaagtaccttaagattttatccataatggcagatgtagtgatgtataatgatggtggtactgcaacagattgggaccttcctactaatgagataatcagcttgaggaaaaggataaagaacatagaatatattgtcagtgagacaaataaatcacctctgtcgaaacatagtagcagcagcacaaagaatgaaattgatgacaaggaaagcagcagcaccaagaacagcggcaatgtaaggagcaccaaacagaaggaaattgactacgtatacagaagcattgaaaagaaagttaaagttttcggtcgagacaaggtccatgaagatataaggtgcttcataatggaccggctaccgatgcaccaagctccgactccagtaaaccttattctgtgattggcatatatggaattacaggttctgggaagactactctggcacaatatgtttgtgagtatgagaagggtgaggtttcaatcctatcatgttcatccatgtgggaactacattcagtgccggtgaaatattttgtgatatgctggaccagatcacgcaacagcggccctctgatgccaacggtcctaaaagcctaaaaacagagttaaaagatctaacactacagcaaacgccaaaatatacagctactcttgttgactgtccaaattcaaaatacacagcttataagcaaggctgtatatgtttgctactaactcatacctataggcagctaagaccggtgttatgccaagtgacattgaagtgtacatagctgaccataagggaccagacccttccaaacctgaggagttgtgcagtcaggcttgcacagatcggctgaatatggtcaagaaatggtgaggcgccatgaaaaggactacgaccggagaaaagcaccaatcgatcccatggtggtgtatgctactggaggcagaaagagtcatgggcggtactccatgtttaatggagtgattgactccagagaggttagatctcagaggtcggggtcttcctccgaacgatcaggggctagaactcatcgccaatcagagcatgagttggaggttgcaagggtgcaagaggagataaggcaacgtgatgcattccaaaggcacaacatgagtactttgcctcattcttggcgcagcagcagaccgtgcttcaagcaactttccaacagcaggggataaacgtagtccttccacaatttcaacctccaccactgccaccaatatggggatcgggtacccaataccttctgcaagtcaaggatcggcggcacaagggccccagatttaccatactccacctgcatagatactagcacctggagaccagttctacggccgatgctggaactacatttgtaaatgcaatcttcggtccaccctctggaggcagcggccaaaactccaatcatctgagaggtggcttgtcacactcggatttaagggcaaactcgggcgcatctcaaatgtgtgctaggatcaagtctcacacatatgatggctcatggtacagaaatcaatgtcatatctttattaaataatcggagtttttttacaaaataactaaatacaatacaccatatggcgacgagatcctccaccaacaaagttgactgggagacgacggcatagatctctccgaactcatcgtaacatccttcatgctctttatcttgcagtacctgtctttgacctggtgtgattatagcaagggtgagctcccatacggtcatcgctcagcaagtgtgggaaataatgtgtatgagctcacttacggtgggagctcatgtgtagtgtaaggctgatcaacaaataatggttaaggctgagcattgcttttaataagttggtcaaaattttattagc

SEQ ID NO: 213664 - DNA, 905 bp, Zea Mays
ctaacacagaactaccaaaccgaccgagccacaaacttcacccctgcattttctcccttctccgtccaggccctggtgcccgtgaatctcgtgcggcaagtgggcgccaccgccggactacgccaggtgcccagttcctcgtcgagaattgtagctcatagcccaactttcattggagggccagatttcacaaaatacaagggggagattttgatctttattttttggaagaaggttgctacaaaggttggtttatgttttcttttaccaatttttgtttatccatgatatatttagttggtaggaaatgcttgtttatgtttctcttgccaatttgtgttcttgtgtgtttatgttacttttttactacatgtgatgatgcagaggacatcctggatgtataacttatcaaggctagatctatcatacatatccgaggtccataggtttattgatgtcgctacgaaccatgcttgtagaacaaagacaaagcacatttattgtccatgcatggattgcaaaaatgatgttgtatttgatggctgagaacaaatcatatctcatctagtatgccgagaatttatgaaggattacataacttcgacaaagcatagagtgggtttctcttcgctttatacaacttgaaaacctacaaacgtcaatgatagatttcagtttgttcacgagacacaacaacctcttccacagagcgaacatgtagtgtcaaatgttactaatcatggttacgctggaggaaatgaacgtgattgaacttgttggtcaattgttttcaattgctgtatggaatcaaaaacaaggcaacacaatgttaaaaggcaaagacctttctctttgatgtgttatcgggataacatcttattgacaaaggtagattgtaatccaat

SEQ ID NO: 213665 - DNA, 1096 bp, Zea Mays
gtgagaggctccaactcgcaactccgcagctgagcacgccgaaaagctcatcagtgctcatcccctgctggcccgttctcagtcccagtgagaggctccatgaagatcctggtcgcggtgaagcgggtggtggactacgctgtcaaagtgcgcgtgaggccggacgggaggggcgtggagacggccaacgtgaagatgtccatgaatccattctgcgagatcgccgttgaggaggcgctgcggctccgggaggccggcgtcgccgctgaggtcgtcgccgccaccgtaggccctgcccagtccgccgacacgctccgcaccgcactcgccatgggcgccgatcgcgccgtccacgtgctccacgacccggaccctgcgcggcccctcctccctctcgccgttgccaagatccttcgcgccgtcgcgctccaggagaagcccggcctcgtcatcctcggcaagcaggcaattgatgatgattgcaaccaaactggacaaatgttagctggattgctcaagtggccacaaggaacctttgcctccaagaaaaacaaaaagctactgttgagcgagaagttgatggtggaattgaaaccatctgccttgatctgccagcagtgatcaccacggatttaagacttaaccagccaagatatgcaactttgcccaacataatgaaggcaaaatccaaagttattaagaaagtcgccgctgaagaccttggcgtagatattagatcagacatggaggtgattgaggtcaatgaaccaccaaaacgaaaagcaggggtgattctttcatgtgtcgacgagctccttgacaagttgaaaaatgaagcacgtgtcctttaaccatttgtatattattcctcgctgaatatggtctgacgttcatttatttaagttctctctccaaatgttcagacttcagaccatttacaaataaaataagtgttaacatgaaccaattaagatactacccctgaaacatttacctgctgaattccttccaaatagctgtttacttgattgtgtacaggctaagctatctcttttctgaaatttggaggaatatgacgtgcatgttaggattaagt

SEQ ID NO: 213666 - DNA, 3843 bp, Zea Mays
aaacaaagaaaaaaaggacgaggctctcctctggagagttccataacttccatctgagatctgacactttgcctttggatgcttctggcttcctccgcccccggtcctcttctagtcgcttcgtcttccatcgctttcctcatctctgcatcattctttcttagttgctttgtctttcgtcgccttccttatctactttgcttcagcctaaacgctttgtctactgccgccttactcatccgctctgattgtttagtgagatacatatttttcccactccttgctggtccgatccgttttggtggatatgttatgaggtttccatgtgcccatttttacacctgcttcgtttctatcagtttctttgccgtctcagcttcctcgtcaagttttttttccaatgtttcttttttccaagttatttacttccgccatattcgctatccggcgtatcctagcttggggattattgattcggctttatccggtgtcttccacttccacaatattctctacactcacgtttcctttatgtgctcgaagtatgtttattttttcgtcgagctgcgtcctttcgaccatgtcaagcgtcttctagcctagagcttgcttcgaccatgtctggcgtcttccagttccacgacattctcttcaattgtgtttttccgtgcttctatcgcttgctcggtgaagcttgtatgcatttctattttggagcatgaatggtgtggtcctacttattgatattcgtctggtaacacaatcgggaaggtgactttccatttggcatgcctttattatttcacaggcatccccttctttgcagacctccatttttggctgcctccaatgtcactatgacgtgttattttgttgttttcctttgggcgctgcattccatctctctatccttcatattgcttctttgttttctttacaatttttaagttactcttggtttttacccttcgatcctttctgtgctctaatgtatgaggtggaaaggcttgtcactactagatttgtttaggttttttcctacagcatgggaggcttccatatcttgatttgcaacatggaagtgtgtgtttcttgtttagtctactttatatggaaatagagtctggaaaagtcaattttttcctttgggtgccccttcaacattgtgctccccactcttgttcctttttatggctttgaatctatgatgtgcagagtttattttctttttcagtgtttcagcattttttaaaatagaaaactcgctgcattcccttgggccaatcgattctacattcgattcctctatgatttacaatctaagctaggatgtgcatattttggttttctttttccctagattttttcataagcctcgctgcattccctctgggcaatagagcggctgttgtagtgataaacctccaaatacatgacctgttaggattgtttctaattatttgtagccacgctattcttcaactttcgattctttcaattcgtcagagggcaagtttgctatttttccttcttttttatatgtaacttagatcagtttatggaaacaaatcagcagaaaagggtgacacgaccacctcattgacaaagaaagattcattttggaacggtgctgggtagtaccatgctcctagacaacaccaacgtggttcacaactgaaactatatatggtaccatcaaaacatgttttcacgatgttatgaggtcagattacaaatagaccatgttagcccaagcatgaaaagaaaggcgagtgtaaactgtaacctggtcacgggctcagggccgcgcccgaacttcacacgaccggaccaattcgcatcggcatcgaacacctctgccctctgtaaggagacccaaccccaccgcgcgcatccatgcccccaacgacggcggtgcgtcgggctccctcgccgcacgccgcgggcggagcgaggctcaccgcggagcaagcctctggtccgtgagaagcatgtctccgcaggaggcacggcaacgcgatcggtagattgcaacggcgaagagcttgatggtcactgcttgctgactggtttcagactgttgggtgctccaagggcagcaatagggcttgtctagaaagtgaggtacagacgtaaggcaacctctcattcctgatcaggcaggaaaagcatgtctctgaccaaacataatcgcttggagtgactagcggagaggtaaggtaaagctatatgctcactccagccgccagagaccagcaccaatgtttctctacgagctgcctttctgccgttccgctggctcgacccgatctttctggcatgacaccagtcaccagggggttgctgtcgtttaaactcgtctggatgcaatgttcaccaaaacgcaaaaccgtaaacaacaagctatacggccatttaaacgagcaatatggccgatttaaaataagaacatatacttttactaaataaaaatatacctttgcaaatatttctgaattaatttgacattttgactggctatggttgatgtgattcttctcttttgcttgatttgggtgattgagtgcgctaagtttttttttaaaaaaaaatatgtttatatccaatcctttccacaatttgtttagacttttcttgcattttcctcacttcttttctagagattaatctaatttctagatgctctaaaatccctttgcttgatctccaaatacttaatttggattcatcatcgatcaatcttatattgatacttttttcttgatttttagagttttagaaatatttttggagatttcaaatgattttagctttttctagaattgttttttgaactaaaaacagattttagatgaataaaagattgataagtacataaatatttctaagttcacgatagttcatagtttttaggtcaatgtgtggttattgcactcagtggaccctgttgatagcaatagtaaggtcttgttcagttcttcctattcgacatgaatttgataggattgaaaaaaaatatgaagaactttgacttactatgtatttaaactcattcaatcatgctcaatttatatggattgtgatcgaaacgagcatgccctaagtaggaataggcttaggcaaaataaaccaaaaccgaagaaccaaacctaactaatggaaaccaaaaccaaagtaattgaaacctaattaatcattagaaatttttgttccatgttttagaaaaccaaaagaaccgagataattttggttctagaacttagaagactggattaatcgaaaaaattgaaatgtaatagaagcacaatagactaatagaattttaggcatatctcaatatagttttcccaaatcctaagtgtataagcatacaacctcttcaaatcaatccatccctaatcctaattcttcatcctatcatctacgtacttttgctaaactctaaaattatactgtttttctatatttgctaaacttcggtctattcggttagaaactaaaactgaactattcggtttcgcctgtgaaatggaaatgtgcctttggtccatttctataatgttttgatgattaagtgtccaacacatactaagtgagttaattatgtgccaaataagcaagaagtgcaaatcatgtaacaatgtacatttctagacttagtacattgttttgtgtactaacatatattgtctaagtgctagaaacagagaaaagaagagaagaaaagaattgcaaatgacttggcttggtgcagctaaagtctagctcggtctagtgcaccggacagtgtccggtgcgccaggccagcctccggtgaacagaccactctcgggaaaaattcag

SEQ ID NO: 213667 - DNA, 2154 bp, Zea Mays
tcccacccacgtgtctttctccgccgccgaactcgaacgcggcacgcctcttgcctcaccacaggccagacgaagaagcggaccacacgccaccagctccacctccacggaatcagacggtctcctcctccttttctttctcccgtggactgcagcgccgccgggtagagatcccaaatctgcgcctcgaccaattcctccttcctccgagaatggtgatcctctatccagggtgtgttgctccaacagttcaccgtgattttctgcccagatgggtgctgctgaacaacagctcgagaatgtactgccatgtctttccagatagaacgaaaccgaaaaggcaatacaggcatcagtgggtgccttgcttctccaagggatcttcgttccaagatccactgccctctgtaaagccttcacgccttcttccagcagaggaactaaagacatatcccaacactgttcctgaggagatatttaacacgatcatactagatgactccgatgcattctatgtgctagaactgagcacgagtagagaatttagttcctctttggataaaaattctgcaatcttaatctgcctatttgatgtcgatggtgactccctattacaaagagtaccggcaatctatttgggtcaacctacacatggatttaagacagagcagcagatacccttccaaagtggttcagttgatatcgttactttcaaggggtcaaaactgaaaacgattaaagaagtctggatcggtcttgaatcaggttcatggagattagatggtttgagcttgaaagtaatacatggaccagttggtcagcctaaagaaataaatggaactccagaacagaagttcagcggtttgcagtacacttttgagaacgtaaatgtgttccttggagatgatggagcttcagtagctgaagcaaggccgacggctatcactgacctctcaggagtcggcctttctgatcttcaacaagggatgttatcctcaagaagcaaagcttcaagcattcaggaagtaagagaggatgggttgagagagtggcattggagggttcctgtacctgttgctgctccaaagatcggttgatggtttgcctgtgatcggttcaccttcagaagctggcggtgcacagccttcggtaaaaagtttcagcggtgtaaggaggccatggttgatactatcactagtactggttgcaggtgcagttgcactgaagtatggtgctggaggcgacagctttgcgctcacacccaccgacctctttgttggcactgcagggttcctagcaaacaaggttgctgttcttcttgcagcgttcatgcctatgctaagtgactcaaagagtgaagatggatctggtgacagcagttaattggacttctttaaaaatatgttagtaatagtttcctatagaagatctgtattcaagactggaacggaattagctgaagtgcaaaggacaagtcctagtttctgaactggaaaaaagaaccctctcatcttggtgactgtgtcatccttgcaagggttcaattcacagcaagagttcaagtgttgtggcagtttgaagtcagaaacttaagttgtatttttcagacatgcaggacagctgtgtatcattatatcaagaagaagaagaacaaaagtctaggatactttgaagcacccttagaaaggcatgaccagtacagcagaagaaaaacagagacacaaaaactaaggacatggccataaactacggagcgttttggcttttgccatacagcacaacttgatttcatcttagaaacttgagttgtagtatagtatactcacctatcggacactgaactgttaagatgatataccgactacagctttgttgtatgtaaaaatatgacatttgtgaggttaaatacacagtaactatcgaaacaaaatgcttggcgttgctccaaatcactatcatctgagtattttcttgaactggaagctctagagcgattgtagattcactcaacacaacattagcagtatacgactgtgaaaagttcctgtcaagttccgctgggcagtaattttttaaacttattatcttatacagatctgagatgaacaccatttcctaggcagaattatcattatattcaattgtaagtatttt

SEQ ID NO: 213668 - DNA, 953 bp, Zea Mays
attccattccgtcacatattcccgagaaaaaccgtcattcgcgcgcacacgcggtcgcagctgcggtgcccggctcaacgccgcggagatggagggcgacgccaccggagctgacggaggaggcggaggaggaagtggtgagcgttctagcttcgtgatcggcctcatcgagaaccgtgccaaggaggttggtgttgcagcctttgatttaagatcagcctcattgcacctatctcagtatatcgagacaagttgctcatatcacaatacaaatacactacttcatttctatgatcccatggttgtcattgtgcccccaaacaaaacagcagcagatggtatggttggagtttcagaactgatcgataaacattacccagcaaacaaaaagggtgctgtcattgtaagaagtctttcagctagggacccatctgctcttggtttagatacttactgcaagcagtattatctttgtcttgcggctgccactgcaacaattaaatggttaggccttgtttccaattgttccaatggttactggagcataaaagtcatcaagtgggtcaaggaggagtctcacctctggtgtagggctggagccagtggattagatagcatcctttccgctccagcgcactaatcggcgaccttctgttttgggtttccacggtcacgagtatagttgttcaactatcgttgtatttctagctatcctttagtgtgtgtgggttcgtgtggcattgtatgaggtttttatcctcaccttttcttcttaatataatgatacgcagctctcctgcgttttcgaaaaaaaaactccatgaaaaagcaactcatttttaggccatgcaattctacttttagagatgttttctgtgttgccacatttatttggatctgatttgaacatgataacacaaaaagcctttcctgttgtggaaatataaaaaaac

SEQ ID NO: 213669 - DNA, 561 bp, Zea Mays
attccattccgtcacatattcccgagaaaaaccgtcattcgcgcgcacacgcggtcgcagctgcggtgcccggctcaacgccgcggagatggagggcgacgccaccggagctgacggaggaggcggaggaggaagtggtgagcgttctagcttcgtgatcggcctcatcgagaaccgtgccaaggaggttggtgttgcagcctttgatttaagatcagcctcattgcacctatctcagtatatcgagacaagttgctcatatcacaatacaaatacactacttcatttctatgatcccatggttgtcattgtgcccccaaacaaaacagcagcagatggtatggttggagtttcagaactgatcgataaacattacccagcaaacaaaaaggtcactatggcacgtggttgctttgatgacacaaagggtgctgtcattgtaagaagtctttcagctagggacccatctgctcttggtttagatacttactgcaagcagtattatctttgtcttgcggctgccactgcaacaattaaatggccgggtcaagctgcccactt

SEQ ID NO: 213670 - DNA, 1293 bp, Zea Mays
tctcgaacaaaaacaactcacacacccaatttttaaaaatccgcgaagaaaagaccaagcaaaccgcccggacccagccgatcgagggagagtcagaactcggaaccacttgctgcaggctgcagctgcaagcatctgcacctgcattctgcaagcctcgtctggagctcttcccgttgcattggcggcggagatggcggcgaatctggaggacgtgccgtcgctggatctgatgcacgagttgctccgccgcatgaagtgcagctccaagcccgacaagcgcctcatcgtcatcggcccacctggctctggaaagggaacccagtctcccattattaaggatgaatattgcttgtgccatttagccactggtgatatgctgagggctgctgtggcggccaagacacctctagggagagcttgtttcagatgacatggttgtggggattattgatgaagctatgaagaaaccttcatgccagaaaggtttcattcttgatggctttcctagaactgtcactcaagcacagaagctcgatgaaatgttggcaaagcaaggtgctaatgttgacaaggtcctgaacttcgcaattgatgatgctatattggaagaacggattactggtcgttggatccattcggccagtggtaggacttaccattcaaaatttgcacctccaaagtctccgggagttgatgatgtaactggagagccattgattcaacgaagagatgacacagctgagatcttgaagtcaaggcttgaagccttccacagacaaactgaacctgtgattgagtattactccaagagaggcttagtggtgaacctgcccgcagagaaaccaccaaaggaagtgactgctgaggttttgaaagccctctcttgatgaagtgtccactcttcagtttcagcatgacatcgaccaaaaatcccattgccccagtttcttcaaaatttatacttaggccaacaacatggggtttttattttcggtatgctttttgtgtgaattcaccattttatcacagctttgacagagctcgggaactgtctggataatctatgttttgaatgagagaagtttttcagtaacaatactgatatgattacaacaattcacctttggaaaattttcttggcaaactttgttccatttcttacatcaatgctatgttacttctggctatggtattcatgaagatacctaaggtattctgttcgctcatccccatgctctgttgagcggagatactgatgtgctgcaatgtcaaataaacgtttggtgttgt

SEQ ID NO: 213671 - DNA, 2289 bp, Zea Mays
ttcatacttaatgatgggctcactgtctccagttgccactgacctgttgcaggtttgaagtcgcatgctgtgacactatacgaggcaggaaagcttggcgattcttgtattgctgatctatgcaatgatcttgccagtttagaggggaaacggtttgaaggtgtgctgcaggaattcgcaaaccatgctttcagcctccgatccttcctcgagtgcttgctgtctggcggaacttcaactgaaacagctgacctgactactagtgaagcaaataaccaggagagctctgtccaggacggtttagacaccacttgtgctaaggaaaacaagggaaacgacggtgtcgataatgctgctgagaactcgactcaaatttcagaatcctctgatggtggccaactatcactgcaggacaacaagatgggtgattctgatgctgcagatgcgaatagatcatcagcatcttcgacgatcgtgtctgaaggcaaggaaagcatactcaaacacgactgtgacagcgtccaggctccaaagctgggtgcttcagctgctaacggtccatcgtccaagagcaaaagaagttaccgagtcaacattcttcgctgcgagagcttagcttctctggccccatcgacgctagagagactccttgctagggactacgacatcgtagtgtccatgatccctctcccatcttcctcagtcctgccctgcccatctggtctagtgcattttggtccgccttcctactcttccatgacaccttggatgaaactggcgctgtacacatcagggacctgtggcccggtatctgccgttttcatgaaggggcagcggctgaggttgctgcctgaaccattggccagctgcgagaaggcgctgatatggtcctgggatcagtctgtggtgggcggactaggcggcaagttcgaagggaacttggtgaaaggaagccttcttctgcactacctgaactcgatgacaaagcattctgctgtggtggtgcagccattaagcgaacacgatcttgacgagacagggagcatcgtcaccatagacgtcccgctgccgctgaaaaatgccgatgggtcgattccatccacggtagtcggcaccgacttgccggaggaccaggtctcgagtctgatcctcttgttagaggacctgtccaatagagtcgagctgagcacggttgggtaccttcggttgctaaggcttcacagggcgaatgagtcgtccgagcacggaagctttgagtgggtgcctctgaccatagagttcggcatccctttgtttagcccacagctctgcgagaggatctgcgagagggtcgtcgagtcacagatgcttcagaaagacgacatcgctgagcactacgagacgatgcagaacgtgaggaggaggctgagagagctgtgcaccgagtaccaagcgaccggcccaacggcgaggctgttcaatcagcggggaggctccaagaacaactccccgcgcaaactggtgcagattgtcagcggcagatggagcccgttccatgatccgtctacgcccactcactccagtagcccccccgctgaacacgaaagagccaaaccagcgagacggcagagatgcttcaccgaagttctgagctttgatgggaggatcctcaggtcatatgcgctcactcctgtgtatgaggctgctacaagatcggtctccgaagagcagcctaccacgcccgcagcgaaaccggatcacgaggacgccaacaccaaggacgtggccttgccaggagtcaatctgatattcgatggaactgagttgcacccgtttgacatcgttgcctgcctccaagctcgccagcctctctcgttgatcgccgaggcgtcggccacatctttggcaatgaaatgacgacgagctgtccagtacgtactagtaaatttttcggtaggtgacggagtttagtagtgtatgccattgcattccttcttgctgctgtatgcagaattgcattcttcaagggggagcttctcaaagcaggcatttttctttaaaaaagaagcttgctgcaaggacctgttttgcactagcgttaggttttattgttattattatacctagagaaattttcgcacatttatcccctatcgtgttggggtccaggactcatgtaagcgtcagtcctaggtctaaattttatggccatcaaagggtcttttgttttggttgatgtttaaaagtcactttttagtcatggcccggttgaaccttttgtcctagttggtgttactgttagaatcatgc

SEQ ID NO: 213672 - DNA, 1986 bp, Zea Mays
gagggacacactgacgtcgacaggtacgtgcgtaacaatcacgtggcaacacgttgctccaaagcctccaacaccgagccccagcacccattaacgcttccaaaaataactgcagctgggcctgcgctcgcgaaggtacgccgaacgcgaccaatcaaccctcacgtacttcctatcctatatatcggcccgccgatcccgctgccttaacttgcatattttcttgacacttgacagccaccacacactagagagagagaaggagaacgcgcgtcgtatatgggtcaagaagaggccgtggcagcgaacggcaccggcaccggcgtcggccgcggcaggccgcacgccgtggtgatgccgtacccgctgcagggccacgtgatcccggcggtgcacctggcgctgcggctggccgagcgcgggttcgcggtcaccttcatcaacacggagtccgtgcaccaccagatcggcgccggcggcgacatcttcgccggcgtgcgcgcgcgggggggagggacgacgacggaggagctggacgtgcggtacgagctggtgagcgacggcttcccgctgggcttcgaccggtcgctgaaccacgaccagttcatggagggcgtcctgcacgtgctcccggcccacgtcgaggacctcctccgccgccgcgtcgtcgtggacccggccaccacgtgcctcgtcgtcgacaccttcttcgtgtggccggccacgctggcccggaagctgggcgtcccgtacgtgtccttctggacggagcccgcgctcatcttcaacctctactaccacatggacctgctcaccaagcacggccacttcaaatgcaaaggatacggacaccacctccgtcgtccaccgcatcatcttcagggcgttcgacgaggcccgccgcgccgactacgtcctgtgcaacaccgtggaggagctggagccgtcgaccatcgccgcgctgcgcgccgacaggcccttctacgccgtgggccccatcttcccggcgggcttcgcgcgcagcgccgtggccacgtccatgtggcccgagtccgacgactgctcgcggtggctgggcgcgcagccgcccggctccgtgctctacatctccttcggaagctacgcgcacgtgaccaagcaggagctgcgcgagatcgcgggcggcgtgctggccagcggcgcccggttcctgtgggtcatgcgcccggacatcgtcagctccgacgacccgcgcccgctgcccgagggcttcgccgaggccgcggccgccgcgggccgcggcctcgtcgtccagtggtgctgccaggtggaggtgctctcccaccccgccgtcgccgccttcctcacgcactgcggctggaactccgtcctggagagcgtctgggcgggggtgcccatgctctgcttcccgctgctcacggaccagctcaccaaccgccgcctcgtcgtgcgggagtggggcgccggcgtctccatcggggaccgcggcgcggtgcacgccgacgaggtcagggcgcggattcaagggatcatggccggggaacacggcctcaagctcagggaccaggtcaggaagctgagggccacactcgaggctgccgtggcgcccggtggctcgtcgcggcgcaacttcgacgacttcgtcgacgagctcaagcgaaagctcaaggacgccagctgagctggccccagaatacagctgcgatgtaggccttgtatccttagcgacagcgtgtattgcgtcacataaacttgtcttgatcgaagcgtgtatgcagtgtacggtaggacaatattgttctgcaggcttgctcaagtgatatgttgtacctgtgttaccaatgtaaacatgaatcgtgtcacgaatttcaagttagcttgatcagtctatagttttacgaagggctcgtttggtaaagctccgagagtcgatgtatagtgattccgaatgattaaaagtgaaatttatctgacgaaaaatgtttg

SEQ ID NO: 213673 - DNA, 891 bp, Zea Mays
gtgaaatggtcataatctcatagaaatcatgaaaggaggttccaactttttggagaaagattaggaggacgtatggatcagtgagaaaagatctggaaaaccgggtgtacgcgaccgacgaggcgaggagctacgccatctgtaaggcggaggaagtggagcaagagctggactccagcttccccgtcttcatcaaacccatgacccagtcccatgtcaccggaggcttctggctgggcctcccaaatcatttctgccggaagtacctgcccaagcgtgacgagacgatcaccctgctggatgaggatgacaacgagtcctacacgctatacctcgcattgaagcgaggcctcagcgctggatggagagggttcgctatccagcacaagctggttgatggagattgcttggtcttccagctgactgagagaacaaagttcaaggtaatcataattagagcaagttcttactatgaaagtgaggactgatgaaactaatagcttgtaatgtggtgtttggagcacagtttatggaggtgggctgcattggacaagcttgcatctggaaattgctgggtgtcttgaaccttttgggttacagagttatctcatgtacaaaatgtttacacagcccagtagctaccaattgctgatttgtgtacttcttgggcttaccacttgcacggttcagaaacctgcactatgtaagaggatgttgatggcaattgacctcattttgtaaatgatcctcgtttatcttggattcatttttagtgttcagtttggcagttgaccaccattgttggctttgtgtggtgttaatctacaaaaatgcgatcttgtgaattgcaccgggctagttatttgtgaggtgagagggccagggcatggc

SEQ ID NO: 213674 - DNA, 833 bp, Zea Mays
gaagaatccctctccccatattccttttctctgcgccggcaccgccgtctcgtctggtctgctcttccattccgttcgcctttgaaaactacccacaccacaaagaaatcgaagaggggaacagaggagagagaagggagatggcggaggcgacggcgtacgaggagcagcgccggaggcaggtggaggcgaacaagcggaagctggaggagcttcagctccactacctctccgccgccgtcagagaggccgcagccgccgccaagccctcgccggtcaagaagcggaaggcgcgggtgccgcttgacgccgccgactccgtgatggagccactacggcggtccggccggctcgccaacctccccgataagtccgtgcaccgcgaggaggttccaactttttggagaaagattaggaggacgtatggatcagtgagaaaagatctggaaaaccgggtgtacgcgaccgacgaggcgaggagctacgccatctgtaaggcggaggaagtggagcaagagctggactccagcttccccgtcttcatcaaacccatgacccagtcccatgtcaccggaggcttctggctgggcctcccaaatcatttctgccggaagtacctgcccaagcgtgacgagacgatcaccctgctggatgaggatgacaacgagtcctacacgctatacctcgcattgaagcgaggcctcagcgctggatggagagggttcgctatccagcacaagctggttgatggagattgcttggtcttccagctgactgagagaacaaagttcaagttgtgctgtgcagtcccccccgtgccggctctccacctg

SEQ ID NO: 213675 - DNA, 1758 bp, Zea Mays
gagcgaactgcaacattctggctctgccagccggtccagctgctctaccgcacggttcgcaccgcgcgcgtactggatccattagccgcgcgcgcgcgcatctctcgtgatatctctctctctctctctccctctctcgcccgagagatcctcctcgtcgggtcctactcctacctcatcagtcctccggtccatctgccctcctccggcacaaggacgacgatgcaggtcacgccggcggcgaccctgcggccggcggcggcgcacgcgttgcggctgtctacagatcactgcagggaagggccaaagattagggttcggttcggatcgaggaaactatcgtggacagaaacacttgatgatgccactagtctgacgagagccaccggaaggcaacgcaggcattcctcaatcctcaaagtgagctgctgggcagctgctcatcaccaacacaattctaatccccagcactttaaggcgactggcatacgaatcgcaaagacgctgcatgccttctatcagttctgccgaccacacacaatatttggaaccataataggcattacttcggtgtctctcctgccagtgaagagcctggacgattttacgttgatagctatatggggatttctcgaggctttggtcgccgcattatgtatgaacgtttatgtagtagggctgaaccagatatttgacattgagattgacaaggtcaataagccaaccctcccgttggcgtccggagagttttcggtgccaactgcagtagtattagtagtggcattcttggtcatgagcattagcatcggaataagatcgaagtctgctccattgatgtgtgctttgcttgttagcttccttcttggaagcgcatactccattgatgttccattactccggtggaagcgacatgcttttctagctgcattctgtataatctttgtgagggctgtagtggtccagttagctttctttgcacacatgcagcaacacgttctgaagaggcccttggcacctacaagatcggtggtctttgcaacatttttcatgtgttgcttcgctgcagtaatagcgctattcaaggatattcctgatgtcgatggagatagagatttcggcattcagtccatgactgtacgattaggccaacagagagtgcataggctctgcattaacattctcatgacagcatacgcagctgcaattttggtaggcgcatcatctacaaacctgtatcagaagattgtcattgtgtctggtcatgtcttgcttgcctccacactctggcaaagagcacaacaatttgacattgagaataaggattgtatcacacaattttatatgttcatttggaagttattctacgctgagtattttcttataccatttgtgtagtaaagaatcatgcgaagaacagcacccgtgctatagacatgtgaagggtaacaactggagcaaatgtaccgtatatattaagcattaatttaactttatcagttagttgtgggaatattactaactagcaagctagattatgaaccttgatctctcgatgataaaaaatatctaaaacatttggtttgtcttgagtcaaagttttgaaactttgaccaacaatatctataaaaaatatttttaaattaaagaaattatatattgcggtagatgttttaataataaatgtaatagtttaatttttatttagtcaatatttatgaatattttattattaatggtctaagtttcaaaatattgact

SEQ ID NO: 213676 - DNA, 3202 bp, Zea Mays
tgctctgctcacccctggcggccgggcccgttctttggaattattggtcgccattgttgtatttgtatgggcggccaactgttggagatagactgacgggcatgctacagtgttggtggcgttcgcagcagtcttgtccgatcatcaatggataccaccaacccagtagtagctgtgacttgcgacgagtgatggagcgtagcgcggctggagtggacgtacgcccggcttctcgtcttcgtccggggcgagccgagtccccctccctggctccctcctccttgccgcggcaccctgcatcgcgacgtccgcgaggagacttggcaggcgcggcaatccgcgtgttcttggggagctgctcgtttggtacgcgttgatgctgctaaaaaagattcttcactgctcggggatttggaacaaaggccgtggttcgaagctggtgtgttcgttcaattgtgcggaaagaaaggccagtgttatgtgtgaagtagtgaaggctagcaggtaggctggctctcgcctcgccgagcgatggatctcgagttcggtaggggcctgaggtccccaaaggccgtctggggttcttcttcttgcagagagactcgtggaagaccaccttgctgctggcgtaccagagcctgggggtggtctacggcgacctcagcatctctccgctgtacgtgtacaagagcaccttcgccgaggacatccagcattcggagacgaacgaggagatcttcggcgtgctctccttcgtcttctggacgctcaccctcatccctctcgtcaagtatgtctccgttgtcctgcgagctgacgacaatggcgagggaggaacgtttgccctctactctctgatttgcaggcacgccaatgtgagcctcctcccgaaccggcagatcgccgatgaggagctttccacctacaagctggaatgccctcctgaaatcaccgacaagtcccgcatcaaggtgtggcttgagcggcacaggaagctgcgcgtcgctctgctggtcatggttatgatcgggacatgcatggttatcggggacggtgttctcacgccagctatatccgtgttctcggcagtttcaggcctggagttctcgctgtccaaggatcaccgtgaatatgctgtcattccaataacctgtgtcatattagcattcctatttgccctccagcactatggtacgcaccgggttggatttctgttcgccccgatagttctagcctggctgttctgcatgagtgctcttggcctttataatatcatccactggaatcctcagatctaccaagctctaaatccgtcttacatgttcaagttcttaaaaaagactagaaaatatggatggatgtcacttggtggaatcttgctctgcatgacaggatcagaagcaatgtttgcagatcttggacatttctcatacagtgcaatccagcttgctttcacttgtctagtttaccccgcactgattttggcatacatgggtcaagctgcttacttatcaaaacatcatgacttttactctagctcacaagttggattttacatcgcagttccagataagatcagatggccagtgcttatattggcaattttggcttcggtggtcggaagccaagcaatcatcagcggaacattctcaatcatcaaccagagcctgtccctgagctgcttccctcgagtgaaagttgtacacacatctgagaaaattcatggccaaatatacatccccgagatcaattggttgcttatgatcctctgcattgctgtgaccgttgggtttagagatacaaaacacatgggaaatgcatctggtttggctgtgatcacagtgatgctggtgaccacgttcctgacatccttggtcatcgttctctgctggcacaggccaccgctgctggcgttggctttcctcctgttctttggatccatcgaggcgctttacttctccgcgtccctgatcaagttcctggaaggcgcgtggctccccatcctcctggcgctcatcctgatggccgtcatgctcatctggcactacacgaccatcaagaagtacgagttcgacctgcacaacaaggtgaccctggagtggctcctcgccctcggggacaggctgggcatggtccgcgtccccggcatcggcctcgtgtacacagacctgacgtcgggcgtcccggccaacttctcccggttcgtgaccaacctcccggcgttccaccaggtgctggtgttcgtgtgcgtcaagtcggtgccagtgccgtacgtattcccggcggagcggtacctcatcgggcgtgtcggcccgccgggccaccgctcgtaccggtgcatcgtgcgctacggctaccgcgacgtgcaccaggacgtggactcgttcgagacggagctcgtggagaccctggccacgttcataacgctggacgcctcgtaccgctgcagcgaggccagcgagcgggagctggagctggatcccggggagcaggagcggcggctgaccgtgatcgcgagcaacccgctgcggcgccgcgccagctacgacctccaggacagcgtgcagcattcggcagcgtccaccgtggaggtgcgcgccacggccgccgacagccttagccccagggacgcggagatcagctcggcggcggggccgaagcaggtgcggttcttcatcgacagccacgtggtgagcccggaggccgcggagaacaagcaggttgcggatgagctggaggcgctggcggcggcccgggaggccggcactgcgttcatcctggggcactcgcacgtgcagtgcaagcccgggtcgtcggtgctcaagcggttggcggtggacgtcgggtacaacttcctgcggcgcaactgccgcggcccggacgtcgcgctgcgcgtgccgccggcgtcactgctggaggtcggcatggtgtacgtgctttgattgaggctgagacgatgcgactttttcttatgaacatctgatatagtaatcacgactgttgtcagttttcccagtaacataatgaggccgttctgtatagcttagcttgttcgtacttctacagctgcaatatatagagtcaaaatactgtagaattagtaggagtcggtaacgaactctgtgtgcacgtctgtgcgtgagcgtgtgcgtttcaggcccagtttggttttgcttttggacagcatcagtctgtgcgtttt

SEQ ID NO: 213677 - DNA, 960 bp, Zea Mays
gatcaactatcgaccttggagctcctccgtcaggaaactgcaagtacatttgtgaaactctgtgagaaaagattgttctacacaaagagaacagaaaccttgactgtcaaactacaggagcaacaggaatggtttagtatgaagaataagattactagacaggagccacatgttgccaaatctcagagcaagcaaaacttcattgaaggggagaaacatgtcatatttaactcagaagggagcctggataagtttgaaagtgatgctcagaacaagcccgggaaactctacacacaactggtgtcagctcagctcaagatccaagacatcaaatcacaaagatcagcgcttcttttagaaatcagcagaatcaagcagattctggagcaagagaaaaacataattcctggttttcccgctgcactacagcagatggatatgaagtcattggaggaggaatacaaagctctgcaaggtgataaatcgggggaagttgagtacttccagtctcttgatgaaacaattaatgggatgaaggggattttggatcctgtcaaatgccaatgtggactggagtacaacttaaaacttgatggtgaagccatggatataagctaagcaagaacgaccacatacgcagatgcccatctccaccagatttcgtgcattttagatctgtacagtgtgagagatggattattctttggaaggtacagaatcttctcgcatgtatacgggtggatgctttgggcagagcttgacagcgtcatcgcgaataatatagaattctgatgttagaactatctggagcttgaacggactatacggccatagttttgttcaataattgtttttccttacgctcaaccgcttgtccagattgcagacataaaagatgctcatgttttttctaatcaccaactagagatggcaatgggtaaatacccatcgggattacta

SEQ ID NO: 213678 - DNA, 953 bp, Zea Mays
agcaatgaaggcgatagatcaactatcgaccttggagctcctccgtcaggaaactgcaagtacatttgtgaaactctgtgagaaaagattgttctacacaaagagaacagaaaccttgactgtcaaactacaggagcaacaggaatggtttagtatgaagaataagattactagacaggagccacatgttgccaaatctcagagcaagcaaaacttcattgaaggggagaaacatgtcatatttaactcagaagggagcctggataagtttaacaagcccgggaaactctacacacaactggtgtcagctcagctcaagatccaagacatcaaatcacaaagatcagcgcttcttttagaaatcagcagaatcaagcagattctggagcaagagaaaaacataattcctggctgcactacagcagatggatatgaagtcattggaggaggaatacaaagctctgcaaggtgataaatcgggggaagttgagtacttccagtctcttgatgaaacaattaatgggatgaaggggattttggatcctgtcaaatgccaatgtggactggagtacaacttaaaacttgatggtgaagccatggatataagctaagcaagaacgaccacatacgcagatgcccatctccaccagatttcgtgcattttagatctgtacagtgtgagagatggattattctttggaaggtacagaatcttctcgcatgtatacgggtggatgctttgggcagagcttgacagcgtcatcgcgaataatatagaattctgatgttagaactatctggagcttgaacggactatacggccatagttttgttcaataattgtttttccttacgctcaaccgcttgtccagattgcagacataaaagatgctcatgttttttctaatcaccaactagagatggcaatgggtaaatacccatcgggattacta

SEQ ID NO: 213679 - DNA, 1120 bp, Zea Mays
cgtaattcaacaactagctgcatcgtcttctccaccgaccttgccgccgtcgccccgccgctccatccggtaagacatggaggagtacctggagagcatgaaatctctccgctcctacatgaacgatctggaggacgacgccgcgaagcggtctgtcgaggagcagcagcagcgtacagccatcgacgctcacgacagcgatgtcgcgctagtgatggcgcaagcaaagcaggcgagcgaggaggccgagcggctggccacagcgagggctaaggtaggcatgcagatggccgagaagcagggaaggattgccacgctggacatcgagtgcgccacactgaagcaggttgccaaatctcagagcaagcaaaacttcattgaaggggagaaacatgtcatatttaactcagaagggagcctggataagtttaacaagcccgggaaactctacacacaactggtgtcagctcagctcaagatccaagacatcaaatcacaaagatcagcgcttcttttagaaatcagcagaatcaagcagattctggagcaagagaaaaacataattcctggttttcccgctgcactacagcagatggatatgaagtcattggaggaggaatacaaagctctgcaaggtgataaatcgggggaagttgagtacttccagtctcttgatgaaacaattaatgggatgaaggggattttggatcctgtcaaatgccaatgtggactggagtacaacttaaaacttgatggtgaagccatggatataagctaagcaagaacgaccacatacgcagatgcccatctccaccagatttcgtgcattttagatctgtacagtgtgagagatggattattctttggaaggtacagaatcttctcgcatgtatacgggtggatgctttgggcagagcttgacagcgtcatcgcgaataatatagaattctgatgttagaactatctggagcttgaacggactatacggccatagttttgttcaataattgtttttccttacgctcaaccgcttgtccagattgcagacataaaagatgctcatgttttttctaatcaccaactagagatggcaatgggtaaatacccatcgggattacta

SEQ ID NO: 213680 - DNA, 1178 bp, Zea Mays
cgtaattcaacaactagctgcatcgtcttctccaccgaccttgccgccgtcgccccgccgctccatccggtaagacatggaggagtacctggagagcatgaaatctctccgctcctacatgaacgatctggaggacgacgccgcgaagcggtctgtcgaggagcagcagcagcgtacagccatcgacgctcacgacagcgatgtcgcgctagtgatggcgcaagcaaagcaggcgagcgaggaggccgagcggctggccacagcgagggctaaggtaggcatgcagatggccgagaagcagggaaggattgccacgctggacatcgagtgcgccacactgaagcaggttgccaaatctcagagcaagcaaaacttcattgaagtttttaatcaaacaggaaagtgatgctcagaacaagcccgggaaactctacacacaactggtgtcagctcagctcaagatccaagacatcaaatcacaaagatcagcgcttcttttagaaatcagcagaatcaagcagattctggagcaagagaaaaacataattcctggttttcccgtaatttcattgctcatgtttaaacattgatcatgttaaattcttcctatatgcattgtcatctggtccttgcaggctgcactacagcagatggatatgaagtcattggaggaggaatacaaagctctgcaaggtgataaatcgggggaagttgagtacttccagtctcttgatgaaacaattaatgggatgaaggggattttggatcctgtcaaatgccaatgtggactggagtacaacttaaaacttgatggtgaagccatggatataagctaagcaagaacgaccacatacgcagatgcccatctccaccagatttcgtgcattttagatctgtacagtgtgagagatggattattctttggaaggtacagaatcttctcgcatgtatacgggtggatgctttgggcagagcttgacagcgtcatcgcgaataatatagaattctgatgttagaactatctggagcttgaacggactatacggccatagttttgttcaataattgtttttccttacgctcaaccgcttgtccagattgcagacataaaagatgctcatgttttttctaatcaccaactagagatggcaatgggtaaatacccatcgggattacta

SEQ ID NO: 213681 - DNA, 1254 bp, Zea Mays
cgtaattcaacaactagctgcatcgtcttctccaccgaccttgccgccgtcgccccgccgctccatccggtaagacatggaggagtacctggagagcatgaaatctctccgctcctacatgaacgatctggaggacgacgccgcgaagcggtctgtcgaggagcagcagcagcgtacagccatcgacgctcacgacagcgatgtcgcgctagtgatggcgcaagcaaagcaggcgagcgaggaggccgagcggctggccacagcgagggctaaggtaggcatgcagatggccgagaagcagggaaggattgccacgctggacatcgagtgcgccacactgaagcagaccttggagctcctccgtcaggaaactgcaagtacatttgtgaaactctgtgagaaaagattgttctacacaaagagaacagaaaccttgactgtcaaactacaggagcaacaggaatggtttagtatgaagaataagattactagacaggagccacatgttgccaaatctcagagcaagcaaaacttcattgaagtttttaatcaaacaggaaagtgatgctcagaacaagcccgggaaactctacacacaactggtgtcagctcagctcaagatccaagacatcaaatcacaaagatcagcgcttcttttagaaatcagcagaatcaagcagattctggagcaagagaaaaacataattcctggctgcactacagcagatggatatgaagtcattggaggaggaatacaaagctctgcaaggtgataaatcgggggaagttgagtacttccagtctcttgatgaaacaattaatgggatgaaggggattttggatcctgtcaaatgccaatgtggactggagtacaacttaaaacttgatggtgaagccatggatataagctaagcaagaacgaccacatacgcagatgcccatctccaccagatttcgtgcattttagatctgtacagtgtgagagatggattattctttggaaggtacagaatcttctcgcatgtatacgggtggatgctttgggcagagcttgacagcgtcatcgcgaataatatagaattctgatgttagaactatctggagcttgaacggactatacggccatagttttgttcaataattgtttttccttacgctcaaccgcttgtccagattgcagacataaaagatgctcatgttttttctaatcaccaactagagatggcaatgggtaaatacccatcgggattacta

SEQ ID NO: 213682 - DNA, 1262 bp, Zea Mays
cgtaattcaacaactagctgcatcgtcttctccaccgaccttgccgccgtcgccccgccgctccatccggtaagacatggaggagtacctggagagcatgaaatctctccgctcctacatgaacgatctggaggacgacgccgcgaagcggtctgtcgaggagcagcagcagcgtacagccatcgacgctcacgacagcgatgtcgcgctagtgatggcgcaagcaaagcaggcgagcgaggaggccgagcggctggccacagcgagggctaaggtaggcatgcagatggccgagaagcagggaaggattgccacgctggacatcgagtgcgccacactgaagcagaccttggagctcctccgtcaggaaactgcaagtacatttgtgaaactctgtgagaaaagattgttctacacaaagagaacagaaaccttgactgtcaaactacaggagcaacaggaatggtttagtatgaagaataagattactagacaggagccacatgttgccaaatctcagagcaagcaaaacttcattgaagtttttaatcaaacaggaaagtgatgctcagaacaagcccgggaaactctacacacaactggtgtcagctcagctcaagatccaagacatcaaatcacaaagatcagcgcttcttttagaaatcagcagaatcaagcagattctggagcaagagaaaaacataattcctggttttcccgctgcactacagcagatggatatgaagtcattggaggaggaatacaaagctctgcaaggtgataaatcgggggaagttgagtacttccagtctcttgatgaaacaattaatgggatgaaggggattttggatcctgtcaaatgccaatgtggactggagtacaacttaaaacttgatggtgaagccatggatataagctaagcaagaacgaccacatacgcagatgcccatctccaccagatttcgtgcattttagatctgtacagtgtgagagatggattattctttggaaggtacagaatcttctcgcatgtatacgggtggatgctttgggcagagcttgacagcgtcatcgcgaataatatagaattctgatgttagaactatctggagcttgaacggactatacggccatagttttgttcaataattgtttttccttacgctcaaccgcttgtccagattgcagacataaaagatgctcatgttttttctaatcaccaactagagatggcaatgggtaaatacccatcgggattacta

SEQ ID NO: 213683 - DNA, 1588 bp, Zea Mays
cgtaattcaacaactagctgcatcgtcttctccaccgaccttgccgccgtcgccccgccgctccatccggtaagacatggaggagtacctggagagcatgaaatctctccgctcctacatgaacgatctggaggacgacgccgcgaagcggtctgtcgaggagcagcagcagcgtacagccatcgacgctcacgacagcgatgtcgcgctagtgatggcgcaagcaaagcaggcgagcgaggaggccgagcggctggccacagcgagggctaaggtaggcatgcagatggccgagaagcagggaaggattgccacgctggacatcgagtgcgccacactgaagcaggaatggtttagtatgaagaataagattactagacaggagccacatgttgccaaatctcagagcaagcaaaacttcattgaaggtacaggtttctctgaaaacagaaaaaatacttagcgtctttccatgccatttcatgcctgtgttgtattcatgttgacatgcttccacatatggggagtttattgcacagggtacattagccatttcatgtgtgacatattttattattgtttacattgtgtgtctgttaaactagtgattctgctttctcccctcctaccgaggtctattgaaatctacataatcttgccttttcagatgtatggatacaagattatgcaaaacatagatgagtagctagtcaaatcatcaaaactgaataatttgtaatttcgactggacttggatgtggtgtttacatgcaggggagaaacatgtcatatttaactcagaagggagcctggataagtttgttagtatttactctcctccctcccttcccacaactatgcttttcagtttttaatcaaacaggaaagtgatgctcagaacaagcccgggaaactctacacacaactggtgtcagctcagctcaagatccaagacatcaaatcacaaagatcagcgcttcttttagaaatcagcagaatcaagcagattctggagcaagagaaaaacataattcctggttttcccgctgcactacagcagatggatatgaagtcattggaggaggaatacaaagctctgcaaggtgataaatcgggggaagttgagtacttccagtctcttgatgaaacaattaatgggatgaaggggattttggatcctgtcaaatgccaatgtggactggagtacaacttaaaacttgatggtgaagccatggatataagctaagcaagaacgaccacatacgcagatgcccatctccaccagatttcgtgcattttagatctgtacagtgtgagagatggattattctttggaaggtacagaatcttctcgcatgtatacgggtggatgctttgggcagagcttgacagcgtcatcgcgaataatatagaattctgatgttagaactatctggagcttgaacggactatacggccatagttttgttcaataattgtttttccttacgctcaaccgcttgtccagattgcagacataaaagatgctcatgttttttctaatcaccaactagagatggcaatgggtaaatacccatcgggattacta

SEQ ID NO: 213684 - DNA, 1708 bp, Zea Mays
ccgattcgtaattcaacaactagctgcatcgtcttctccaccgaccttgccgccgtcgccccgccgctccatccggtaagacatggaggagtacctggagagcatgaaatctctccgctcctacatgaacgatctggaggacgacgccgcgaagcggtctgtcgaggagcagcagcagcgtacagccatcgacgctcacgacagcgatgtcgcgctagtgatggcgcaagcaaagcaggcgagcgaggaggccgagcggctggccacagcgagggctaaggtaggcatgcagatggccgagaagcagggaaggattgccacgctggacatcgagtgcgccacactgaagcagaccttggagctcctccgtcaggaaactgcaagtacatttgtgaaactctgtgagaaaagattgttctacacaaagagaacagaaaccttgactgtcaaactacaggagcaacaggaatggtttagtatgaagaataagattactagacaggagccacatgttgccaaatctcagagcaagcaaaacttcattgaaggtacaggtttctctgaaaacagaaaaaatacttagcgtctttccatgccatttcatgcctgtgttgtattcatgttgacatgcttccacatatggggagtttattgcacagggtacattagccatttcatgtgtgacatattttattattgtttacattgtgtgtctgttaaactagtgattctgctttctcccctcctaccgaggtctattgaaatctacataatcttgccttttcagatgtatggatacaagattatgcaaaacatagatgagtagctagtcaaatcatcaaaactgaataatttgtaatttcgactggacttggatgtggtgtttacatgcaggggagaaacatgtcatatttaactcagaagggagcctggataagtttgttagtatttactctcctccctcccttcccacaactatgcttttcagtttttaatcaaacaggaaagtgatgctcagaacaagcccgggaaactctacacacaactggtgtcagctcagctcaagatccaagacatcaaatcacaaagatcagcgcttcttttagaaatcagcagaatcaagcagattctggagcaagagaaaaacataattcctggttttcccgctgcactacagcagatggatatgaagtcattggaggaggaatacaaagctctgcaaggtgataaatcgggggaagttgagtacttccagtctcttgatgaaacaattaatgggatgaaggggattttggatcctgtcaaatgccaatgtggactggagtacaacttaaaacttgatggtgaagccatggatataagctaagcaagaacgaccacatacgcagatgcccatctccaccagatttcgtgcattttagatctgtacagtgtgagagatggattattctttggaaggtacagaatcttctcgcatgtatacgggtggatgctttgggcagagcttgacagcgtcatcgcgaataatatagaattctgatgttagaactatctggagcttgaacggactatacggccatagttttgttcaataattgtttttccttacgctcaaccgcttgtccagattgcagacataaaagatgctcatgttttttctaatcaccaactagagatggcaatgggtaaatacccatcgggattacta

SEQ ID NO: 213685 - DNA, 1248 bp, Zea Mays
ccgattcgtaattcaacaactagctgcatcgtcttctccaccgaccttgccgccgtcgccccgccgctccatccggtaagacatggaggagtacctggagagcatgaaatctctccgctcctacatgaacgatctggaggacgacgccgcgaagcggtctgtcgaggagcagcagcagcgtacagccatcgacgctcacgacagcgatgtcgcgctagtgatggcgcaagcaaagcaggcgagcgaggaggccgagcggctggccacagcgagggctaaggtaggcatgcagatggccgagaagcagggaaggattgccacgctggacatcgagtgcgccacactgaagcaggaatggtttagtatgaagaataagattactagacaggagccacatgttgccaaatctcagagcaagcaaaacttcattgaaggggagaaacatgtcatatttaactcagaagggagcctggataagtttgttagtatttactctcctccctcccttcccacaactatgcttttcagtttttaatcaaacaggaaagtgatgctcagaacaagcccgggaaactctacacacaactggtgtcagctcagctcaagatccaagacatcaaatcacaaagatcagcgcttcttttagaaatcagcagaatcaagcagattctggagcaagagaaaaacataattcctggttttcccgctgcactacagcagatggatatgaagtcattggaggaggaatacaaagctctgcaaggtgataaatcgggggaagttgagtacttccagtctcttgatgaaacaattaatgggatgaaggggattttggatcctgtcaaatgccaatgtggactggagtacaacttaaaacttgatggtgaagccatggatataagctaagcaagaacgaccacatacgcagatgcccatctccaccagatttcgtgcattttagatctgtacagtgtgagagatggattattctttggaaggtacagaatcttctcgcatgtatacgggtggatgctttgggcagagcttgacagcgtcatcgcgaataatatagaattctgatgttagaactatctggagcttgaacggactatacggccatagttttgttcaataattgtttttccttacgctcaaccgcttgtccagattgcagacataaaagatgctcatgttttttctaatcaccaactagagatggcaatgggtaaatacccatcgggattacta

SEQ ID NO: 213686 - DNA, 1701 bp, Zea Mays
gccgattcgtaattcaacaactagctgcatcgtcttctccaccgaccttgccgccgtcgccccgccgctccatccggtaagacatggaggagtacctggagagcatgaaatctctccgctcctacatgaacgatctggaggacgacgccgcgaagcggtctgtcgaggagcagcagcagcgtacagccatcgacgctcacgacagcgatgtcgcgctagtgatggcgcaagcaaagcaggcgagcgaggaggccgagcggctggccacagcgagggctaaggtaggcatgcagatggccgagaagcagggaaggattgccacgctggacatcgagtgcgccacactgaagcagaccttggagctcctccgtcaggaaactgcaagtacatttgtgaaactctgtgagaaaagattgttctacacaaagagaacagaaaccttgactgtcaaactacaggagcaacaggaatggtttagtatgaagaataagattactagacaggagccacatgttgccaaatctcagagcaagcaaaacttcattgaaggtacaggtttctctgaaaacagaaaaaatacttagcgtctttccatgccatttcatgcctgtgttgtattcatgttgacatgcttccacatatggggagtttattgcacagggtacattagccatttcatgtgtgacatattttattattgtttacattgtgtgtctgttaaactagtgattctgctttctcccctcctaccgaggtctattgaaatctacataatcttgccttttcagatgtatggatacaagattatgcaaaacatagatgagtagctagtcaaatcatcaaaactgaataatttgtaatttcgactggacttggatgtggtgtttacatgcaggggagaaacatgtcatatttaactcagaagggagcctggataagtttgttagtatttactctcctccctcccttcccacaactatgcttttcagtttttaatcaaacaggaaagtgatgctcagaacaagcccgggaaactctacacacaactggtgtcagctcagctcaagatccaagacatcaaatcacaaagatcagcgcttcttttagaaatcagcagaatcaagcagattctggagcaagagaaaaacataattcctggctgcactacagcagatggatatgaagtcattggaggaggaatacaaagctctgcaaggtgataaatcgggggaagttgagtacttccagtctcttgatgaaacaattaatgggatgaaggggattttggatcctgtcaaatgccaatgtggactggagtacaacttaaaacttgatggtgaagccatggatataagctaagcaagaacgaccacatacgcagatgcccatctccaccagatttcgtgcattttagatctgtacagtgtgagagatggattattctttggaaggtacagaatcttctcgcatgtatacgggtggatgctttgggcagagcttgacagcgtcatcgcgaataatatagaattctgatgttagaactatctggagcttgaacggactatacggccatagttttgttcaataattgtttttccttacgctcaaccgcttgtccagattgcagacataaaagatgctcatgttttttctaatcaccaactagagatggcaatgggtaaatacccatcgggattacta

SEQ ID NO: 213687 - DNA, 935 bp, Zea Mays
cgaattcagtgttgggccctgggtatgcagaaccagatcatgtgccatgcttgccggacccttctgctctacccgcgtggcgcgtccagcgtctgctgcgcggtttgccaggccatcaccaccgtgccgccaccaggattggagatggctcagcttatatgtggtggctgtcgaactttgctgatgtatactcgcagtgcagacaccgtaaggtgttcatgttgcaacacagtgaaccttgttagaccagtgaataatatagctcatgtgaactgcggccagtgccggacaactttgatgtatccatacggcgcaccttcagtaaaatgtgccgtgtgcaattatgtcacagctactggagtaaatactgtggcacccaccccatctgcgaggccaacatcagatgggtcttcatatagtggctcatctacttctgctcctaaatctcaatctcagaatgtaactgttgttgttgagaaccctatgacagttgatgacaagggaaaacttgtcagcagcgttgtagttggagtcacagctgggaaagagtgattttattgacacttcgtacatcattgttgtgttttctatacacgaagttggaaaataccatgtagcatccaatgatgggttgcttggacttccttgaagaacagagatacaccacgaaatatttgtaggaccttcctaatgaaaccatggtcggacgttgtgtattgattcttttgtgtgtataatatgagctccgttagacttgtgtaatcagatatttgggggaaatacagcatagtttcgctgtacgtgcattgttacacaatttgtttgtttgttagtttgtgctgtcttggttgttcatagctcgttactgctttacttgtataccgtattcatgtgaaacgagtaagctgcaatttttgttaacgacttactaggag

SEQ ID NO: 213688 - DNA, 1528 bp, Zea Mays
ggcatacgccaccacgcacgcagtaggcagtactagaggcatgggcgttgccgccccccgagttactgaagaaaacctggcagcactatttataaattgtggacaggttgtggactgtcgcatgtgtggagacccaaactcagtccttcggttcgccttcatagagttcactgatgaggagggtgcaagggctgctctgaatctgtcaggaactgtgctcggatattatcctgtcagggttctgccatcgaaaactgccattgcaccagtcaatccaacattcctacccaggtctgatgatgaacgggaaatgtgtgcgaggactatttactgcacaaacattgacaagaaggtcactcaggcagatctgaaattgttctttgagtctatatgtggagaggtctttcggctgaggttgcttggtgactaccatcattctactcgcatcgcttttgtggaatttgtgatggttagctagcaaaccttcttcatatttgtgcatttattttgagggaaatactttgcgcagaaattgcatgcagtgtgcggtttaaatatgtttttagcggtttaaaaatgataagaatacgctgcttgagattcgagtggatcatgtttggttggtcagtgcctccaagtgaaggtctgctgttcaaatgtctaagtctgcgtgctaatctacgctgactgtctaagactgagcctttttagtggtcctaactctggtagaaatgttaatacccgcgccttgtcactgtgttcctttttcttctaatttaagacatttcccagtagcttgtgaaggcaggggctcaattcaatgtatttgtaaaaatctgctgggcccccttttgttgtaacataactgttacctctctattttttgtttcaagaaacaaaccccgatggtaagagacatttgcttcttaatatttcaggcagaaagtgctaccgctgccctgaactgcagtggcgtgatactgggatccttgccaataagggtgagcccctcgaagactcccgtgcgtccccgtgcgcctcgccagctgatgcactagaggtgtcctaggtacaggaggtgcggaaggcactgcttatatatcatcatcatatatatataatagagaatagacatatatgaaagaggggaggggaaaagtggcgtcacttgttctaagttatgggctcggcctttttgttttgggttcttgcttcaccaccgtgtgactgagtactaaagtgcctacgtacgccccgggtcgacgccggctggcagggcccttttgtttactaccttgcacatagaaggagaggagatggagagcttctcactagaaggatcggaagcgcgcgcgggggggtctgcctgatgctcttgtccttgatgcaacaacaggcggaaaactcctggacttttaccctgctgttcagttgtttgctgctgtgtcctggttgctactgaaacaaactggttaaaaaaaacttgggtattggagactatgtgccctgcctgttggtttggttgcta

SEQ ID NO: 213689 - DNA, 885 bp, Zea Mays
ctcggggagcacaggttggggtgtggcatacgccaccacgcacgcagtaggcagtactagaggcatgggcgttgccgccccccgagttactgaagaaaacctggcagcactatttataaattgtggacaggttgtggactgtcgcatgtgtggagacccaaactcagtccttcggttcgccttcatagagttcactgatgaggagggtgcaagggctgctctgaatctgtcaggaactgtgctcggatattatcctgtcagggttctgccatcgaaaactgccattgcaccagtcaatccaacattcctacccaggtctgatgatgaacgggaaatgtgtgcgaggactatttactgcacaaacattgacaagaaggtcactcaggcagatctgaaattgttctttgagtctatatgtggagaggtctttcggctgaggttgcttggtgactaccatcattctactcgcatcgcttttgtggaatttgtgatggcagaaagtgctaccgctgccctgaactgcagtggcgtgatactgggatccttgccaataagggtgagcccctcgaagactcccgtgcgtccccgtgcgcctcgccagctgatgcactagaggtgtcctaggtacaggagggcccttttgtttactaccttgcacatagaaggagaggagatggagagcttctcactagaaggatcggaagcgcgcgcgggggggtctgcctgatgctcttgtccttgatgcaacaacaggcggaaaactcctggacttttaccctgctgttcagttgtttgctgctgtgtcctggttgctactgaaacaaactggttaaaaaaaacttgggtattggagactatgtgccctgcctgttggtttggttgcta

SEQ ID NO: 213690 - DNA, 1037 bp, Zea Mays
ctccgactccgatccaccccggcctatcctaggtcgagagaggaagaagagagcaggaggaggacgacgatggttggaggccgtcccctcttcgtgctcttcggctcctccatcgtgcagtacagcttcagcaacggcggatggggcgctgtgcttgccgacatctacgcccgcaaggctgatatcctgctaagaggatatactggctggaacacaaggcgggctgttcaagtcatggataaagtgttccctaaggattcagcagtgcagccgtctctggtgatagtttactttggtgggaacgactccatcgctgcccattcctccggcctcgggcctcatgtgccgctagacgagtacatagccaacatgagaaagatcgcggagcacctcaagagcctctccgagaagacgcgggtcattttcctgagctgcccgcctctgaacgaggagatgcttcggaagtcaaccagcagtagcatagccatactgagtgagatcgtccggaccaacgagacctgccgcctgtactccgacgcctgcgtggctctgtgcaaggagatggagctcaaggtggtggatctctggcatgccatgcagaagagggaggactggatgactgcatgcttcacggatgggctgcatctgtctgaagaggggagcaacgtggtggtggaagagatcctcaaggtgctcaaggaggcggagtgggagccgtgcctgcactggaaggcgatgcccacggagttcgccgaggactcccccttcgacctcgtctcctccagcggcgacgccaccgtcaacccgtcggagtggacagtccacaggagaataccatgggactgactgaccttgtttctggccttatccctgggttggctccatgtctggactggaccaggatgcgtttgttctctgttgtgccttgatggaactggaatggctgggcgttgaagggactgtgtcataccaccatcttatctatttcatcagactatgagtttatcttctactgatgaagtctcagcggatatttt

SEQ ID NO: 213691 - DNA, 1176 bp, Zea Mays
tcggcctgtccgggcagccgctccgcctccacgaccccgcctccgccgccggcctcccggacatcgacaccttccgcggcaagctcgagcggctgcttcctcccgacgaccacgaccccggctggtcccgccgcttcgacgccgagctcggccccgtgcaccggtacttcggcccggacgcgccgctggacgtgcggcagcggatcgcgtacctgttcgcgatcctcgaccggtcgcccaggggcgtcggcgtcggcgtcggcgtcggcgagctggaggcctggctgcgctggcaggccgccgcccggctggacgccgtcacgcggagggagatggctccgcacgacacggaccgcgacggtgccgtcacgctgcgcgagttcttcgcagacaaaatggggtggtggatgcacaagtttgcgagcgcggacagagacggggatggctcgctcaacgccgtcgaattcaacgacttcctgcatcctgaagacagcagccaagagagcgtgatgctgtggctactcaaggacaagctaagcgagatggaccatgacggagacggcaggctaagccaggaggagttcgtcgctcaatctcacatcatcatctccggcgcgcgtcacgccgacgacggtggccatgcccatgaccttgagcgtgccgaagctgcgaagaagttcacagaactggacgccgacaaggacaactacttgacggtggaagaagcgcgctgcgtactgcagagcctcgtcacgggggagttctcctatgctacctcacatgccaagttcttgatgaaggtggtggcctcatcgaatcgaacgaagctgatgtgaaccatgacggcaaactgtcgctggaggagatgctagacgactacatatccttctacagcaccgtgtatatggatgatcattacgccagtgaaggtgaagtagatagtgattcccgcgacgagctatgagcggttaagccaggacaggacagcaagtcggaggttctttactttcaaatacactaggattttgcagccaaaggaaatgggaaatgtacaatcagctgcaaacatcaattttgttcatcgagaccagctgcctatctattctacagtttctttatataaaaaaagctaaacatataacataagggaatgcgtttttttttccaaaaagaaaa

SEQ ID NO: 213692 - DNA, 1976 bp, Zea Mays
ccccccttccgttgacgggacgcgcacaagcgcagccgcagagcacactccactgcggccgaagcaaagcaagacggcggtattagtatttagtaggcaccagcggcttgctccgcgtcgtcatcggtagcgcgcggtcgcgactggcttctcgtagcagcttatctacagtaataatcacaagagcctactaggtggtgggagcagagcagcacttgcaattgcaaccagcaagcgcaagagaggagggggctcaagagtcttgacgcgtctagccttcgcagaaaagggttcaagcgagaagagggggggagagggcacgggttcagagctggaggagatggagagcccgcgcagccccgaggcggagatcggccaccgggtggaggacctctgggaggtggcggagccgcagctctcgccgtcggagaagctcaactcctgcttcgaggacatccccgtcgcgtccttcccgcgcacgcacccgtcccaagtcattgagattccttcagatgcaagtcttgctgaaactgtagaaatattatccaaaaacaaaatcttgagtgcacccataagaaatgttgaggctccagaagatgctagttggatggacaaatacatcggcattgtggaatttgctggtattgccatgtggttgctcagtcagtctgatgctgcagttaatgggacggttggttcgggaccaggatcgcctgtctccagtctagtttcgaggttgggttctttcacattcagaaggacatcatctggaagattagaaactgctactgattctgaatcagacgaagcagcatcggttggtgggagcttttttgaaaccctgacttcctctgaattctacaagaatacaaaggttggcgatatctcagggagcttccgctgggcaccatttcttgcactgcagacatctgacacattccttaccatgttgctgcttctatccaagtacagaatgaagagccttccagttgtagaagtgggaggagataagattgagaacattatcacacaatcctctgtcgtacacatgcttgcagagtgtgttgggctctcctggtttgagaactggggaactaagaaactctctgaactggggcttcctgtcatgaaaccatcgaaacttgtcaaggtaagcgaagatcagccagttctgaaagctttccaactgatgagggaaaagggagttggtggcttgccagtcatggacacaagtggagcaaatgccattggtaatattagcatcagagatgtccagtatcttttaactgctcccaagatatacaaagagcacaggtcaatcacgacaaaggatttccttagtgctgttcgacaccacctccaggagcagcgtgaggcctcaccgttgctgcatgatgtcatcacttgcaaaaaggatgatacaatcaaggacatcatactgaagctggactctgagaagatccacaggatctacgttgtggatgacaaagggaacaccgagggagtcatcaccttgagggacataatctccaagctggtgcatgagccacgccattactttggggatttctttgatggtgttgttcccctgcctgcaaacagcaccgtatgacacatcttcgcggtccaatcacactgatgtatctgtgcaaatatgctgttcactagattcagctttgtcatgctgcaaagcaaaattctgcgggagaagatgtattttatcttgtttttaaccttggagtcagactctttcgctgtcatatacctgggtaacttcatcattcacctggtggagtctactacatgtcgtagggtcaaccaaaatatcctcgtgctgcagtgcatccatatattttttccgtcgtggcagcataacgagatatggctgctgaaaagtttcagtccgatgtcagtgtacaccgtacagctacaggattcggttgcagtcagtttattatctcagttgtcaatagaac

SEQ ID NO: 213693 - DNA, 2287 bp, Zea Mays
acgaaacgctaaagccactttcttctcctgccaacacaagccgttttttcctccccaagtgatctagccagccacggagccaccactcgccaggtgcttcaaatagtcgccccggacaggcaggcgcacgcaacgcaactagtctccttcaccgtccgtccattcctccgatccgcaggaggattaggaacttaggatcggggaccggcggagcccgacgaccttctcggtccacccgcccggcgatcgaaccatggcgctcggcgagggcggggatcacggcgccgccctgcccctcatcgcggaccaggcgaaacatgccgccgccggtggcatcgtccgaagcgggagcatgtggacggcagcggcacacgtgatcacggcggtgatcgggtccggcgtgctgtcgctggcgtggagcatcgcgcagctggggtgggtggccgggccggccgccatgctcgtcttcgcggccgtgacggcgctccagtccacgctcttcgccgactgctaccggtcgccggaccccgagcacggccctcaccgcaaccgcacctacgccaaagccgtggaccgcaacctaggtagcaacagctcgtgggtgtgcatgcttctgcagcacacggccctgttcggctatggcatcgcctacaccatcacggcctccatcagctgcaggcaagaagcatacctgggcttgcggctcgctgcagtacgtgagcctgtacggctgcggcgtcgcctaccatcaccaccgccactagcataaggtagccgctgctggccggtaacaaaatttcccagtctctctctctctctctcaaaacttcctcacagctcaagctgcctgcagtcgtgtgcttccttccctctctttttagcgagcagggcgctgacgatggttgcttctgttgtccttctgccggttaaatttctctgaatatttttgttcttaactgcgcgtgctttgcttgtgtgttccatacgtgtcgggctgctctgctgttggatgtcgcagggcgatcctgaaggcgaactgctaccacgagcatgggcatgacgcgcactgcgactacgatggcaactactacatgctcatcttcggcggcgtccagctcctcctctccttcatacctgacttccacgacatggcgtggctctccgtcgtcgccgcggccatgtcgttctcgtacgccttcatcggcctcggcctcggcctcgcaagaaccattgctaacgggacgatcaaaggaagcataacaggtgttcggatgaggacgcctatgcagaaggtttggcgcgtctcgcaggccatcggcgacattgccttcgcgtacccctactccttgatcctcctggaaatacaggacaccctgaagtcaccgccggccgagaacaagacgatgaagagggcgtcgatgatctcgatcctcgtcacgacattcttctacctctgctgcggctgcttgggctacgccgccttcggcagcgacgcgccgggcaacctccttaccggcttcggcttgtacggtccgtactggctcatcgacttcgccaacgcgtgcatcatcctccacctgctgggcgggtaccaggtgtacagccagccgatattccagttcgcggagcggctcttggcggagcggttcccggacagcgggttcgtgaacggcggctcctacaccgtccggttcgcgtgcctgcgggcgtgccgggtgaacccgctgcgcgtgtgcctccggacgctgtacgtggcctccacgacggcggtggccgtggcgttaccctacttcaacgaggtgctggcgctgctgggcgcgctcagcttctggccgctggccatctacttccccgtggagatgtacttcatccagcggaacgtgcgccggtggtccgcccgctgggtcgtcctgcagaccttcagcgtcgtctgcctgctcgtcagcgccttcgcgctcgtcggctccatcgaggggctaatcagcaagaagctaggctaggctaggctagtccgatccagtggaacaccctatctgcaggtctgtcagagagtggcagcgggctcggttattttcacagtgttgccttcctcctgcatcgggttgtaagttgtaacatatatgtcgtattgatactggcgagttcagatgttcagaagaagtagaacgcgtgtgacgattctgtgttgctgaatgccgcctatgtagtttcagttccagaatttgagggtttccatatctgcagcagtttcctcaaaatatttctcctatattttactatacaggca

SEQ ID NO: 213694 - DNA, 1710 bp, Zea Mays
acgaaacgctaaagccactttcttctcctgccaacacaagccgttttttcctccccaagtgatctagccagccacggagccaccactcgccaggtgcttcaaatagtcgccccggacaggcaggcgcacgcaacgcaactagtctccttcaccgtccgtccattcctccgatccgcaggaggattaggaacttaggatcggggaccggcggagcccgacgaccttctcggtccacccgcccggcgatcgaaccatggcgctcggcgagggcggggatcacggcgccgccctgcccctcatcgcggaccaggcgaaacatgccgccgccggtggcatcgtccgaagcggtagcaacagctcgtgggtgtgcatgcttctgcagcacacggccctgttcggctatggcatcgcctacaccatcacggcctccatcagctgcagggcgatcctgaaggcgaactgctaccacgagcatgggcatgacgcgcactgcgactacgatggcaactactacatgctcatcttcggcggcgtccagctcctcctctccttcatacctgacttccacgacatggcgtggctctccgtcgtcgccgcggccatgtcgttctcgtacgccttcatcggcctcggcctcggcctcgcaagaaccattgctaacgggacgatcaaaggaagcataacaggtgttcggatgaggacgcctatgcagaaggtttggcgcgtctcgcaggccatcggcgacattgccttcgcgtacccctactccttgatcctcctggaaatacaggacaccctgaagtcaccgccggccgagaacaagacgatgaagagggcgtcgatgatctcgatcctcgtcacgacattcttctacctctgctgcggctgcttgggctacgccgccttcggcagcgacgcgccgggcaacctccttaccggcttcggcttgtacggtccgtactggctcatcgacttcgccaacgcgtgcatcatcctccacctgctgggcgggtaccaggtgtacagccagccgatattccagttcgcggagcggctcttggcggagcggttcccggacagcgggttcgtgaacggcggctcctacaccgtccggttcgcgtgcctgcgggcgtgccgggtgaacccgctgcgcgtgtgcctccggacgctgtacgtggcctccacgacggcggtggccgtggcgttaccctacttcaacgaggtgctggcgctgctgggcgcgctcagcttctggccgctggccatctacttccccgtggagatgtacttcatccagcggaacgtgcgccggtggtccgcccgctgggtcgtcctgcagaccttcagcgtcgtctgcctgctcgtcagcgccttcgcgctcgtcggctccatcgaggggctaatcagcaagaagctaggctaggctaggctagtccgatccagtggaacaccctatctgcaggtctgtcagagagtggcagcgggctcggttattttcacagtgttgccttcctcctgcatcgggttgtaagttgtaacatatatgtcgtattgatactggcgagttcagatgttcagaagaagtagaacgcgtgtgacgattctgtgttgctgaatgccgcctatgtagtttcagttccagaatttgagggtttccatatctgcagcagtttcctcaaaatatttctcctatattttactatacaggca

SEQ ID NO: 213695 - DNA, 2039 bp, Zea Mays
acgaaacgctaaagccactttcttctcctgccaacacaagccgttttttcctccccaagtgatctagccagccacggagccaccactcgccaggtgcttcaaatagtcgccccggacaggcaggcgcacgcaacgcaactagtctccttcaccgtccgtccattcctccgatccgcaggaggattaggaacttaggatcggggaccggcggagcccgacgaccttctcggtccacccgcccggcgatcgaaccatggcgctcggcgagggcggggatcacggcgccgccctgcccctcatcgcggaccaggcgaaacatgccgccgccggtggcatcgtccgaagcgggagcatgtggacggcagcggcacacgtgatcacggcggtgatcgggtccggcgtgctgtcgctggcgtggagcatcgcgcagctggggtgggtggccgggccggccgccatgctcgtcttcgcggccgtgacggcgctccagtccacgctcttcgccgactgctaccggtcgccggaccccgagcacggccctcaccgcaaccgcacctacgccaaagccgtggaccgcaacctaggtagcaacagctcgtgggtgtgcatgcttctgcagcacacggccctgttcggctatggcatcgcctacaccatcacggcctccatcagctgcaggcaagaagcatacctgggcttgcggctcgctgcagtacgtgagcctgtacggctgcggcgtcgcctaccatcaccaccgccactagcataagggcgatcctgaaggcgaactgctaccacgagcatgggcatgacgcgcactgcgactacgatggcaactactacatgctcatcttcggcggcgtccagctcctcctctccttcatacctgacttccacgacatggcgtggctctccgtcgtcgccgcggccatgtcgttctcgtacgccttcatcggcctcggcctcggcctcgcaagaaccattgctaacgggacgatcaaaggaagcataacaggtgttcggatgaggacgcctatgcagaaggtttggcgcgtctcgcaggccatcggcgacattgccttcgcgtacccctactccttgatcctcctggaaatacaggacaccctgaagtcaccgccggccgagaacaagacgatgaagagggcgtcgatgatctcgatcctcgtcacgacattcttctacctctgctgcggctgcttgggctacgccgccttcggcagcgacgcgccgggcaacctccttaccggcttcggcttgtacggtccgtactggctcatcgacttcgccaacgcgtgcatcatcctccacctgctgggcgggtaccaggtgtacagccagccgatattccagttcgcggagcggctcttggcggagcggttcccggacagcgggttcgtgaacggcggctcctacaccgtccggttcgcgtgcctgcgggcgtgccgggtgaacccgctgcgcgtgtgcctccggacgctgtacgtggcctccacgacggcggtggccgtggcgttaccctacttcaacgaggtgctggcgctgctgggcgcgctcagcttctggccgctggccatctacttccccgtggagatgtacttcatccagcggaacgtgcgccggtggtccgcccgctgggtcgtcctgcagaccttcagcgtcgtctgcctgctcgtcagcgccttcgcgctcgtcggctccatcgaggggctaatcagcaagaagctaggctaggctaggctagtccgatccagtggaacaccctatctgcaggtctgtcagagagtggcagcgggctcggttattttcacagtgttgccttcctcctgcatcgggttgtaagttgtaacatatatgtcgtattgatactggcgagttcagatgttcagaagaagtagaacgcgtgtgacgattctgtgttgctgaatgccgcctatgtagtttcagttccagaatttgagggtttccatatctgcagcagtttcctcaaaatatttctcctatattttactatacaggca

SEQ ID NO: 213696 - DNA, 1409 bp, Zea Mays
caacaggggtcttttttggaaatgctttgggctgatctgcaaacttgcggtgaaattccggcttcggcggtttggccagcctccttccgcggggtggatttggatagcgcggcgcagagaaaaatggcggcttcggctctccacctccaccgccggcgggtgtgaagcttcagcagaggcagctgcgctcgcggcagggtggcctatctcgaagacttttgaaagttgtgtcctattacagtctcacaactccaccatataaactggatgctctggaaccttacatgagcaagaggacagttgaacttcactggggtaagcaccatcaagattacgtggatggcttgaataagcagctggctaccagccctctgtatggatatacgctggaggatctgataaaagaagcctacaacaatggcaatccattaccagaatataacaatgcagcacaggtctggaaccatcacttcttctgggaatcgatgcaaccagaaggtggtggcttacctgagggaggtgtgctgcagcagattgaaaaggattttggctcgtttactaattttagggaagagtttatccgctcagccttacaactattggggtctggttgggtttggcttgtcttgaagagaaatgagacaaagctttcagtggttcatacacaaaatgctatcttcccacttgcttttggtgatatcccaatcatcaacctagacttatgcatgcttactacttagactacaaggatgataggctaacatatgttacaaactttatgggccatctcatctcttggcatactatcactctacgcatgatgcgtgcagagtcttttgtgaaccttggtgagcctaatattccggtggcatgagctacagatacaccctagttatcatcatgaggcatcctttggatacgtcgggtcaaatcctgctggaggaaccagagacatgcttatcactcgaatgccatacacgcaaagataagctgcatgcttgattttcaccactgcccttggatattgctacagggaaaccactagtcagcatccaatctgaagatgtgcagcaatgcagctttagaagctctgggagctggtaggtagcgatccaacttgggcttcgaagccatggcgctttcgctagatggctatgcccgtggcacgatctggagcagcagaccagacgctactggtgacagatgattcagacatgaaaagattaaattgtgcccggccctatgacactcgaacagggttccccaggaccctgaattctgctgtcatcacagacaaaacgaaggacacgaagaatagattgtgtcggatcggtagcagcagtgacaggtttgccacaaccagactaaaaggagacaggctactgaaactgaatcatcatcatcatcat

SEQ ID NO: 213697 - DNA, 1413 bp, Zea Mays
caacaggggtcttttttggaaatgctttgggctgatctgcaaacttgcggtgaaattccggcttcggcggtttggccagcctccttccgcggggtggatttggatagcgcggcgcagagaaaaatggcggcttcggctctccacctccaccgccggcgggtgtgaagcttcagcagaggcagctgcgctcgcggcagggtggcctatctcgaagacttttgaaagttgtgtcctattacagtctcacaactccaccatataaactggatgctctggaaccttacatgagcaagaggacagttgaacttcactggggtaagcaccatcaagattacgtggatggcttgaataagcagctggctaccagccctctgtatggatatacgctggaggatctgataaaagaagcctacaacaatggcaatccattaccagaatataacaatgcagcacaggtctggaaccatcacttcttctgggaatcgatgcaaccagaaggtggtggcttacctgagggaggtgtgctgcagcagattgaaaaggattttggctcgtttactaattttagggaagagtttatccgctcagccttacaactattggggtctggttgggtttggcttgtcttgaagagaaatgagacaaagctttcagtggttcatacacaaaatgctatcttcccacttgcttttggtgatatcccaatcatcaacctagacttatggtagcatgcttactacttagactacaaggatgataggctaacatatgttacaaactttatgggccatctcatctcttggcatactatcactctacgcatgatgcgtgcagagtcttttgtgaaccttggtgagcctaatattccggtggcatgagctacagatacaccctagttatcatcatgaggcatcctttggatacgtcgggtcaaatcctgctggaggaaccagagacatgcttatcactcgaatgccatacacgcaaagataagctgcatgcttgattttcaccactgcccttggatattgctacagggaaaccactagtcagcatccaatctgaagatgtgcagcaatgcagctttagaagctctgggagctggtaggtagcgatccaacttgggcttcgaagccatggcgctttcgctagatggctatgcccgtggcacgatctggagcagcagaccagacgctactggtgacagatgattcagacatgaaaagattaaattgtgcccggccctatgacactcgaacagggttccccaggaccctgaattctgctgtcatcacagacaaaacgaaggacacgaagaatagattgtgtcggatcggtagcagcagtgacaggtttgccacaaccagactaaaaggagacaggctactgaaactgaatcatcatcatcatcat

SEQ ID NO: 213698 - DNA, 2931 bp, Zea Mays
ctcgcgttcggatcagcctctctgtcatgtcgccaatacagcgcagcgctccgcatccacccaaatcggagtagggtcgtcagtacagcgcgacgccctgccagtagccgccgcaaccggccgccggtcccgcgcgaggggaggaggagatcactgcggcggcgtcttctgccggtttgaggattcggggcatcactgcagcagctggcgccaggctccagcatggacacggcgtttctgagtcctccgcttgcccgtaatctggtttatgacgagtttgccgttcttcaccccactagctacccttttcatactcttcggtatttgagatgcaatccaatgtattcgagaccgctgctaacaatagcaccagcctcaccatcaaggggcttgattcagagagtggccgcactacctgatgttgatgatttcttctgggagaaggatcctactccaatacttgacacaattgatgcacccattcatttgaaaaatctatctagtaaggagctcaagcagttagccgatgaagttcgttcagaaatagctttcataatgtccagaaaatgccaaccgtgtggtgctgatcgctcagttgtggagctgacaattgctatacattatgtgttcaatgccccaatggataagatactatgggatgctggtcaacataaaaatggcctttctgggttcacgtcgcgttttgagagcgagtatgatccctttggtgctggacatggatgcaatagtctatccgctggccttgggatggcggttgcaagggatataaatgggagaaaaaatcgaatagtgacagttataagtaattggacaaccatggctggccaggtgtacgaggcaatgggtcatgctggcttcctcgattccaacatggtggttattctaaatgatagctgtcataccttgcttcctaaagcagatggcggggcaaagatgtcagtcaatgccttttctagtgctctaagcaagattcaatccagcaaaggatttaggaggtttagagaggctgctaagggacttgccaaatggtttggcaaaggaatgcacgaatttgctgccaaagttgatgagtatgctcgtggtatgataggtcctcatggtgcaactctttttgaagaacttggattatattatattggtcctattgatggacgtaacattgatgatctcatctgtgtacttaaggaagttgcgagcttagattcaactggcccagtacttgtacatgtaattactgggactgaaaatgacactggtggaattattggaagtgaaataaatgcagttgaggaagggccttcaaactcaagccctgatcttctaaagtttttaggaactggactttctaggacatataatgactgctttgtagaagcactaacagcagaagcagagaatgacaagcgcattgtggtagttcatggcggcatgggaatcgatcgatcactccgcttattccagtccaggttcccagacagattttttgacttgggcatcgctgagcaacatgctgttaccttttctgctggtttggcatgcggaggtctaaagcctttctgcataattccatccacatttcttcagcgagcatatgatcagataattgaagatgtggacatgcaaaagataccagttcgatttgctatcacaaatgctggtctggtaggatctgagggtccaactaattcaggaccatttgatattacattcatgtcatgcttgccaaacatgattgtcatgtcaccatctaatgaggatgaacttattgacatggtggcaacagctgcaatgattgaggacagacctatttgcttccgctatcctaggggtgccattgttgggactagtggaagtgtaacatatgggaatccatttgagattggtaaaggagagattcttgtcgagggaaaagagatagcttttcttggctatggcgaggtggtccagagatgcttgattgctcgatctcttttatccaactttggcattcaggcgacagttgcaaatgcgaggttttgcaagccgcttgacatcgacctaatcagaacgctgtgccagcagcatagttttcttatcacagtggaagaaggaacggttggtggctttggatcacatgtctcacagtttatttctctcgatggtctacttgacggtcgaacaaagtggcgacccattgtgctgccagacaggtacattgagcatgcatcgctcgcagagcaacttgacctggctggcctaactgctcatcacatagctgcaactgcattgaccctcctagggcgtcatcgtgatgcccttctgttgatgaagtaggggaaggaaccaccaagaagaatggaattggatagataaaaggcaatatgtgcaaaagttgattcggaggacgctcatcatgctgttttacgattgtgttgtctggatagaactgaagcgtgccgtgggaggtggccaaatgcacaaatcccaaagagggacgacaaagcctatagcaccatagattaatagtcacggtgtatatactaaaaagaatttacagagcaccgatgtaacgttgttactgtgcatgttaatactgaaattgtggtacgacgccaactaggagaatgagctggagctgacatgtttcagttaatgtaataaagctacttagttttgtatgtaccaattcattccttaatattggaattcataaccctagcgttcacctcattcggtcgtctctcagtagtttcagagttcagttcagttttcggtgtcgaaacttttagtttctgtcacacttttttatttcagttaggagcaaagggatgtgcagcgctttgaccacgaggtgtgggatgacacagccacctctcaatgtgtgcgtacttgtagggcgtcgatcaccactttgttttagccagtttggtt

SEQ ID NO: 213699 - DNA, 2254 bp, Zea Mays
actcccaagttcaccttcctctgcctgtagatcttctagagtcccgtatacggtttcgtctttcgtgtcccacttccatggcggcggcggcgcagctgcacggatcggctgcggccacggtggcatatcgcgggactcgagcctactcagttccatcctcatgccggtggccgcagtctggttccccgaagctttcgatttctacaagtggagtcagtatgaagccatttggctttgctgctaaactttcaacaaaatgtgcaaatgagaatgctcgagttgaagaattagatttgaggtcagaccagatgaaggaattacaggtggaggagcaggttattccccagaagaggagtgctaaaatccatgacttctgccttgggatcccttttggtggtcttttattctctatggggcttctaggatacatcttctccagaagcaccataagtcttgtcttgggcattgcaccagggctagccactctgctacttggcactctcagtctgaagttctggaggagcggcagatccagcttcctgcttatcttggctcaggcagcaatttctgctttcctggcatggaaatactctcatgcttacttcttgactccttccttggggcttctacgcgtcactgagcactgcaatgggttgtttctacgcctatgtgctacttgcgggaggaaatcccccgcctaagaagttggcagccattccaccgcagtaggaagagccgaagagggattcggtttaggatcagctaggttttcattaaagttcagtacaactgggccgacaaaggcccaactaagccgctcgaaccgcttcggcgcctcccacccctcggacagaccagccttcaaactagggtttactcctcccgctccgagaaagcaaacaagcgtcagctccgccggcggcctcgcgctctctcccccgccgcaccttctctacgccaggactgccaagatgaagctcgtcagattccttatgaagctaaacaatgagacggtcaccatcgagctcaagaacggcacggttgtccacggcaccatcaccggtgttgacataagcatgaacactcatctgaagacagtgaagcttacactgaaagggaagaaccctgtaacgctggaccacctcagcgtgcgaggaaacaacatccgctattacattcttcctgacagcttaaacttggagactttgctggtagaggaaacccctagggttaagcctaagaagccgactacaggaaagcctttggggcgtgggcgcggccgtggtcgtggacgtggtcggggacgggggccgccacgctgacaggtttcccctgctgtgggctctcttgcctgacaagttccctgtacgatgtaacctctttcccccgcacgctgtgtgaaagaaccgttgcattgttacccttctgatgaacgtggactgaaatatctcaatctcaagtggttcttgtgaaatcaaccatgtctatttggtctaccattcgtgtgtgtcttagggtttacactgtagttaactcgtgatgtctttcccctggcatacataaatggtgccgcagaacttcggatgttctaggttgtatgcttgtttcacatggggattgttgatctggagatatgccttgcagtcgtgtctgcctctatttgatcttttagctctgcttgaagctgaattcccgtcgaccggagatactgattttgctgaagatctacagcttgctctcatacgacgccctgttggcatgcattgtgttttctgatgtgctgacaaacatgctcggtaaaggatgttttgtttgccggagatactgatcatctggagctgccgattctttttgtctcaggatgttttgtttgcaacgtttatagagttggtcaaaatagacaagatcagcttacgaacagagatgaagatattagtggcgtgatattgatgtgattgtacatagtaaacagtcacctgtagctccctgtgctgtgtatactctgggcccatcttccaccttgatttctcccactttggtcggcgtcacctagcgatatagatggccaaacgggccggcacggcccgacccgacacggcccgacaggcccggctagcgaagcgtgccgtgcccagatgggccggcgtgccgcggcccaggcacggcccgtgagcctgttagtcgtgccgggccggcccggtggcactatggcctatctgagtatattgtagaatttagcaaaaaatgtgtagtt

SEQ ID NO: 213700 - DNA, 1218 bp, Zea Mays
agcagtttctcaaacactggccgagcgcaaaatttgaaaaccaaccctcaacctcaatcggggtgccggcgtccgacgaagtcgacgggccatccccattccccacccggcagtcggcagtccccacaccccaagacctctgaagagtcggaagaagaagcgggcgatggaagacggcgacgagagcgcggccgcggcggcggcgctggggctgagcccgcagcttttcgtcaacgaggtccacggcatcatagccgacatcagcgccgaggccttcgagtactgtctccaggcagcagccgcgccaggtgtcgtcggcgccgccacggctgcagagaaggccacggatctccagcggggattaaatgctattcaccatgttgtaaaggatcgactggataagagaatgaccaactgggagaaattctgctatcgacattgcttcgatgtacctgaaggttttgtggccgctgatgatgctaacaaggaatctgaaaaccttgaaagagagttgtcctcactggaaaggcaagctacgttcaaaagaagacttgattcttctgtctctgagatagaaaagttgtttgaagaagaaatggtgcagggaaatttgaaagatcttgtgaaggcaataccggttttgcaccagaaaataatagatgcaaatcagagaaggactgagattaggagcttggtagatcaacaggcttggaacacgaagagatcgagagacagcaagccataagcgctggagaagagtactgccagttcccactttccctcttcagttctcccgtgtataattaattaattatgttctctcgtgtatagttatgccatgtatttatatgccagtaaggcggtaaccaataacttatgtagcaggttctactgcatgtgttgaagacattcaagaggttgtcaacatcttacagagcaagtagcttgttgctcttttcctgattcatgttggttccacatagcgcctgcagcttgcttgcttggataaagcagtggtttgcccagttagtcttgttattgatcaaccgctattatttgatactggctccgtcccaaaatattagtcgttttagtattttaccagattcatatcatactcagtgtatgtcttttacatatgtctagattcattgttatttatttaaatatagacataaaattggtgagctagcctagtcccattttaatgttttttaa

SEQ ID NO: 213701 - DNA, 2086 bp, Zea Mays
agccagcccctcacatatacctccgccgcgcgctcccctcttccccccgctggccgctgctctcttcctccctcctcctcggtccactccaaccccaggcctgccgcggccacagacgggccgcgccgccgccgcagcttccgattccgcttccgccggccgttctgccgcgcgcgcgcctgtggcgcttgagcgggcggatttgttcggcccgttctttggccgccgccgttgcgctgcgccgtgttggcttccagttcccatccaggcgtcttgagattccccggccggagatctgcttaattcgtacctctctctggttctgaggcccctccgaggtggaggaggagctcgtgggtcgacgaaagaacaatcgtttctttgcccactcctgcggctgcttctccgtcccaggctttccagccatggaggaggtggaggtggctgtggccatgctagaggcaggttctccagacgagtccggcctctggggctcgtcaaccagaagagccccttggggatcgccaccggcagcggcaacccgctggagatgatgcccagcacagctgctgctgctgggtctccatctccacctcagtcgactagctatgcgcaaatgcgcgctcggcttagcagtgcgccagagtcctcacgagggctggatttggcctgctccagcagcaggtgtagccctcatccatttggagcccccaagctggtccagccactgtctgtgcagttccagattgggagtgttgcgcataggtacccgttccaccagcagcagtcgaggcagaagctgcaggccgagatgttcaggaggagcaacagtgggatcagcctcaagttcgatagccctagccccagcggtggtgctgctggcaccatgtcgtctgcgagatcattcatgtcgtcgttgagtatagacaggagcatggcgagcttggatgggaagcggccgttccatttggtaggcaccccggtggcgagcgacccagcagatgcgcaccgtgcgcccaaacggcgatgcacgggtagaggggaggatggaagaggcaagtgtgccaccactggcagatgccattgctcaaagagaaggaaactgcggattaagaggtcgattagagtgccagccattagcaacaaaatcgctgatatccctcctgatgagtactcgtggcgcaagtacgggcagaagccaattaagggttccccacacccgaggggttactacaaatgcagcagcgtcaggggctgcccagcaaggaagcacgtcgagcgatgtgtagacgacccggcgatgctaatcgtgacatacgaaggcgagcacagccacacccagctgccagcacagcctgcccagacctagaagatcagtaaatcgtcgctccattctggaagcgcggggagcatgcctttgcacctagatggtcatgtagaatctcaggccttcgattttcgattgcagcagcagcaatgaccatggagagaatcttatgagctgcttggcccccctcctgagtcactctgttacagatgcaagagaaggaaggaaaatgcagcgtccgacagcgaccggtgagctttgccggtgagcctgaagggttgaaagcaaagactgacaagaggaagtgaacaaccgcgcattgttgtgagggtggattaggatgggaagatttggcttttagcgtgcacaagttcacttgccatggactagcctctgtatgttgcttttgctttttctgaaatatcgcatcacctcttttgttgacaaaataaaaaagggtggggttgcatcccagtatcaaaggagggagctccgtactgaccccgctgcaagttaggaccatctgggttttccaggtgtaagcattccagaagggaaggtgcaaagctgttgttggtgtgatttgccacccccagtactgttgctcttgtgtaaagcattctgtgtaattaatgatttgtgccatctgcaatcttgaggatgaatggatgctctaactgaaactttgtacgcgggctaaagattatttattttgaaaaatcttctaaaccttttttcgcagcctaaaaataatttatt

SEQ ID NO: 213702 - DNA, 1131 bp, Zea Mays
ctcagttatagtagatgatggagttcttttaattcttaatctggaaggaattatggtctggctgctggatcatgggtgggtccatatgctatgtgccgggcatggcagacccttatccgcacaaatagagagcaagctgatgctgtcgatgggaaggaaaatttccctatggcgctatatgtcgtttcgggtgatgaagatggtgaaagaggtggagctccagttttttgtattgatgttgctgctcagctttgctccaatttcaataaaggacaatgtacatggtcacctattcttttgttgattcctctggttcttggccttgacaaaattaatccaaggtacatcccattactaaaggagacgtttaagttcccacaaagcttgggcattttaggtggaaaacctgggacgtcaacatacattgctggggtacaagaagatagggctctctacctagatccccatgacgttcagatggcggttgatattgcaccggataacttggaggcggacacttcctcgtaccactgcagtgttgtccgagatttggctctagaacaaatagacccatccctagccattggtttttactgtcgcgacaaagacgatttcgatgatttctgttctcgggcatctgagttggcagagaaagccaatggagcgccactctttactgtcatgcagtcagtccagccatcgaagcaaatgtataaacaggatgatgggctgtgctgttgttctggcagtagcatggccaacgaggactacgaccttgacgcctctggcgaggcaggagaagagtggcagatcctctaaaccaggggaacaccgatgacatgttgggttgaaaaactcatggaacatgttgcctgaatgccctcgtttgcgtgtgaatacaggggatgatttgttgtctctgagtgtcgttgggtgccaacgtctcttaggaggaaaatgttcaaaacgtgacaggtggaaatgttcaaaacatacacttgtgaatgatcatagataaatgtatttaacattccatttgctaacaccatttcaccacggcgtgttcgcttttcaattgcttgctagaaatgcacctgccaaaatgtgaagaatatgtcatgttgattagat

SEQ ID NO: 213703 - DNA, 1235 bp, Zea Mays
gagagatatatgaattggctattctgggttgcttataatgaccaaatgttcatatgcagccatacgacccagattatatacgggtcttacacctatttggtgactctgaagcttgtgctttctctattcacaatttacttcaagctggaaggaattatggtctggctgctggatcatgggtgggtccatatgctatgtgccgggcatggcagacccttatccgcacaaatagagagcaagctgatgctgtcgatgggaaggaaaatttccctatggcgctatatgtcgtttcgggtgatgaagatggtgaaagaggtggagctccagttttttgtattgatgttgctgctcagctttgctccaatttcaataaaggacaatgtacatggtcacctattcttttgttgattcctctggttcttggccttgacaaaattaatccaaggtacatcccattactaaaggagacgtttaagttcccacaaagcttgggcattttaggtggaaaacctgggacgtcaacatacattgctggggtacaagaagatagggctctctacctagatccccatgacgttcagatggcggttgatattgcaccggataacttggaggcggacacttcctcgtaccactgcagtgttgtccgagatttggctctagaacaaatagacccatccctagccattggtttttactgtcgcgacaaagacgatttcgatgatttctgttctcgggcatctgagttggcagagaaagccaatggagcgccactctttactgtcatgcagtcagtccagccatcgaagcaaatgtataaacaggatgatgggctgtgctgttgttctggcagtagcatggccaacgaggactacgaccttgacgcctctggcgaggcaggagaagagtggcagatcctctaaaccaggggaacaccgatgacatgttgggttgaaaaactcatggaacatgttgcctgaatgccctcgtttgcgtgtgaatacaggggatgatttgttgtctctgagtgtcgttgggtgccaacgtctcttaggaggaaaatgttcaaaacgtgacaggtggaaatgttcaaaacatacacttgtgaatgatcatagataaatgtatttaacattccatttgctaacaccatttcaccacggcgtgttcgcttttcaattgcttgctagaaatgcacctgccaaaatgtgaagaatatgtcatgttgattagat

SEQ ID NO: 213704 - DNA, 1352 bp, Zea Mays
gccgcgacctcatctcgccgaggactggatcgccggaggggtttgatgcaatacctggttccaagctcactagtgatgtgaactggggatgcatggttagaagtagtcagatgctggttgctcaggcactgatttttcaccatcttggaagatcttggagaaagccatcagagaagccatacgacccagattatatacgggtcttacacctatttggtgactctgaagcttgtgctttctctattcacaatttacttcaagctggaaggaattatggtctggctgctggatcatgggtgggtccatatgctatgtgccgggcatggcagacccttatccgcacaaatagagagcaagctgatgctgtcgatgggaaggaaaatttccctatggcgctatatgtcgtttcgggtgatgaagatggtgaaagaggtggagctccagttttttgtattgatgttgctgctcagctttgctccaatttcaataaaggacaatgtacatggtcacctattcttttgttgattcctctggttcttggccttgacaaaattaatccaaggtacatcccattactaaaggagacgtttaagttcccacaaagcttgggcattttaggtggaaaacctgggacgtcaacatacattgctggggtacaagaagatagggctctctacctagatccccatgacgttcagatggcggttgatattgcaccggataacttggaggcggacacttcctcgtaccactgcagtgttgtccgagatttggctctagaacaaatagacccatccctagccattggtttttactgtcgcgacaaagacgatttcgatgatttctgttctcgggcatctgagttggcagagaaagccaatggagcgccactctttactgtcatgcagtcagtccagccatcgaagcaaatgtataaacaggatgatgggctgtgctgttgttctggcagtagcatggccaacgaggactacgaccttgacgcctctggcgaggcaggagaagagtggcagatcctctaaaccaggggaacaccgatgacatgttgggttgaaaaactcatggaacatgttgcctgaatgccctcgtttgcgtgtgaatacaggggatgatttgttgtctctgagtgtcgttgggtgccaacgtctcttaggaggaaaatgttcaaaacgtgacaggtggaaatgttcaaaacatacacttgtgaatgatcatagataaatgtatttaacattccatttgctaacaccatttcaccacggcgtgttcgcttttcaattgcttgctagaaatgcacctgccaaaatgtgaagaatatgtcatgttgattagat

SEQ ID NO: 213705 - DNA, 1465 bp, Zea Mays
cgatccctcgccgcgacctcatctcgccgaggactggatcgccggaggggtgtcgcccgaggaagaggagtctggcggctcggattctgacagcggccatgctgcgtttctggaagatttctcttccaggatatggatcacttaccggaaagggtttgatgcaatacctggttccaagctcactagtgatgtgaactggggatgcatggttagaagtagtcagatgctggttgctcaggcactgatttttcaccatcttggaagatcttggagaaagccatcagagaagccatacgacccagattatatacgggtcttacacctatttggtgactctgaagcttgtgctttctctattcacaatttacttcaagctggaaggaattatggtctggctgctggatcatgggtgggtccatatgctatgtgccgggcatggcagacccttatccgcacaaatagagagcaagctgatgctgtcgatgggaaggaaaatttccctatggcgctatatgtcgtttcgggtgatgaagatggtgaaagaggtggagctccagttttttgtattgatgttgctgctcagctttgctccaatttcaataaaggacaatgtacatggtcacctattcttttgttgattcctctggttcttggccttgacaaaattaatccaaggtacatcccattactaaaggagacgtttaagttcccacaaagcttgggcattttaggtggaaaacctgggacgtcaacatacattgctggggtacaagaagatagggctctctacctagatccccatgacgttcagatggcggttgatattgcaccggataacttggaggcggacacttcctcgtaccactgcagtgttgtccgagatttggctctagaacaaatagacccatccctagccattggtttttactgtcgcgacaaagacgatttcgatgatttctgttctcgggcatctgagttggcagagaaagccaatggagcgccactctttactgtcatgcagtcagtccagccatcgaagcaaatgtataaacaggatgatgggctgtgctgttgttctggcagtagcatggccaacgaggactacgaccttgacgcctctggcgaggcaggagaagagtggcagatcctctaaaccaggggaacaccgatgacatgttgggttgaaaaactcatggaacatgttgcctgaatgccctcgtttgcgtgtgaatacaggggatgatttgttgtctctgagtgtcgttgggtgccaacgtctcttaggaggaaaatgttcaaaacgtgacaggtggaaatgttcaaaacatacacttgtgaatgatcatagataaatgtatttaacattccatttgctaacaccatttcaccacggcgtgttcgcttttcaattgcttgctagaaatgcacctgccaaaatgtgaagaatatgtcatgttgattagat

SEQ ID NO: 213706 - DNA, 955 bp, Zea Mays
gatgcacccgtacgtctccatccctccctccctccctcccccctcttcttttcttcggctcttccgccgcctccacgcggcctacgccacctccccctcacctcccgccgtgcgccccgatccctcgccgcgacctcatctcgccgaggactggatcgccggagggtacatcccattactaaaggagacgtttaagttcccacaaagcttgggcattttaggtggaaaacctgggacgtcaacatacattgctggggtacaagaagatagggctctctacctagatccccatgacgttcagatggcggttgatattgcaccggataacttggaggcggacacttcctcgtaccactgcagtgttgtccgagatttggctctagaacaaatagacccatccctagccattggtttttactgtcgcgacaaagacgatttcgatgatttctgttctcgggcatctgagttggcagagaaagccaatggagcgccactctttactgtcatgcagtcagtccagccatcgaagcaaatgtataaacaggatgatgggctgtgctgttgttctggcagtagcatggccaacgaggactacgaccttgacgcctctggcgaggcaggagaagagtggcagatcctctaaaccaggggaacaccgatgacatgttgggttgaaaaactcatggaacatgttgcctgaatgccctcgtttgcgtgtgaatacaggggatgatttgttgtctctgagtgtcgttgggtgccaacgtctcttaggaggaaaatgttcaaaacgtgacaggtggaaatgttcaaaacatacacttgtgaatgatcatagataaatgtatttaacattccatttgctaacaccatttcaccacggcgtgttcgcttttcaattgcttgctagaaatgcacctgccaaaatgtgaagaatatgtcatgttgattagat

SEQ ID NO: 213707 - DNA, 1916 bp, Zea Mays
gatgcacccgtacgtctccatccctccctccctccctcccccctcttcttttcttcggctcttccgccgcctccacgcggcctacgccacctccccctcacctcccgccgtgcgccccgatccctcgccgcgacctcatctcgccgaggactggatcgccggagggacatcgtgggtgggtgggtgtgtccttcgcacccatgcggcgttagctgatgacgacctcgcctgagaggggagaagcaccacctgcgccgccacgcgattcaccgtgcgaggacgccgccccagctgccgccgtcgttgcctcttcctcctctggctccgagcgcgaggaagacggcggctccaggcagcccaaggcatctgtcctgtccggcgtcttcgcgccccctctcgccatattcgaggggcagcagcaggtctcctcgacgccgtgcgacgccagctcgacaaagccgccctcggggtcctatgcttggtccaggattctgaggagggtgtcgcccgaggaagaggagtctggcggctcggattctgacagcggccatgctgcgtttctggaagatttctcttccaggatatggatcacttaccggaaagggtttgatgcaatacctggttccaagctcactagtgatgtgaactggggatgcatggttagaagtagtcagatgctggttgctcaggcactgatttttcaccatcttggaagatcttggagaaagccatcagagaagccatacgacccagattatatacgggtcttacacctatttggtgactctgaagcttgtgctttctctattcacaatttacttcaagctggaaggaattatggtctggctgctggatcatgggtgggtccatatgctatgtgccgggcatggcagacccttatccgcacaaatagagagcaagctgatgctgtcgatgggaaggaaaatttccctatggcgctatatgtcgtttcgggtgatgaagatggtgaaagaggtggagctccagttttttgtattgatgttgctgctcagctttgctccaatttcaataaaggacaatgtacatggtcacctattcttttgttgattcctctggttcttggccttgacaaaattaatccaaggtacatcccattactaaaggagacgtttaagttcccacaaagcttgggcattttaggtggaaaacctgggacgtcaacatacattgctggggtacaagaagatagggctctctacctagatccccatgacgttcagatggcggttgatattgcaccggataacttggaggcggacacttcctcgtaccactgcagtgttgtccgagatttggctctagaacaaatagacccatccctagccattggtttttactgtcgcgacaaagacgatttcgatgatttctgttctcgggcatctgagttggcagagaaagccaatggagcgccactctttactgtcatgcagtcagtccagccatcgaagcaaatgtataaacaggatgatgggctgtgctgttgttctggcagtagcatggccaacgaggactacgaccttgacgcctctggcgaggcaggagaagagtggcagatcctctaaaccaggggaacaccgatgacatgttgggttgaaaaactcatggaacatgttgcctgaatgccctcgtttgcgtgtgaatacaggggatgatttgttgtctctgagtgtcgttgggtgccaacgtctcttaggaggaaaatgttcaaaacgtgacaggtggaaatgttcaaaacatacacttgtgaatgatcatagataaatgtatttaacattccatttgctaacaccatttcaccacggcgtgttcgcttttcaattgcttgctagaaatgcacctgccaaaatgtgaagaatatgtcatgttgattagat

SEQ ID NO: 213708 - DNA, 1440 bp, Zea Mays
ctcaagcccagctcgatgcacccggtgtcgcccgaggaagaggagtctggcggctcggattctgacagcggccatgctgcgtttctggaagatttctcttccaggatatggatcacttaccggaaagggtttgatgcaatacctggttccaagctcactagtgatgtgaactggggatgcatggttagaagtagtcagatgctggttgctcaggcactgatttttcaccatcttggaagatcttggagaaagccatcagagaagccatacgacccagattatatacgggtcttacacctatttggtgactctgaagcttgtgctttctctattcacaatttacttcaagctggaaggaattatggtctggctgctggatcatgggtgggtccatatgctatgtgccgggcatggcagacccttatccgcacaaatagagagcaagctgatgctgtcgatgggaaggaaaatttccctatggcgctatatgtcgtttcgggtgatgaagatggtgaaagaggtggagctccagttttttgtattgatgttgctgctcagctttgctccaatttcaataaaggacaatgtacatggtcacctattcttttgttgattcctctggttcttggccttgacaaaattaatccaaggtacatcccattactaaaggagacgtttaagttcccacaaagcttgggcattttaggtggaaaacctgggacgtcaacatacattgctggggtacaagaagatagggctctctacctagatccccatgacgttcagatggcggttgatattgcaccggataacttggaggcggacacttcctcgtaccactgcagtgttgtccgagatttggctctagaacaaatagacccatccctagccattggtttttactgtcgcgacaaagacgatttcgatgatttctgttctcgggcatctgagttggcagagaaagccaatggagcgccactctttactgtcatgcagtcagtccagccatcgaagcaaatgtataaacaggatgatgggctgtgctgttgttctggcagtagcatggccaacgaggactacgaccttgacgcctctggcgaggcaggagaagagtggcagatcctctaaaccaggggaacaccgatgacatgttgggttgaaaaactcatggaacatgttgcctgaatgccctcgtttgcgtgtgaatacaggggatgatttgttgtctctgagtgtcgttgggtgccaacgtctcttaggaggaaaatgttcaaaacgtgacaggtggaaatgttcaaaacatacacttgtgaatgatcatagataaatgtatttaacattccatttgctaacaccatttcaccacggcgtgttcgcttttcaattgcttgctagaaatgcacctgccaaaatgtgaagaatatgtcatgttgattagat

SEQ ID NO: 213709 - DNA, 2902 bp, Zea Mays
ccgacctacgcgaggacaaaacagcaaaaccaaagcgctcagccgctcgcgaggagcgaaaggcgagcgcgcagccgggcgcccgtggcggaggcgaaacccccgccgccgcatcgccctgagaccctccggttcggcccgggccgagctcgagcccgcgcaatctcgccgccggcgggcttgatctgatccaaggccaccgcgcgccggcgcgggcggcgaggaatggggagcgtggacggccgcggggtcgaggggatccacgaagctaatcggcgcgcgcagttgattggatggatgaatgccttactcccggaattcagtttgcctccggattcatcgagtgaagagctgcgagagctgctcagtgacggcgtggtcctgtgccgtcttgtgaacacactcatcccgggggttcttgagggatcctgggagggttatgcaccgtcagatcagaggttaggcaacgtgaagaaattcctctcggtggtctctgatatggggctgccaggcttcagtttgaaagatcttgatgagggattaatgtcttctgtagtggaatgtctcttggttttgaggggcagtgtggatcctagattaggtgatgatattccaccagatgttaccagaactcctttgagaaaacaatggggagttcaggaaatggacaagcctcaagttcccgctgcagcactagggaaaagatcccctgcagaggacatgagaaacggcgttgcagattccaaaacccatcagaaaacttctgtcttttctggacaaaaggttcgtgaagttttccaattaaaacgcggatcatattcagatcttactgctgccaagatttcagagatgatgcactctaatagcttagataatgcaccgacacagtcgcttattagtgttgttaatggtattttggatgaaagcatagaaaggaaaaagggagaaataccacatcgtgtagtttacttactgcggaaagtcgttcaagagattgagcaccgtctctgtattcaagcagagcacataagaagtcaaaatgttaccatcaagacaagagaacaaaagtactgttcaaaaattaaagcacttgaaatgttggtaaatggcacaaatgaagaaaaccagatggcaataaacaggcttcagatagtcaagaatgagaagtcacaaatcgaagagaaaaaagaactctgtgagaaagatgttcaacgattaatgaaagagaaagaatattccaaaagcatcataatgaacctaacaaaagatatggaagccatgaatagattgcatgagcagcaacttgagcaaattggaagaaaggcaaaggaaatggaggaacaattaaccaccagggtaaaagaagtagagtatctcttgctacaatcgaataagaaagttgaagaacttgagattgcttctaggctaaaatcacagttatgggatcagaaagagaacatttttcagagttacatggataatcaacaattagttatcaaggacataagaatattgtcacagtcatatgaaaatgatatgtatgcacttcaaatgcagtggagaaatgaaatctctaatttaggatctgggttaaaatgtttggttgatgccgctgaaaattatcataaagtcctgacagagaaccaaaagttatttaatgaagtgcaagaactaaaaggtaatataagagtatattgtcgtgttaggccatttctttccggtcaagataaaaagtccaccacaattgactacatgggggaaaatggtgagcttcttatatcaaatccatttaagcaagggaaggacggacatagaatgttcaagtttaataaagtgtttactccatttgcttcccaagctgaggttttttctgacatacaaccactgatccgatcagttctggatggattcaacgtttgtatttttgcatatggccagactggttctggcaaaacttacactatgagtgggcctaccacatcaaaacaagattggggtgtcaattatcgagctttaaatgatttgtttgatatttcactaagtaggagaaatgccttctcatatgaggtgggggtacaaatggttgagatatacaatgaacaagtccgtgatctgctatcaaatgatattgcacaaagaagacttgggatttggaacacttctcaacccaatgggcttgttgttccagatgcaagcttgcactcagttaagtcgacatctgatgtattagacttgatggagattggacaagcaaatagagcagttggttcaacagcgctaaatgaacgaagtagtcggtcacacagtattctaactgtacatgttcgagggatggatttgaagaatggatcaacctctaggggttgtttgcatcttattgatcttgctggtagtgagagggtagagaagtctgaagtaaccggcgatagattaaaagaagctcaatacattaacaaatcactctctgcgttaggtgatgttatttttgctttgtcacagaaaagtgcccatgtgccttatagaaacagcaagttaacacaagttcttcaaagttctttaggtggacaagcaaaaactctaatgtttgttcagataaatcctgatgttgagtcatattcagaaactataagtactttaaagtttgctgaaagggtgtctggagtagagttaggtgctgctagaagtaacaaggagggaaaagatataaaagagctattggaacaggttcttgtacttcttgacttgtcactaactagagtttatttgtttccaattctgtagcaattttggttggaaaaacagtatactgaaaaaagggcaaacttttacatgaatgctatgttagtatttatcaaggttcaactttcgaagcatggtttgcatactactcaaaggttgcgtc

SEQ ID NO: 213710 - DNA, 2793 bp, Zea Mays
gaaagatcttgatgaggacaaaaggttcgtgaagttttccaattaaaacgcggatcatattcagatcttactgctgccaagatttcagagatgatgcactctaatagcttagataatgcaccgacacagtcgcttattagtgttgttaatggtattttggatgaaagcatagaaaggaaaaagggagaaataccacatcgtgtagtttacttactgcggaaagtcgttcaagagattgagcaccgtctctgtattcaagcagagcacataagaagtcaaaatgttaccatcaagacaagagaacaaaagtactgttcaaaaattaaagcacttgaaatgttggtaaatggcacaaatgaagaaaaccagatggcaataaacaggcttcagatagtcaagaatgagaagtcacaaatcgaagagaaaaaagaactctgtgagaaagatgttcaacgattaatgaaagagaaagaatattccaaaagcatcataatgaacctaacaaaagatatggaagccatgaatagattgcatgagcagcaacttgagcaaattggaagaaaggcaaaggaaatggaggaacaattaaccaccagggtaaaagaagtagagtatctcttgctacaatcgaataagaaagttgaagaacttgagattgcttctaggctaaaatcacagttatgggatcagaaagagaacatttttcagagttacatggataatcaacaattagttatcaaggacataagaatattgtcacagtcatatgaaaatgatatgtatgcacttcaaatgcagtggagaaatgaaatctctaatttaggatctgggttaaaatgtttggttgatgccgctgaaaattatcataaagtcctgacagagaaccaaaagttatttaatgaagtgcaagaactaaaaggtaatataagagtatattgtcgtgttaggccatttctttccggtcaagataaaaagtccaccacaattgactacatgggggaaaatggtgagcttcttatatcaaatccatttaagcaagggaaggacggacatagaatgttcaagtttaataaagtgtttactccatttgcttcccaagctgaggttttttctgacatacaaccactgatccgatcagttctggatggattcaacgtttgtatttttgcatatggccagactggttctggcaaaacttacactatgagtgggcctaccacatcaaaacaagattggggtgtcaattatcgagctttaaatgatttgtttgatatttcactaagtaggagaaatgccttctcatatgaggtgggggtacaaatggttgagatatacaatgaacaagtccgtgatctgctatcaaatgatattgcacaaaaaacacttgggatttggaacacttctcaacccaatgggcttgttgttccagatgcaagcttgcactcagttaagtcgacatctgatgtattagacttgatggagattggacaagcaaatagagcagttggttcaacagcgctaaatgaacgaagtagtcggtcacacagtattctaactgtacatgttcgagggatggatttgaagaatggatcaacctctaggggttgtttgcatcttattgatcttgctggtagtgagagggtagagaagtctgaagtaaccggcgatagattaaaagaagctcaatacattaacaaatcactctctgcgttaggtgatgttatttttgctttgtcacagaaaagtgcccatgtgccttatagaaacagcaagttaacacaagttcttcaaagttctttaggtggacaagcaaaaactctaatgtttgttcagataaatcctgatgttgagtcatattcagaaactataagtactttaaagtttgctgaaagggtgtctggagtagagttaggtgctgctagaagtaacaaggagggaaaagatataaaagagctattggaacaggttgcgtctttgaaagacacaattttgcgcaaagatatggaaatagagcagatccaggtcatcaaagacaaagtaaaatccccaaatttgttgttagatagaaatgtgcctggcttgacgaagactacagcaaaccaacctagccaactattatcaggcgaacgaatgcttaagtctagtgacagagttctatcggatcgtcagagttacggcgaggtgaatgtagatcctaaccaccatgtgatggatactgcaccagtgagcatagatgaagcaggatatgagaacaatgcatcggatgatggtttatcgggtgaaaccgagaatgataattcagctgctgagatgacagcggaacggctgcatagatttccatcaagaataagcaggttcactctcacaaagaacgggcagccatctatgtctagatcgaacccaaaggatgctaagactccaagcaatacgaaagctccatcgagccggttgacaggaggctcttcagccaggtctaaaagacggcagtagagcacgatcatgttgctcgttttgatgtgcattgtagttgaaatgtgaatttgatgggtagttgtaggaccgttttatgattgtaactttagaaaatgtcagacactgatggcagaatatttgaggcatttgtttgatcatttgcttatgccgagcaaaacagcaaacaatgctcgattgtatgtgaaacactctgacctgtgaccatttgaatgtcggtgcgcctccggaagtccggagttgtgtatataccaccaaattgccggcctaaaatttccagtttgatgcatcctggaatctcac

SEQ ID NO: 213711 - DNA, 3213 bp, Zea Mays
ttatgcaccgtcagatcagaggttaggcaacgtgaagaaattcctctcggtggtctctgatatggggctgccaggcttcagtttgaaagatcttgatgagggattaatgtcttctgtagtggaatgtctcttggttttgaggggcagtgtggatcctagattaggtgatgatattccaccagatgttaccagaactcctttgagaaaacaatggggagttcaggaaatggacaagcctcaagttcccgctgcagcactagggaaaagatcccctgcagaggacatgagaaacggcgttgcagattccaaaacccatcagaaaacttctgtcttttctggacaaaaggttcgtgaagttttccaattaaaacgcggatcatattcagatcttactgctgccaagatttcagagatgatgcactctaatagcttagataatgcaccgacacagtcgcttattagtgttgttaatggtattttggatgaaagcatagaaaggaaaaagggagaaataccacatcgtgtagtttacttactgcggaaagtcgttcaagagattgagcaccgtctctgtattcaagcagagcacataagaagtcaaaatgttaccatcaagacaagagaacaaaagtactgttcaaaaattaaagcacttgaaatgttggtaaatggcacaaatgaagaaaaccagtttctctcttcagatggcaataaacaggcttcagatagtcaagaatgagaagtcacaaatcgaagagaaaaaagaactctgtgagaaagatgttcaacgattaatgaaagagaaagaatattccaaaagcatcataatgaacctaacaaaagatatggaagccatgaatagattgcatgagcagcaacttgagcaaattggaagaaaggcaaaggaaatggaggaacaattaaccaccagggtaaaagaagtagagtatctcttgctacaatcgaataagaaagttgaagaacttgagattgcttctaggctaaaatcacagttatgggatcagaaagagaacatttttcagagttacatggataatcaacaattagttatcaaggacataagaatattgtcacagtcatatgaaaatgatatgtatgcacttcaaatgcagtggagaaatgaaatctctaatttaggatctgggttaaaatgtttggttgatgccgctgaaaattatcataaagtcctgacagagaaccaaaagttatttaatgaagtgcaagaactaaaaggtaatataagagtatattgtcgtgttaggccatttctttccggtcaagataaaaagtccaccacaattgactacatgggggaaaatggtgagcttcttatatcaaatccatttaagcaagggaaggacggacatagaatgttcaagtttaataaagtgtttactccatttgcttcccaagctgaggttttttctgacatacaaccactgatccgatcagttctggatggattcaacgtttgtatttttgcatatggccagactggttctggcaaaacttacactatgagtgggcctaccacatcaaaacaagattggggtgtcaattatcgagctttaaatgatttgtttgatatttcactaagtaggagaaatgccttctcatatgaggtgggggtacaaatggttgagatatacaatgaacaagtccgtgatctgctatcaaatgatattgcacaaagaagacttgggatttggaacacttctcaacccaatgggcttgttgttccagatgcaagcttgcactcagttaagtcgacatctgatgtattagacttgatggagattggacaagcaaatagagcagttggttcaacagcgctaaatgaacgaagtagtcggtcacacagtattctaactgtacatgttcgagggatggatttgaagaatggatcaacctctaggggttgtttgcatcttattgatcttgctggtagtgagagggtagagaagtctgaagtaaccggcgatagattaaaagaagctcaatacattaacaaatcactctctgcgttaggtgatgttatttttgctttgtcacagaaaagtgcccatgtgccttatagaaacagcaagttaacacaagttcttcaaagttctttaggtaatcaaatatttatttactacctagatgttaaatatattaatgtttatcttccaaattttatgtaccttttattttcttccaggtggacaagcaaaaactctaatgtttgttcagataaatcctgatgttgagtcatattcagaaactataagtactttaaagtttgctgaaagggtgtctggagtagagttaggtgctgctagaagtaacaaggagggaaaagatataaaagagctattggaacaggttgcgtctttgaaagacacaattttgcgcaaagatatggaaatagagcagatccaggtcatcaaagacaaagtaaaatccccaaatttgttgttagatagaaatgtgcctggcttgacgaagactacagcaaaccaacctagccaactattatcaggcgaacgaatgcttaagtctagtgacagagttctatcggatcgtcagagttacggcgaggtgaatgtagatcctaaccaccatgtgatggatactgcaccagtgagcatagatgaagcaggatatgagaacaatgcatcggatgatggtttatcgggtgaaaccgagaatgataattcagctgctgagatgacagcggaacggctgcatagatttccatcaagaataagcaggttcactctcacaaagaacgggcagccatctatgtctagatcgaacccaaaggatgctaagactccaagcaatacgaaagctccatcgagccggttgacaggaggctcttcagccaggtctaaaagacggcagtagagcacgatcatgttgctcgttttgatgtgcattgtagttgaaatgtgaatttgatgggtagttgtaggaccgttttatgattgtaactttagaaaatgtcagacactgatggcagaatatttgaggcatttgtttgatcatttgcttatgccgagcaaaacagcaaacaatgctcgattgtatgtgaaacactctgacctgtgaccatttgaatgtcggtgcgcctccggaagtccggagttgtgtatataccaccaaattgccggcctaaaatttccagtttgatgcatcctggaatctcac

SEQ ID NO: 213712 - DNA, 3118 bp, Zea Mays
aacacactcatcccgggggttcttgagggatcctgggagggttatgcaccgtcagatcagaggttaggcaacgtgaagaaattcctctcggtggtctctgatatggggctgccaggcttcagtttgaaagatcttgatgagggattaatgtcttctgtagtggaatgtctcttggttttgaggggcagtgtggatcctagattaggtgatgatattccaccagatgttaccagaactcctttgagaaaacaatggggagttcaggaaatggacaagcctcaagttcccgctgcagcactagggaaaagatcccctgcagaggacatgagaaacggcgttgcagattccaaaacccatcagaaaacttctgtcttttctggacaaaaggttcgtgaagttttccaattaaaacgcggatcatattcagatcttactgctgccaagatttcagagatgatgcactctaatagcttagataatgcaccgacacagtcgcttattagtgttgttaatggtattttggatgaaagcatagaaaggaaaaagggagaaataccacatcgtgtagtttacttactgcggaaagtcgttcaagagattgagcaccgtctctgtattcaagcagagcacataagaagtcaaaatgttaccatcaagacaagagaacaaaagtactgttcaaaaattaaagcacttgaaatgttggtaaatggcacaaatgaagaaaaccagtttctctcttcagatggcaataaacaggcttcagatagtcaagaatgagaagtcacaaatcgaagagaaaaaagaactctgtgagaaagatgttcaacgattaatgaaagagaaagaatattccaaaagcatcataatgaacctaacaaaagatatggaagccatgaatagattgcatgagcagcaacttgagcaaattggaagaaaggcaaaggaaatggaggaacaattaaccaccagggtaaaagaagtagagtatctcttgctacaatcgaataagaaagttgaagaacttgagattgcttctaggctaaaatcacagttatgggatcagaaagagaacatttttcagagttacatggataatcaacaattagttatcaaggacataagaatattgtcacagtcatatgaaaatgatatgtatgcacttcaaatgcagtggagaaatgaaatctctaatttaggatctgggttaaaatgtttggttgatgccgctgaaaattatcataaagtcctgacagagaaccaaaagttatttaatgaagtgcaagaactaaaaggtaatataagagtatattgtcgtgttaggccatttctttccggtcaagataaaaagtccaccacaattgactacatgggggaaaatggtgagcttcttatatcaaatccatttaagcaagggaaggacggacatagaatgttcaagtttaataaagtgtttactccatttgcttcccaagctgaggttttttctgacatacaaccactgatccgatcagttctggatggattcaacgtttgtatttttgcatatggccagactggttctggcaaaacttacactatgagtgggcctaccacatcaaaacaagattggggtgtcaattatcgagctttaaatgatttgtttgatatttcactaagtaggagaaatgccttctcatatgaggtgggggtacaaatggttgagatatacaatgaacaagtccgtgatctgctatcaaatgatattgcacaaagaagacttgggatttggaacacttctcaacccaatgggcttgttgttccagatgcaagcttgcactcagttaagtcgacatctgatgtattagacttgatggagattggacaagcaaatagagcagttggttcaacagcgctaaatgaacgaagtagtcggtcacacagtattctaactgtacatgttcgagggatggatttgaagaatggatcaacctctaggggttgtttgcatcttattgatcttgctggtagtgagagggtagagaagtctgaagtaaccggcgatagattaaaagaagctcaatacattaacaaatcactctctgcgttaggtgatgttatttttgctttgtcacagaaaagtgcccatgtgccttatagaaacagcaagttaacacaagttcttcaaagttctttagcaattttggttggaaaaacagtatactgaaaaaagggcaaacttttacatgaatgctatgttagtatttatcaaggttcaactttcgaagcatggtttgcatactactcaaaggttgcgtctttgaaagacacaattttgcgcaaagatatggaaatagagcagatccaggtcatcaaagacaaagtaaaatccccaaatttgttgttagatagaaatgtgcctggcttgacgaagactacagcaaaccaacctagccaactattatcaggcgaacgaatgcttaagtctagtgacagagttctatcggatcgtcagagttacggcgaggtgaatgtagatcctaaccaccatgtgatggatactgcaccagtgagcatagatgaagcaggatatgagaacaatgcatcggatgatggtttatcgggtgaaaccgagaatgataattcagctgctgagatgacagcggaacggctgcatagatttccatcaagaataagcaggttcactctcacaaagaacgggcagccatctatgtctagatcgaacccaaaggatgctaagactccaagcaatacgaaagctccatcgagccggttgacaggaggctcttcagccaggtctaaaagacggcagtagagcacgatcatgttgctcgttttgatgtgcattgtagttgaaatgtgaatttgatgggtagttgtaggaccgttttatgattgtaactttagaaaatgtcagacactgatggcagaatatttgaggcatttgtttgatcatttgcttatgccgagcaaaacagcaaacaatgctcgattgtatgtgaaacactctgacctgtgaccatttgaatgtcggtgcgcctccggaagtccggagttgtgtatataccaccaaattgccggcctaaaatttccagtttgatgcatcctggaatctcac

SEQ ID NO: 213713 - DNA, 3518 bp, Zea Mays
ggatgaatgccttactcccggaattcagtttgcctccggattcatcgagtgaagagctgcgagagctgctcagtgacggcgtggtcctgtgccgtcttgtgaacacactcatcccgggggttcttgagggatcctgggagggttatgcaccgtcagatcagaggttaggcaacgtgaagaaattcctctcggtggtctctgatatggggctgccaggcttcagtttgaaagatcttgatgagggattaatgtcttctgtagtggaatgtctcttggttttgaggggcagtgtggatcctagattaggtgatgatattccaccagatgttaccagaactcctttgagaaaacaatggggagttcaggaaatggacaagcctcaagttcccgctgcagcactagggaaaagatcccctgcagaggacatgagaaacggcgttgcagattccaaaacccatcagaaaacttctgtcttttctggacaaaaggttcgtgaagttttccaattaaaacgcggatcatattcagatcttactgctgccaagatttcagagatgatgcactctaatagcttagataatgcaccgacacagtcgcttattagtgttgttaatggtattttggatgaaagcatagaaaggaaaaagggagaaataccacatcgtgtagtttacttactgcggaaagtcgttcaagagattgagcaccgtctctgtattcaagcagagcacataagaagtgtaagataatctgcttaaaacatgaattttccttttgggcacacaaatttacaatgaatcagatacaatatactgcagcaaaatgttaccatcaagacaagagaacaaaagtactgttcaaaaattaaagcacttgaaatgttggtaaatggcacaaatgaagaaaaccagtttctctcttcagatggcaataaacaggcttcagatagtcaagaatgagaagtcacaaatcgaagagaaaaaagaactctgtgagaaagatgttcaacgattaatgaaagagaaagaatattccaaaagcatcataatgaacctaacaaaagatatggaagccatgaatagattgcatgagcagcaacttgagcaaattggaagaaaggcaaaggaaatggaggaacaattaaccaccagggtaaaagaagtagagtatctcttgctacaatcgaataagaaagttgaagaacttgagattgcttctaggctaaaatcacagttatgggatcagaaagagaacatttttcagagttacatggataatcaacaattagttatcaaggacataagaatattgtcacagtcatatgaaaatgatatgtatgcacttcaaatgcagtggagaaatgaaatctctaatttaggatctgggttaaaatgtttggttgatgccgctgaaaattatcataaagtcctgacagagaaccaaaagttatttaatgaagtgcaagaactaaaaggtaatataagagtatattgtcgtgttaggccatttctttccggtcaagataaaaagtccaccacaattgactacatgggggaaaatggtgagcttcttatatcaaatccatttaagcaagggaaggacggacatagaatgttcaagtttaataaagtgtttactccatttgcttcccaagctgaggttttttctgacatacaaccactgatccgatcagttctggatggattcaacgtttgtatttttgcatatggccagactggttctggcaaaacttacactatgagtgggcctaccacatcaaaacaagattggggtgtcaattatcgagctttaaatgatttgtttgatatttcactaagtaggagaaatgccttctcatatgaggtgggggtacaaatggttgagatatacaatgaacaagtccgtgatctgctatcaaatgatattgcacaaagaagacttgggatttggaacacttctcaacccaatgggcttgttgttccagatgcaagcttgcactcagttaagtcgacatctgatgtattagacttgatggagattggacaagcaaatagagcagttggttcaacagcgctaaatgaacgaagtagtcggtcacacagtattctaactgtacatgttcgagggatggatttgaagaatggatcaacctctaggggttgtttgcatcttattgatcttgctggtagtgagagggtagagaagtctgaagtaaccggcgatagattaaaagaagctcaatacattaacaaatcactctctgcgttaggtgatgttatttttgctttgtcacagaaaagtgcccatgtgccttatagaaacagcaagttaacacaagttcttcaaagttctttaggtggacaagcaaaaactctaatgtttgttcagataaatcctgatgttgagtcatattcagaaactataagtactttaaagtttgctgaaagggtgtctggagtagagttaggtgctgctagaagtaacaaggagggaaaagatataaaagagctattggaacaggttcttgtacttcttgacttgtcactaactagagtttatttgtttccaattctgtagcaattttggttggaaaaacagtatactgaaaaaagggcaaacttttacatgaatgctatgttagtatttatcaaggttcaactttcgaagcatggtttgcatactactcaaaggttgcgtctttgaaagacacaattttgcgcaaagatatggaaatagagcagatccaggtcatcaaagacaaagtaaaatccccaaatttgttgttagatagaaatgtgcctggcttgacgaagactacagcaaaccaacctagccaactattatcaggcgaacgaatgcttaagtctagtgacagagttctatcggatcgtcagagttacggcgaggtgaatgtagatcctaaccaccatgtgatggatactgcaccagtgagcatagatgaagcaggatatgagaacaatgcatcggatgatggtttatcgggtgaaaccgagaatgataattcagctgctgagatgacagcggaacggctgcatagatttccatcaagaataagcaggttcactctcacaaagaacgggcagccatctatgtctagatcgaacccaaaggatgctaagactccaagcaatacgaaagctccatcgagccggttgacaggaggctcttcagccaggtctaaaagacggcagtagagcacgatcatgttgctcgttttgatgtgcattgtagttgaaatgtgaatttgatgggtagttgtaggaccgttttatgattgtaactttagaaaatgtcagacactgatggcagaatatttgaggcatttgtttgatcatttgcttatgccgagcaaaacagcaaacaatgctcgattgtatgtgaaacactctgacctgtgaccatttgaatgtcggtgcgcctccggaagtccggagttgtgtatataccaccaaattgccggcctaaaatttccagtttgatgcatcctggaatctcac

SEQ ID NO: 213714 - DNA, 3526 bp, Zea Mays
gcgaggacaaaacagcaaaaccaaagcgctcagccgctcgcgaggagcgaaaggcgagcgcgcagccgggcgcccgtggcggaggcgaaacccccgccgccgcatcgccctgagaccctccggttcggcccgggccgagctcgagcccgcgcaatctcgccgccggcgggcttgatctgatccaaggccaccgcgcgccggcgcgggcggcgaggaatggggagcgtggacggccgcggggtcgaggggatccacgaagttgattggatggatgaatgccttactcccggaattcagtttgcctccggattcatcgagtgaagagctgcgagagctgctcagtgacggcgtggtcctgtgccgtcttgtgaacacactcatcccgggggttcttgagggatcctgggagggttatgcaccgtcagatcagaggttaggcaacgtgaagaaattcctctcggtggtctctgatatggggctgccaggcttcagtttgaaagatcttgatgagggattaatgtcttctgtagtggaatgtctcttggttttgaggggcagtgtggatcctagattaggtgatgatattccaccagatgttaccagaactcctttgagaaaacaatggggagttcaggaaatggacaagcctcaagttcccgctgcagcactagggaaaagatcccctgcagaggacatgagaaacggcgttgcagattccaaaacccatcagaaaacttctgtcttttctggacaaaaggttcgtgaagttttccaattaaaacgcggatcatattcagatcttactgctgccaagatttcagagatgatgcactctaatagcttagataatgcaccgacacagtcgcttattagtgttgttaatggtattttggatgaaagcatagaaaggaaaaagggagaaataccacatcgtgtagtttacttactgcggaaagtcgttcaagagattgagcaccgtctctgtattcaagcagagcacataagaagtcaaaatgttaccatcaagacaagagaacaaaagtactgttcaaaaattaaagcacttgaaatgttggtaaatggcacaaatgaagaaaaccagatggcaataaacaggcttcagatagtcaagaatgagaagtcacaaatcgaagagaaaaaagaactctgtgagaaagatgttcaacgattaatgaaagagaaagaatattccaaaagcatcataatgaacctaacaaaagatatggaagccatgaatagattgcatgagcagcaacttgagcaaattggaagaaaggcaaaggaaatggaggaacaattaaccaccagggtaaaagaagtagagtatctcttgctacaatcgaataagaaagttgaagaacttgagattgcttctaggctaaaatcacagttatgggatcagaaagagaacatttttcagagttacatggataatcaacaattagttatcaaggacataagaatattgtcacagtcatatgaaaatgatatgtatgcacttcaaatgcagtggagaaatgaaatctctaatttaggatctgggttaaaatgtttggttgatgccgctgaaaattatcataaagtcctgacagagaaccaaaagttatttaatgaagtgcaagaactaaaaggtaatataagagtatattgtcgtgttaggccatttctttccggtcaagataaaaagtccaccacaattgactacatgggggaaaatggtgagcttcttatatcaaatccatttaagcaagggaaggacggacatagaatgttcaagtttaataaagtgtttactccatttgcttcccaagctgaggttttttctgacatacaaccactgatccgatcagttctggatggattcaacgtttgtatttttgcatatggccagactggttctggcaaaacttacactatgagtgggcctaccacatcaaaacaagattggggtgtcaattatcgagctttaaatgatttgtttgatatttcactaagtaggagaaatgccttctcatatgaggtgggggtacaaatggttgagatatacaatgaacaagtccgtgatctgctatcaaatgatattgcacaaagaagacttgggatttggaacacttctcaacccaatgggcttgttgttccagatgcaagcttgcactcagttaagtcgacatctgatgtattagacttgatggagattggacaagcaaatagagcagttggttcaacagcgctaaatgaacgaagtagtcggtcacacagtattctaactgtacatgttcgagggatggatttgaagaatggatcaacctctaggggttgtttgcatcttattgatcttgctggtagtgagagggtagagaagtctgaagtaaccggcgatagattaaaagaagctcaatacattaacaaatcactctctgcgttaggtgatgttatttttgctttgtcacagaaaagtgcccatgtgccttatagaaacagcaagttaacacaagttcttcaaagttctttaggtggacaagcaaaaactctaatgtttgttcagataaatcctgatgttgagtcatattcagaaactataagtactttaaagtttgctgaaagggtgtctggagtagagttaggtgctgctagaagtaacaaggagggaaaagatataaaagagctattggaacaggttgcgtctttgaaagacacaattttgcgcaaagatatggaaatagagcagatccaggtcatcaaagacaaagtaaaatccccaaatttgttgttagatagaaatgtgcctggcttgacgaagactacagcaaaccaacctagccaactattatcaggcgaacgaatgcttaagtctagtgacagagttctatcggatcgtcagagttacggcgaggtgaatgtagatcctaaccaccatgtgatggatactgcaccagtgagcatagatgaagcaggatatgagaacaatgcatcggatgatggtttatcgggtgaaaccgagaatgataattcagctgctgagatgacagcggaacggctgcatagatttccatcaagaataagcaggttcactctcacaaagaacgggcagccatctatgtctagatcgaacccaaaggatgctaagactccaagcaatacgaaagctccatcgagccggttgacaggaggctcttcagccaggtctaaaagacggcagtagagcacgatcatgttgctcgttttgatgtgcattgtagttgaaatgtgaatttgatgggtagttgtaggaccgttttatgattgtaactttagaaaatgtcagacactgatggcagaatatttgaggcatttgtttgatcatttgcttatgccgagcaaaacagcaaacaatgctcgattgtatgtgaaacactctgacctgtgaccatttgaatgtcggtgcgcctccggaagtccggagttgtgtatataccaccaaattgccggcctaaaatttccagtttgatgcatcctggaatctcac

SEQ ID NO: 213715 - DNA, 3472 bp, Zea Mays
ccgacctacgcgaggacaaaacagcaaaaccaaagcgctcagccgctcgcgaggagcgaaaggcgagcgcgcagccgggcgcccgtggcggaggcgaaacccccgccgccgcatcgccctgagaccctccggttcggcccgggccgagctcgagcccgcgcaatctcgccgccggcgggcttgatctgatccaaggccaccgcgcgccggcgcgggcggcgaggaatggggagcgtggacggccgcggggtcgaggggatccacgaagctaatcggcgcgcgcagttgattggatggatgaatgccttactcccggaattcagtttgcctccggattcatcgagtgaagagctgcgagagctgctcagtgacggcgtggtcctgtgccgtcttgtgaacacactcatcccgggggttcttgagggatcctgggagggttatgcaccgtcagatcagaggttaggcaacgtgaagaaattcctctcggtggtctctgatatggggctgccaggcttcagtttgaaagatcttgatgagggattaatgtcttctgtagtggaatgtctcttggttttgaggggcagtgtggatcctagattaggtgatgatattccaccagatgttaccagaactcctttgagaaaacaatggggagttcaggaaatggacaagcctcaagttcccgctgcagcactagggaaaagatcccctgcagaggacatgagaaacggcgttgcagattccaaaacccatcagaaaacttctgtcttttctggacaaaaggttcgtgaagttttccaattaaaacgcggatcatattcagatcttactgctgccaagatttcagagatgatgcactctaatagcttagataatgcaccgacacagtcgcttattagtgttgttaatggtattttggatgaaagcatagaaaggaaaaagggagaaataccacatcgtgtagtttacttactgcggaaagtcgttcaagagattgagcaccgtctctgtattcaagcagagcacataagaagtcaaaatgttaccatcaagacaagagaacaaaagtactgttcaaaaattaaagcacttgaaatgttggtaaatggcacaaatgaagaaaaccagatggcaataaacaggcttcagatagtcaagaatgagaagtcacaaatcgaagagaaaaaagaactctgtgagaaagatgttcaacgattaatgaaagagaaagaatattccaaaagcatcataatgaacctaacaaaagatatggaagccatgaatagattgcatgagcagcaacttgagcaaattggaagaaaggcaaaggaaatggaggaacaattaaccaccagggtaaaagaagtagagtatctcttgctacaatcgaataagaaagttgaagaacttgagattgcttctaggctaaaatcacagttatgggatcagaaagagaacatttttcagagttacatggataatcaacaattagttatcaaggacataagaatattgtcacagtcatatgaaaatgatatgtatgcacttcaaatgcagtggagaaatgaaatctctaatttaggatctgggttaaaatgtttggttgatgccgctgaaaattatcataaagtcctgacagagaaccaaaagttatttaatgaagtgcaagaactaaaaggtaatataagagtatattgtcgtgttaggccatttctttccggtcaagataaaaagtccaccacaattgactacatgggggaaaatggtgagcttcttatatcaaatccatttaagcaagggaaggacggacatagaatgttcaagtttaataaagtgtttactccatttgcttcccaagctgaggttttttctgacatacaaccactgatccgatcagttctggatggattcaacgtttgtatttttgcatatggccagactggttctggcaaaacttacactatggagaaatgccttctcatatgaggtgggggtacaaatggttgagatatacaatgaacaagtccgtgatctgctatcaaatgatattgcacaaagaagacttgggatttggaacacttctcaacccaatgggcttgttgttccagatgcaagcttgcactcagttaagtcgacatctgatgtattagacttgatggagattggacaagcaaatagagcagttggttcaacagcgctaaatgaacgaagtagtcggtcacacagtattctaactgtacatgttcgagggatggatttgaagaatggatcaacctctaggggttgtttgcatcttattgatcttgctggtagtgagagggtagagaagtctgaagtaaccggcgatagattaaaagaagctcaatacattaacaaatcactctctgcgttaggtgatgttatttttgctttgtcacagaaaagtgcccatgtgccttatagaaacagcaagttaacacaagttcttcaaagttctttaggtggacaagcaaaaactctaatgtttgttcagataaatcctgatgttgagtcatattcagaaactataagtactttaaagtttgctgaaagggtgtctggagtagagttaggtgctgctagaagtaacaaggagggaaaagatataaaagagctattggaacaggttgcgtctttgaaagacacaattttgcgcaaagatatggaaatagagcagatccaggtcatcaaagacaaagtaaaatccccaaatttgttgttagatagaaatgtgcctggcttgacgaagactacagcaaaccaacctagccaactattatcaggcgaacgaatgcttaagtctagtgacagagttctatcggatcgtcagagttacggcgaggtgaatgtagatcctaaccaccatgtgatggatactgcaccagtgagcatagatgaagcaggatatgagaacaatgcatcggatgatggtttatcgggtgaaaccgagaatgataattcagctgctgagatgacagcggaacggctgcatagatttccatcaagaataagcaggttcactctcacaaagaacgggcagccatctatgtctagatcgaacccaaaggatgctaagactccaagcaatacgaaagctccatcgagccggttgacaggaggctcttcagccaggtctaaaagacggcagtagagcacgatcatgttgctcgttttgatgtgcattgtagttgaaatgtgaatttgatgggtagttgtaggaccgttttatgattgtaactttagaaaatgtcagacactgatggcagaatatttgaggcatttgtttgatcatttgcttatgccgagcaaaacagcaaacaatgctcgattgtatgtgaaacactctgacctgtgaccatttgaatgtcggtgcgcctccggaagtccggagttgtgtatataccaccaaattgccggcctaaaatttccagtttgatgcatcctggaatctcac

SEQ ID NO: 213716 - DNA, 3552 bp, Zea Mays
ccgacctacgcgaggacaaaacagcaaaaccaaagcgctcagccgctcgcgaggagcgaaaggcgagcgcgcagccgggcgcccgtggcggaggcgaaacccccgccgccgcatcgccctgagaccctccggttcggcccgggccgagctcgagcccgcgcaatctcgccgccggcgggcttgatctgatccaaggccaccgcgcgccggcgcgggcggcgaggaatggggagcgtggacggccgcggggtcgaggggatccacgaagctaatcggcgcgcgcagttgattggatggatgaatgccttactcccggaattcagtttgcctccggattcatcgagtgaagagctgcgagagctgctcagtgacggcgtggtcctgtgccgtcttgtgaacacactcatcccgggggttcttgagggatcctgggagggttatgcaccgtcagatcagaggttaggcaacgtgaagaaattcctctcggtggtctctgatatggggctgccaggcttcagtttgaaagatcttgatgagggattaatgtcttctgtagtggaatgtctcttggttttgaggggcagtgtggatcctagattaggtgatgatattccaccagatgttaccagaactcctttgagaaaacaatggggagttcaggaaatggacaagcctcaagttcccgctgcagcactagggaaaagatcccctgcagaggacatgagaaacggcgttgcagattccaaaacccatcagaaaacttctgtcttttctggacaaaaggttcgtgaagttttccaattaaaacgcggatcatattcagatcttactgctgccaagatttcagagatgatgcactctaatagcttagataatgcaccgacacagtcgcttattagtgttgttaatggtattttggatgaaagcatagaaaggaaaaagggagaaataccacatcgtgtagtttacttactgcggaaagtcgttcaagagattgagcaccgtctctgtattcaagcagagcacataagaagtcaaaatgttaccatcaagacaagagaacaaaagtactgttcaaaaattaaagcacttgaaatgttggtaaatggcacaaatgaagaaaaccagatggcaataaacaggcttcagatagtcaagaatgagaagtcacaaatcgaagagaaaaaagaactctgtgagaaagatgttcaacgattaatgaaagagaaagaatattccaaaagcatcataatgaacctaacaaaagatatggaagccatgaatagattgcatgagcagcaacttgagcaaattggaagaaaggcaaaggaaatggaggaacaattaaccaccagggtaaaagaagtagagtatctcttgctacaatcgaataagaaagttgaagaacttgagattgcttctaggctaaaatcacagttatgggatcagaaagagaacatttttcagagttacatggataatcaacaattagttatcaaggacataagaatattgtcacagtcatatgaaaatgatatgtatgcacttcaaatgcagtggagaaatgaaatctctaatttaggatctgggttaaaatgtttggttgatgccgctgaaaattatcataaagtcctgacagagaaccaaaagttatttaatgaagtgcaagaactaaaaggtaatataagagtatattgtcgtgttaggccatttctttccggtcaagataaaaagtccaccacaattgactacatgggggaaaatggtgagcttcttatatcaaatccatttaagcaagggaaggacggacatagaatgttcaagtttaataaagtgtttactccatttgcttcccaagctgaggttttttctgacatacaaccactgatccgatcagttctggatggattcaacgtttgtatttttgcatatggccagactggttctggcaaaacttacactatgagtgggcctaccacatcaaaacaagattggggtgtcaattatcgagctttaaatgatttgtttgatatttcactaagtaggagaaatgccttctcatatgaggtgggggtacaaatggttgagatatacaatgaacaagtccgtgatctgctatcaaatgatattgcacaaaaaacacttgggatttggaacacttctcaacccaatgggcttgttgttccagatgcaagcttgcactcagttaagtcgacatctgatgtattagacttgatggagattggacaagcaaatagagcagttggttcaacagcgctaaatgaacgaagtagtcggtcacacagtattctaactgtacatgttcgagggatggatttgaagaatggatcaacctctaggggttgtttgcatcttattgatcttgctggtagtgagagggtagagaagtctgaagtaaccggcgatagattaaaagaagctcaatacattaacaaatcactctctgcgttaggtgatgttatttttgctttgtcacagaaaagtgcccatgtgccttatagaaacagcaagttaacacaagttcttcaaagttctttaggtggacaagcaaaaactctaatgtttgttcagataaatcctgatgttgagtcatattcagaaactataagtactttaaagtttgctgaaagggtgtctggagtagagttaggtgctgctagaagtaacaaggagggaaaagatataaaagagctattggaacaggttgcgtctttgaaagacacaattttgcgcaaagatatggaaatagagcagatccaggtcatcaaagacaaagtaaaatccccaaatttgttgttagatagaaatgtgcctggcttgacgaagactacagcaaaccaacctagccaactattatcaggcgaacgaatgcttaagtctagtgacagagttctatcggatcgtcagagttacggcgaggtgaatgtagatcctaaccaccatgtgatggatactgcaccagtgagcatagatgaagcaggatatgagaacaatgcatcggatgatggtttatcgggtgaaaccgagaatgataattcagctgctgagatgacagcggaacggctgcatagatttccatcaagaataagcaggttcactctcacaaagaacgggcagccatctatgtctagatcgaacccaaaggatgctaagactccaagcaatacgaaagctccatcgagccggttgacaggaggctcttcagccaggtctaaaagacggcagtagagcacgatcatgttgctcgttttgatgtgcattgtagttgaaatgtgaatttgatgggtagttgtaggaccgttttatgattgtaactttagaaaatgtcagacactgatggcagaatatttgaggcatttgtttgatcatttgcttatgccgagcaaaacagcaaacaatgctcgattgtatgtgaaacactctgacctgtgaccatttgaatgtcggtgcgcctccggaagtccggagttgtgtatataccaccaaattgccggcctaaaatttccagtttgatgcatcctggaatctcac

SEQ ID NO: 213717 - DNA, 3733 bp, Zea Mays
attcgaaacccccgacctacgcgaggacaaaacagcaaaaccaaagcgctcagccgctcgcgaggagcgaaaggcgagcgcgcagccgggcgcccgtggcggaggcgaaacccccgccgccgcatcgccctgagaccctccggttcggcccgggccgagctcgagcccgcgcaatctcgccgccggcgggcttgatctgatccaaggccaccgcgcgccggcgcgggcggcgaggaatggggagcgtggacggccgcggggtcgaggggatccacgaagctaatcggcgcgcgcagttgattggatggatgaatgccttactcccggaattcagtttgcctccggattcatcgagtgaagagctgcgagagctgctcagtgacggcgtggtcctgtgccgtcttgtgaacacactcatcccgggggttcttgagggatcctgggagggttatgcaccgtcagatcagaggttaggcaacgtgaagaaattcctctcggtggtctctgatatggggctgccaggcttcagtttgaaagatcttgatgagggattaatgtcttctgtagtggaatgtctcttggttttgaggggcagtgtggatcctagattaggtgatgatattccaccagatgttaccagaactcctttgagaaaacaatggggagttcaggaaatggacaagcctcaagttcccgctgcagcactagggaaaagatcccctgcagaggacatgagaaacggcgttgcagattccaaaacccatcagaaaacttctgtcttttctggacaaaaggttcgtgaagttttccaattaaaacgcggatcatattcagatcttactgctgccaagatttcagagatgatgcactctaatagcttagataatgcaccgacacagtcgcttattagtgttgttaatggtattttggatgaaagcatagaaaggaaaaagggagaaataccacatcgtgtagtttacttactgcggaaagtcgttcaagagattgagcaccgtctctgtattcaagcagagcacataagaagtcaaaatgttaccatcaagacaagagaacaaaagtactgttcaaaaattaaagcacttgaaatgttggtaaatggcacaaatgaagaaaaccagatggcaataaacaggcttcagatagtcaagaatgagaagtcacaaatcgaagagaaaaaagaactctgtgagaaagatgttcaacgattaatgaaagagaaagaatattccaaaagcatcataatgaacctaacaaaagatatggaagccatgaatagattgcatgagcagcaacttgagcaaattggaagaaaggcaaaggaaatggaggaacaattaaccaccagggtaaaagaagtagagtatctcttgctacaatcgaataagaaagttgaagaacttgagattgcttctaggctaaaatcacagttatgggatcagaaagagaacatttttcagagttacatggataatcaacaattagttatcaaggacataagaatattgtcacagtcatatgaaaatgatatgtatgcacttcaaatgcagtggagaaatgaaatctctaatttaggatctgggttaaaatgtttggttgatgccgctgaaaattatcataaagtcctgacagagaaccaaaagttatttaatgaagtgcaagaactaaaaggtaatataagagtatattgtcgtgttaggccatttctttccggtcaagataaaaagtccaccacaattgactacatgggggaaaatggtgagcttcttatatcaaatccatttaagcaagggaaggacggacatagaatgttcaagtttaataaagtgtttactccatttgcttcccaagctgaggttttttctgacatacaaccactgatccgatcagttctggatggattcaacgtttgtatttttgcatatggccagactggttctggcaaaacttacactatgagtgggcctaccacatcaaaacaagattggggtgtcaattatcgagctttaaatgatttgtttgatatttcactaagtaggagaaatgccttctcatatgaggtgggggtacaaatggttgagatatacaatgaacaagtccgtgatctgctatcaaatgatattgcacaaagaagacttgggatttggaacacttctcaacccaatgggcttgttgttccagatgcaagcttgcactcagttaagtcgacatctgatgtattagacttgatggagattggacaagcaaatagagcagttggttcaacagcgctaaatgaacgaagtagtcggtcacacagtattctaactgtacatgttcgagggatggatttgaagaatggatcaacctctaggggttgtttgcatcttattgatcttgctggtagtgagagggtagagaagtctgaagtaaccggcgatagattaaaagaagctcaatacattaacaaatcactctctgcgttaggtgatgttatttttgctttgtcacagaaaagtgcccatgtgccttatagaaacagcaagttaacacaagttcttcaaagttctttaggtggacaagcaaaaactctaatgtttgttcagataaatcctgatgttgagtcatattcagaaactataagtactttaaagtttgctgaaagggtgtctggagtagagttaggtgctgctagaagtaacaaggagggaaaagatataaaagagctattggaacaggttcttgtacttcttgacttgtcactaactagagtttatttgtttccaattctgtagcaattttggttggaaaaacagtatactgaaaaaagggcaaacttttacatgaatgctatgttagtatttatcaaggttcaactttcgaagcatggtttgcatactactcaaaggttgcgtctttgaaagacacaattttgcgcaaagatatggaaatagagcagatccaggtcatcaaagacaaagtaaaatccccaaatttgttgttagatagaaatgtgcctggcttgacgaagactacagcaaaccaacctagccaactattatcaggcgaacgaatgcttaagtctagtgacagagttctatcggatcgtcagagttacggcgaggtgaatgtagatcctaaccaccatgtgatggatactgcaccagtgagcatagatgaagcaggatatgagaacaatgcatcggatgatggtttatcgggtgaaaccgagaatgataattcagctgctgagatgacagcggaacggctgcatagatttccatcaagaataagcaggttcactctcacaaagaacgggcagccatctatgtctagatcgaacccaaaggatgctaagactccaagcaatacgaaagctccatcgagccggttgacaggaggctcttcagccaggtctaaaagacggcagtagagcacgatcatgttgctcgttttgatgtgcattgtagttgaaatgtgaatttgatgggtagttgtaggaccgttttatgattgtaactttagaaaatgtcagacactgatggcagaatatttgaggcatttgtttgatcatttgcttatgccgagcaaaacagcaaacaatgctcgattgtatgtgaaacactctgacctgtgaccatttgaatgtcggtgcgcctccggaagtccggagttgtgtatataccaccaaattgccggcctaaaatttccagtttgatgcatcctggaatctcac

SEQ ID NO: 213718 - DNA, 1501 bp, Zea Mays
ttattaaacaaaagcagttgtctcgataccaaaaccgcgtatctcaccccgcctccttttcttcgcgtcccccgcctcgatccgatcggggacgggtcgaggggcaggggaatgtcgtcgtcgtctgcgtcatcttcggcggcggcgcaccaccagcagcattaccggcggcagacaggagggagcggtctcgtgccgctcgccgcgctcatcaaggaggaggcccgcacggagcgccaatccatagccggcggcgaaagcaggatctccgcgcgcgacgatgacgcggcaggagtaggaagctccggcgtaggaggggaggcggcggaggcggcggtggagtcgcggctggagcgcccgctgctgcgctatgggtgcgccgctcagtgcaaaaagggcgaggacttctttttgctcagaacggactgtcttcgtcccgccatctccgtctcctcctcggcctccccgcaccccatcttcgccgtattcgctatacttgatggccataatggtaacgcagccgcaatatacacaagggacaatttgctcaaccatgtccttagtgctatgccacgggggctgtccagggaggagtggttgcacatgttgccccgagcactggttgcagggtttgttaagacggacaaggagttccagagcaaagggcaaacttctggcaccaccgctacatttgtgataattgatgggtggactatcactgttgcctctgttggtgattctcgctgtattttagatgctcagggtggggctgtttctttgcttactgtggatcacagactagaagaaaatgttgaggagagggagcgcgttacagcaagtggaggtgaagttggaagactcagtgttgttggtggagcagagattggtccgctacgatgctggcctggaggtctatgcttatcaagatccattggagatatcgatgttggcgaatttattgtccctgttccatatgtgaagcaagtgaagttgtcaaatgctggaggaagacttattattgcttcagatggcatttgggatgcattatcctcagaagccgctgctaagtcttgcagaggtttgcctgctgagcttgccgcaaagcaagttgttaaggaggcactcaggacaagagggctaaaggatgatacaacttgcattgttgttgacataatcccacctggtcaaacaatacggcctctgtctcctcctaaaaagacgagcaagctgaagtcttttatttttagaaagaaagcgaaggacccttctcagaagttgactaaacagcattcagctgttggtatcgttgaagagatatttgaagaaggttcagcgatgctatcagaaagttaatgtacaaaagggtgaatcctacagtacaaacagtataaattatgtgaagatttaccggctcctaaagcttggtatgggtgtgtttttcagtttgtttaagttgagaactatcttgtttgcactcaaattcactttatttattgttttg

SEQ ID NO: 213719 - DNA, 1581 bp, Zea Mays
ttattaaacaaaagcagttgtctcgataccaaaaccgcgtatctcaccccgcctccttttcttcgcgtcccccgcctcgatccgatcggggacgggtcgaggggcaggggaatgtcgtcgtcgtctgcgtcatcttcggcggcggcgcaccaccagcagcattaccggcggcagacaggagggagcggtctcgtgccgctcgccgcgctcatcaaggaggaggcccgcacggagcgccaatccatagccggcggcgaaagcaggatctccgcgcgcgacgatgacgcggcaggagtaggaagctccggcgtaggaggggaggcggcggaggcggcggtggagtcgcggctggagcgcccgctgctgcgctatgggtgcgccgctcagtgcaaaaagggcgaggacttctttttgctcagaacggactgtcttcgtcccgccatctccgtctcctcctcggcctccccgcaccccatcttcgccgtattcgctatacttgatggccataatggtaacgcagccgcaatatacacaagggacaatttgctcaaccatgtccttagtgctatgccacgggggctgtccagggaggagtggttgcacatgttgccccgagcactggttgcagggtttgttaagacggacaaggagttccagagcaaagggcaaacttctggcaccaccgctacatttgtgataattgatgggtggactatcactgttgcctctgttggtgattctcgctgtattttagatgctcagggtggggctgtttctttgcttactgtggatcacagactagaagaaaatgttgaggagagggagcgcgttacagcaagtggaggtgaagttggaagactcagtgttgttggtggagcagagattggtccgctacgatgctggcctggaggtctatgcttatcaagatccattggagatatcgatgttggcgaatttattgtccctgttccatatgtgaagcaagtgaagttgtcaaatgctggaggaagacttattattgcttcagatggcatttgggatgcattatcctcagaagccgctgctaagtcttgcagaggtttgcctgctgagcttgccgcaaagcaagttgttaaggaggcactcaggacaagagggctaaaggatgatacaacttgcattgttgttgacataatcccacctggtcaaacaatacggcctctgtctcctcctaaaaagacgagcaagctgaagtcttttatttttagaaagaaagcgaaggacccttctcagaagttgactaaacagcattcagctgttggtatcgttgaagagatatttgaagaaggttcagcgatgctatcagaaagttcgaatattacctgcttgaaaaagggccagctgtgctcattcataaggagtgagtggaaaattttatgttttggaacagttaatgtacaaaagggtgaatcctacagtacaaacagtataaattatgtgaagatttaccggctcctaaagcttggtatgggtgtgtttttcagtttgtttaagttgagaactatcttgtttgcactcaaattcactttatttattgttttg

SEQ ID NO: 213720 - DNA, 1604 bp, Zea Mays
ttattaaacaaaagcagttgtctcgataccaaaaccgcgtatctcaccccgcctccttttcttcgcgtcccccgcctcgatccgatcggggacgggtcgaggggcaggggaatgtcgtcgtcgtctgcgtcatcttcggcggcggcgcaccaccagcagcattaccggcggcagacaggagggagcggtctcgtgccgctcgccgcgctcatcaaggaggaggcccgcacggagcgccaatccatagccggcggcgaaagcaggatctccgcgcgcgacgatgacgcggcaggagtaggaagctccggcgtaggaggggaggcggcggaggcggcggtggagtcgcggctggagcgcccgctgctgcgctatgggtgcgccgctcagtgcaaaaagggcgaggacttctttttgctcagaacggactgtcttcgtcccgccatctccgtctcctcctcggcctccccgcaccccatcttcgccgtattcgctatacttgatggccataatggtaacgcagccgcaatatacacaagggacaatttgctcaaccatgtccttagtgctatgccacgggggctgtccagggaggagtggttgcacatgttgccccgagcactggttgcagggtttgttaagacggacaaggagttccagagcaaagggcaaacttctggcaccaccgctacatttgtgataattgatgggtggactatcactgttgcctctgttggtgattctcgctgtattttagatgctcagggtggggctgtttctttgcttactgtggatcacagactagaagaaaatgttgaggagagggagcgcgttacagcaagtggaggtgaagttggaagactcagtgttgttggtggagcagagattggtccgctacgatgctggcctggaggtctatgcttatcaagatccattggagatatcgatgttggcgaatttattgtccctgttccatatgtgaagcaagtgaagttgtcaaatgctggaggaagacttattattgcttcagatggcatttgggatgcattatcctcagaagccgctgctaagtcttgcagaggtttgcctgctgagcttgccgcaaagcaagttgttaaggaggcactcaggacaagagggctaaaggatgatacaacttgcattgttgttgacataatcccacctggtcaaacaatacggcctctgtctcctcctaaaaagacgagcaagctgaagtcttttatttttagaaagaaagcgaaggacccttctcagaagttgactaaacagcattcagctgttggtatcgttgaagagatatttgaagaaggttcagcgatgctatcagaaagcctgcttgaaacttgatttccagttcgaatattacctgcttgaaaaagggccagctgtgctcattcataaggagtgagtggaaaattttatgttttggaacagttaatgtacaaaagggtgaatcctacagtacaaacagtataaattatgtgaagatttaccggctcctaaagcttggtatgggtgtgtttttcagtttgtttaagttgagaactatcttgtttgcactcaaattcactttatttattgttttg

SEQ ID NO: 213721 - DNA, 650 bp, Zea Mays
cacggatcgtcgagccacatggtgtgtccagtggtgcggaggttgctgtcctctgcatcacaaaatctggtgaggttatcaactatcaagccttcacaaactccaagggcgtgtatactgtcgccgagactatgccggagagcgacaggtgggactcgtgcttggcgaggcctatgagcagcttccatctacattgcacacggcggggtgatgctcactctggggtgaagttcacttacaacaaatcgtctgggaacccgcacaccgtcaagcctttcctctacaagccggccaccgtccctctgtattgtagttaaacaacacatcttgctggaacgcagaagatagaacatacaggaagaaaatatgtattcgtgccccgactccatatgaccatatataagtaaacactgtttgatgtaaatcaaagattcagctgtctatgggagctgttctagtgtctggtcacccatacctgcgaggaaacagatgttgcgtgcttaatgttgataatatcagtgtttttcacctgctgtaaatgttttgcgaatgctattattatcttggttatgatgatattgtttttttctattctaagtttgtaaggactggtttgataacaaggaaattggaggagatgcatagaaagg

SEQ ID NO: 213722 - DNA, 4190 bp, Zea Mays
cgctcgccctcccttcctcacaacttccccccttttccgtcccgtcccctccctcgtcgccgcgcgcgctagggttagggtttcgccgcatcccggccgctccgcccgcctggggtcgttccggtgggaagccatggcgatcgtgaggaccggaggcggcgtccgcctccccaggcttgacggcggcgcggaggcctcactggaggccacggaggacgaagacgaggaggaggaggggtcacgggcaacgccgtcgcatgagtccgatgccgacggcttctccgccgaggaggagaacggcggaggaggaggagacgatgagccagaggcggaggaggaggaagaggagttcgaggaagaggaggacgagggggactcggggatgggctccgacgagctggacgttgcggagctgggcgagcccagcacggagatgtgccaggtcggggaccagagcatggccgtgccgttggagctctacgacctcgatggtctcggtgacgtgctctcactccacgcctggaatgacctgctcagcgatgacgagcgtctgcgcctcgccgccttcctgcccgatatggaccaggagacctttgcgcgcacactcgtcgagctcctcgcggggcaaaacttccacttcgggagccccctcgccgatttcctcaagcgcctcaagggcgggctgtgtgacccgagggtcaatctgtaccgccgcggcattcgcttcgtggagcggcgcaagcattactactggctgcagagctaccacaactccatggtacggaggctccgggagattaaggattgctggaagggccgcgagggatacagccttgatgagaggctgaggatgttggacacgatgaaggcaaagcagcagcaccaacaacaacagcagagaaaagctctagatttcacaaggcgggctgggtcggagactgattcagagagcaggggatctggggaacaggtcttagctcgacccaagcacgataagagtaggcagaagaaggcagggaagttagcgaaggagaagtcgaaggggctgttgcgggtgggtacaccgaaaggagtggatgaggatgacatgggagggtctggccgtgatgctgtggtggcactctctgagctttctcgtcgagggtatgattctggcacacatagagggaagcttcacaggagcatagatggcctttactcggagtcggaggaccttggatatgaaagggattcgtcaagacctcggtttccgaggccgcttcccaagccagtgaagaaggaattgtctacgagctgtgatgtcaatctgtatgcaaataactacagtgataaccatactgcatctccttactactacagcaggaatctcagtgctaatcagggagtcaccttagcagcagcatatgatcctccatattttgataccagaaggaatgcaaggtacttggagagagactgggtgcaaggtggaaaaggtgtgcacattaacgctttaatgggtgatgagatgaacttgccagctggtaatcacactggtaactcagatgactggcagaaggggcaatctgcaggtgattacaggagcaggaaagatcaagctggctatggtctgaaggttaagtcctataaaagtattgagaaagaggttaatgatgcccgtgttggttctgaccctagaagcaagatatcacaagcgaaggtggcaggtaaatccagtagacaactagataggactggccagaagcactggagcaatgctgtctatggtcaaagtgacgagacagaatctgattcatcagaaaagtttgaagatggcagggaagcacattatctcgagcggaagccagagcgtcaccattctgggtatcatagaccagcacatggtgccaaaaaatcaaacaagcttgctaaagtggccaaaatgaactatcctactgctgatgcagatttagaaccttcccagagcaaaggattcaaagggaaggtttcagagactggttatttacgtgatgtggatgtgatgatgacaggacagattagtgatgtcatgaaacctctagcagcaagtggtgaaaggaaacgcaaaggggtggcaaatttggacatgcgtgtttatgataactctgatctgcatgaagtcaatgaagatgcaaatgactctttcaggttggcggaatatgaaaggcttgccagtagatcaggccatgcagtccaagattctaatggtggttatggtggtactgaaagaaccagctctagctccaaaaaagcaaaaggaagagtcgaagttcctagcctggatgagcatggtgagcatttgtcatctggcccaaaggttgttgagaacactggtggatccaagaagaaaagcaaaaagaagccagagagcagcaccacagatgcagttattttagcagaaccagctgttgctgtacctgaaaataatgtgatagctgcagagcctgagaaggttgagaagcccaagaagaagtatgtaccgataacaccaacgatccatactggtttttcattctctgttgtacatcttttaactgccgtaaagaaggctatggtcactcctgctgaagatactcctccagccacagcgacacaaccggatggagaggagggcaaaaagtggttcaacagtggagagcgcagcaaaacgccccatcaagaacaaagtgcaacagatcaaactgaacaggtccttgagggtgcaaatgccagtgctgtagaacagactgtaccaatcaatacaccagcgcttactgttcaagagattgtcaatcgaattagagcaaatcctggagatcctaggatacttgaaacacaggagcccctccaggatttagttcgaggagtattaaaagtactttcatctagaacagctcctctaggcgcaaagggctggaaagcactagttgcctatgagaagtcaaacaaaagttggttctgggttggtccagcaccttctgtttcatcatatgatgaccccgatgaagaaacctctgctgaagcatggagtataccacacaagatgctcgttaagttggtcgacgcattttctaattggctgaaaagtggtcaggaaacccttaagcagataggttccctcccaccacctccaccgccaaatcctgcaaacttggatctgaaggaaaggttcaaggagcttaaagcgcagaagagtctgaacacaataagcccgagctcagatgaagcgaggacatatttccagcgtgaggaatttctgaggtactcaatacctgatagagcattctgctacaccgctgctgacggggagaagtctatagttgcacccttgagaagaggaggtggaaagccaacagcgaaagcgaggggccaccccatgctcttaccggacaggccgccgcacgtcaccatcctgtgtctcgtaagggatgccgcgtctaggttgcctgcaaggactggaaccagagccgacgtctgcacactgctcagagattcacagtacctaaaccatgaagaagccaacaaagaggccgcaattaatcaagtcgtcagtggagctctcgaccgtctgcattacgagcgcgacccttgcgttctgtatgacaacgacaaaaagctgtggacctatctgcacaggggcagggaggaggaggatttcgaggacgacggcacgtcgtctacaaagaaatggaagaggccaaggagggatgtctccgatgctgcagagccaggtgcagcgaatgatgatatcgacgacgatggcgctggcacccctccatcaaacaatgtgaaaaaacagaagacaacattgtcaggagaagctgccaacgatgagggaaatcatccgactcagaatccggcttctggtggcctggaaggtgattctgatctcaatgctgttccgtcttcaaaattttttgaagaaccatgtggagatgcctacattgatgcaagaccagatgacggtggcccaaattcagtagatgcgaaaccgggcagcacagctgacgacaacacggcactccctgggaacaccggcatggacgctaccaccccaccatgaataaagaacgtatcatggttcaatcagctagagatttgctgaagggtcagcgtaggtaacttgtgcagaaaccgtatctcatctgcgttgttcttatcgctacagttggctagtattaggagagtttgat

SEQ ID NO: 213723 - DNA, 1148 bp, Zea Mays
cactgcttctcttcaagacccgattccactcgcgtgtctgcccgccggccagacctcgaggaaacaaggccttacttccttgattacatggcgtcgccggacgaccccgtgctctccgcttgcaagaaaaacttgagccacttcagaataaaagagctcaaggatgttctacaccaacttggactttcaaagcaaggaaagaagcaggacctagtggacagagttatggcagtgttgttgagccagcaagatcaagcctttgaaacgaatggcttaccaaaggcaaaatcagcggtgaaaatagtggaggacacatttagaaaaatgcaagaccctacaaatactgttgcagtctcaaggagccacgaattaggagacagtgttacgtgtaaaaagaaaccggatgattctgctcaggcagttaaggttcgttgcccttgtggtgactccaagccaaatgattccatgattaagtgtattgatccacaatgcaacatatggcaacatgttggctgcgtcgtcatacccgatactgagaaatccgcggacaatatttctcctgaattaccttcctgcttttattgtgaagtgtgccgacttagcagggctgatcctttttgggtcactgtgaaccatctgttactccctatcttaataggaccctctactgtagcagcagacgggtttggtgtatccttctcagtgacaaagtaccttttaggatgcactggcctttacactctgacatgcaagttaatggtatttatgttagggtggttaacaggcaacccacacaaaagttaggggccaatggtagagacgatggtccactattaacagattacctgaaggagggacctaacaagatttctctatcaagaaatgacactcgtactttctgtttgggtatcagaattgccaagaggagatctctagaacaggtcctaaatttggtgccaaaggaacaagatggtgaaaacttcgatgacgcccttgcacgtgtgcgtcgctgtgttggtggtggagctgaggcaaataatgcagacagtgatagtgatatcgaagttgtggctgattttgtctctgtgaatcttcggtgccctgtaagcaatctggttattactgtggatgctttagatcctcaatga

SEQ ID NO: 213724 - DNA, 4208 bp, Zea Mays
ccaaagttaacaaatttacccaaaaaaatgccactgcatataaacactccctccatcagaagtccgtttcacccgtctacgcatcacgttggtcgttgggctcggtctcgtccgctcctgctcttttctccgcacccagcgccgccgcgggcgattctagggtttcgtcgccggcggcaacaacctgcctgtagcgattcgacgtaggcatccctgttcctctcctccggaggcctgtctcctcgccatctcgtcggtgtagcctgagtgtgggtccacgccctgcagacccacgacgacggcctgcagatccagtccacctccgacgacctcgacctatctgcaacttgtggacagcctgcagaaacagctcgtattggaggctacacagaaaaacctgcacccaaaagttgtaaagctcaccaagaaccttgcaggataacacaagtgctgaattttggaaatggatcatgggcgttatgctccacaacatggatgggagaacaacagtgcaccaaatgggtatggtgtaattaatgagccagattttaggtctggtggatcctacaatgctaggagatctgtggatgaaggctttcctagagattcatatggaaggggtgcattctatcatgatacacatgatagaaatatgtatgcatcaccaccctctgccggtggaatgtggtctcagcctcgaaggaatcatgatgaggactatgcaactgcaagagaccatagaaggcatgacactgattatcgcaatgatggaaagcatcatgagtttgattcatacagaggagttgatagactccatgataattatcgtgctactgacaactattatgaatctggcagtcaccgtgattttggtgctgataggagcaaaaggattggaagcagagaacgggcggagtttcatggtgagtttgaagaccggtaccgcagttctcaccaaagcagggaggacagctatgagagagatcatgaatatggtcgttatggttatgattcggattatgaaagaggcaagagagatagtagctggagaagacgtgattcatgtgacagcgaacgtgaaaggagtggattaagtcgtgaaagagaggaaagcccgtacacgcgccatagccgttctcgatcacatgggcgcgatgaccgatcaagatcacggtctagatcaagatctcctcgtccgagaagtcatggtcggaaccaaagagatggcctgtattatgataatcgatttgacagaagaagggaatatgattgggatgatagggggcatggtgattcagtggctccatctgccactgttgttgtcaagggactgtccctgaagactaatgatgatgacctatataagattcttgctcagtggggacctctacgcagtgtgcgtgtgatcagggaacggaattctggcatgtctcgtggatttgcttttattgacttccccactgtggaagcagcccgtagaatgatggaagctacaggagagaatggtctcgaaattgatggcaggaatgtgttctttcagtacagtagtaaaccaaccggggggatgggtgggccttctcttggacaagaaaattttacgaggcctacttatgggcacaggactgctgctgcaccgtgtgactggatttgtactatatgcggatgtatgaattttgcccgcaggacctcctgctttcagtgcaatgaacctcgtactgaggatgctcttccagctgatgcgacaggttccgcttcacactttgggagaaggggatctgaactaggtccaactcatgttttagttgttcgtggcttggatgaaaatgctgatgaggaaatgcttcggtacgaatttgctaagcacgcaccaataaaggacatccgccttgttcgggataagtttactcatgtgtctagaggttttgccttcgttcatttccattcggtggaagatgctacgaaagctctggaagctacaaacgggattacacttgagaaaaacggtcaggttttgcgtgtagcatatgctaaaagtacacatggacctgcatcagggggttctcagtcaaacagccttgctgcagctgccattgaggctgcatcatttgctcagcagtatgatgccataggttgggctccaaaagagtacaatcctgatgacaaacagaacaacaactctgaatctcaaaaagatggcagcacagcacagtcgggatttgtttgggatgaaaaatctggttactactatgattctgcatctggattctattatgatggaactactggcctttactatgacagcaactctggagtttggtattcatatgatcaacagactcaacaatatgtcccttgtaatgaccagagcaacactaaggcagccggggaggcggccagcgaaaacacgaaaacctcagatagtaatagtggcaaaaaggttgtgatctctgcgcctgctgccacaattaaacaaagtgagaaaacttcacttcctgacgctgttcaagctgctgcaaatgctgcactggctgcagaaaagagagaaaaggagaaggcaaaagagattaaattggcctcaaaaaatagtctcatagctaataagaagatgagcaatgtcctagctatgtggaagcaaaggaatcaagaagggcaggccgcacgaattgtccttgatgacaaagaaccagcaaattctgatgataaatttagtcattcacgtagtggaactggattctctttgaaaagcaagccaaattctgaccttgaaaatgctatgggcaattctcttggccaaggaatgacatcgactcaaacattggattctgttgtaaagcctagacctgtcagtaacagcttagggactacagttatgggtgtcataagaggttctgctagaggagtgatcaagtcagatactacgtttcacgcattatctgatgctggtagcactgattcccgcaccactataaccacaagagcaagtgggttaatgacaagttctgaggcacttataactcctgcacccttcaaaactgatgtgtctgccttagtctctaatactccatcgggagtttctgggagtggtaaacgtcggttttctgaggcaccgggacaatcccagtacagggatcgagctgcagaaagacgaaatctgtatggatcatctcatggcactgatactgttggattggattcaaggatttttttgttaccattggaatgtatccttgacccaacatacagtttagggatgatgttttcggttttgcttgtaagatttttattgattttctggaaattacctgttgtcaagctggtgactatccgtcccgaaagggttcaagtgagatagggtcgatgccgtttcctcctggtgtgggtgaacgttccagtggtgaaattggcaacagcgaaaactatgaagttattaccgctgatagagcaatcgatgaaagcaatgtgggcaaccgcattctacgcaacatggggtggcaggagggactgggtctcggaaaggatgccagcggtatcaaggaaccagtcctggcaaaatccgtcgacgccagggctggactgggaagtcagcagcggaagcctgatccatcccttgaagcccaagccggggacagctacaaaaccatcatccagaagaaggccatggcaagattcaaggagatgtcttagctacactgttttatctattttattgctgcattttgtagtccgtttttaacagcatgcatttttttgtttgctcgtgtgttttttaaataaactgagccgctgaattgtgatttattatcctgaaaggggcactacatagttcgagacctggatgctttggttcccttgtgtgttagttttcatttgcacgacctatgtgcccgggtgttcataagttgatttgccacaatgtggtcgtagagtctcaacatcaggtcatatcacatatcgtttttttaaacggtgagcatgttttctccattattactggatgaagagaaaggttcttcttggtttgagggaagggtgatttaagggattaagattctttttagaaaaatacattaagggccttttcgtttgtctcaattcatatggattggaagagttgagtgtgtttaaatctctagcaaatcaaaatctcttctaatcaatgctatctctctaatctcgatgggggatgagaataattgaacaagaacaag

SEQ ID NO: 213725 - DNA, 3992 bp, Zea Mays
gtccgtttcacccgtctacgcatcacgttggtcgttgggctcggtctcgtccgctcctgctcttttctccgcacccagcgccgccgcgggcgattctagggtttcgtcgccggcggcaacaacctgcctgtagcgattcgacgtaggcatccctgttcctctcctccggaggcctgtctcctcgccatctcgtcggtgtagcctgagtgtgggtccacgccctgcagacccacgacgacggcctgcagatccagtccacctccgacgacctcgacctatctgcaacttgtggacagcctgcagaaacagctcgtattggaggctacacagaaaaacctgcacccaaaagttgtaaagctcaccaagaaccttgcaggataacacaagtgctgaattttggaaatggatcatgggcgttatgctccacaacatggatgggagaacaacagtgcaccaaatgggtatggtgtaattaatgagccagattttaggtctggtggatcctacaatgctaggagatctgtggatgaaggctttcctagagattcatatggaaggggtgcattctatcatgatacacatgatagaaatatgtatgcatcaccaccctctgccggtggaatgtggtctcagcctcgaaggaatcatgatgaggactatgcaactgcaagagaccatagaaggcatgacactgattatcgcaatgatggaaagcatcatgagtttgattcatacagaggagttgatagactccatgataattatcgtgctactgacaactattatgaatctggcagtcaccgtgattttggtgctgataggagcaaaaggattggaagcagagaacgggcggagtttcatggtgagtttgaagaccggtaccgcagttctcaccaaagcagggaggacagctatgagagagatcatgaatatggtcgttatggttatgattcggattatgaaagaggcaagagagatagtagctggagaagacgtgattcatgtgacagcgaacgtgaaaggagtggattaagtcgtgaaagagaggaaagcccgtacacgcgccatagccgttctcgatcacatgggcgcgatgaccgatcaagatcacggtctagatcaagatctcctcgtccgagaagtcatggtcggaaccaaagagatggcctgtattatgataatcgatttgacagaagaagggaatatgattgggatgatagggggcatggtgattcagtggctccatctgccactgttgttgtcaagggactgtccctgaagactaatgatgatgacctatataagattcttgctcagtggggacctctacgcagtgtgcgtgtgatcagggaacggaattctggcatgtctcgtggatttgcttttattgacttccccactgtggaagcagcccgtagaatgatggaagctacaggagagaatggtctcgaaattgatggcaggaatgtgttctttcagtacagtagtaaaccaaccggggggatgggtgggccttctcttggacaagaaaattttacgaggcctacttatgggcacaggactgctgctgcaccgtgtgactggatttgtactatatgcggatgtatgaattttgcccgcaggacctcctgctttcagtgcaatgaacctcgtactgaggatgctcttccagctgatgcgacaggttccgcttcacactttgggagaaggggatctgaactaggtccaactcatgttttagttgttcgtggcttggatgaaaatgctgatgaggaaatgcttcggtacgaatttgctaagcacgcaccaataaaggacatccgccttgttcgggataagtttactcatgtgtctagaggttttgccttcgttcatttccattcggtggaagatgctacgaaagctctggaagctacaaacgggattacacttgagaaaaacggtcaggttttgcgtgtagcatatgctaaaagtacacatggacctgcatcagggggttctcagtcaaacagccttgctgcagctgccattgaggctgcatcatttgctcagcagtatgatgccataggttgggctccaaaagagtacaatcctgatgacaaacagaacaacaactctgaatctcaaaaagatggcagcacagcacagtcgggatttgtttgggatgaaaaatctggttactactatgattctgcatctggattctattatgatggaactactggcctttactatgacagcaactctggagtttggtattcatatgatcaacagactcaacaatatgtcccttgtaatgaccagagcaacactaaggcagccggggaggcggccagcgaaaacacgaaaacctcagatagtaatagtggcaaaaaggttgtgatctctgcgcctgctgccacaattaaacaaagtgagaaaacttcacttcctgacgctgttcaagctgctgcaaatgctgcactggctgcagaaaagagagaaaaggagaaggcaaaagagattaaattggcctcaaaaaatagtctcatagctaataagaagatgagcaatgtcctagctatgtggaagcaaaggaatcaagaagggcaggccgcacgaattgtccttgatgacaaagaaccagcaaattctgatgataaatttagtcattcacgtagtggaactggattctctttgaaaagcaagccaaattctgaccttgaaaatgctatgggcaattctcttggccaaggaatgacatcgactcaaacattggattctgttgtaaagcctagacctgtcagtaacagcttagggactacagttatgggtgtcataagaggttctgctagaggagtgatcaagtcagatactacgtttcacgcattatctgatgctggtagcactgattcccgcaccactataaccacaagagcaagtgggttaatgacaagttctgaggcacttataactcctgcacccttcaaaactgatgtgtctgccttagtctctaatactccatcgggagtttctgggagtggtaaacgtcggttttctgaggcaccgggacaatcccagtacagggatcgagctgcagaaagacgaaatctgtatggatcatctcatggcactgatactgttggattggattcaaggtcgatgccgtttcctcctggtgtgggtgaacgttccagtggtgaaattggcaacagcgaaaactatgaagttattaccgctgatagagcaatcgatgaaagcaatgtgggcaaccgcattctacgcaacatggggtggcaggagggactgggtctcggaaaggatgccagcggtatcaaggaaccagtcctggcaaaatccgtcgacgccagggctggactgggaagtcagcagcggaagcctgatccatcccttgaagcccaagccggggacagctacaaaaccatcatccagaagaaggccatggcaagattcaaggagatgtcttagctacactgttttatctattttattgctgcattttgtagtccgtttttaacagcatgcatttttttgtttgctcgtgtgttttttaaataaactgagccgctgaattgtgatttattatcctgaaaggggcactacatagttcgagacctggatgctttggttcccttgtgtgttagttttcatttgcacgacctatgtgcccgggtgttcataagttgatttgccacaatgtggtcgtagagtctcaacatcaggtcatatcacatatcgtttttttaaacggtgagcatgttttctccattattactggatgaagagaaaggttcttcttggtttgagggaagggtgatttaagggattaagattctttttagaaaaatacattaagggccttttcgtttgtctcaattcatatggattggaagagttgagtgtgtttaaatctctagcaaatcaaaatctcttctaatcaatgctatctctctaatctcgatgggggatgagaataattgaacaagaacaag

SEQ ID NO: 213726 - DNA, 1753 bp, Zea Mays
cgtctacgcatcacgttggtcgttgggctcggtctcgtccgctcctgctcttttctccgcacccagcgccgccgcgggcgattctagggtttcgtcgccggcggcaacaacctgcctgtagcgattcgacgtaggcatccctgttcctctcctccggaggcctgtctcctcgccatctcgtcggtgtagcctgagtgtgggtccacgccctgcagacccacgacgacggcctgcagatccagtccacctccgacgacctcgacctatctgcaacttgtggacagcctgcagaaacagctcgtattggaggctacacagaaaaacctgcacccaaaagttgtaaagctcaccaagaaccttgcaggataacacaagtgctgaattttggaaatggatcatgggcgttatgctccacaacatggatgggagaacaacagtgtaattgcagttttttcctttactaactactgaagatgatgaatagcagaattttggccttgcggttggcctgtgtatccagcgttagttgtaaaggagttcaagaagaggctgttgcttaaatggattggatttacctgcctgttctgtagaatttgttgctgactcgacttattctgttgaatctacaggcaccaaatgggtatggtgtaattaatgagccagattttaggtctggtggatcctacaatgctaggagatctgtggatgaaggctttcctagagattcatatggaaggggtgcattctatcatgatacacatgatagaaatatgtatgcatcaccaccctctgccggtggaatgtggtctcagcctcgaaggaatcatgatgaggactatgcaactgcaagagaccatagaaggcatgacactgattatcgcaatgatggaaagcatcatgagtttgattcatacagaggagttgatagactccatgataattatcgtgctactgacaactattatgaatctggcagtcaccgtgattttggtgctgataggagcaaaaggattggaagcagagaacgggcggagtttcatggtgagtttgaagaccggtaccgcagttctcaccaaagcagggaggacagctatgagagagatcatgaatatggtcgttatggttatgattcggattatgaaagaggcaagagagatagtagctggagaagacgtgattcatgtgacagcgaacgtgaaaggagtggattaagtcgtgaaagagaggaaagcccgtacacgcgccatagccgttctcgatcacatgggcgcgatgaccgatcaagatcacggtctagatcaagatctcctcgtccgagaagtcatggtcggaaccaaagagatggcctgtattatgataatcgatttgacagaagaagggaatatgattgggatgatagggggcatggtgattcagtggctccatctgccactgttgttgtcaagggactgtccctgaagactaatgatgatgacctatataagattcttgtacaagttcctcttcatcacttgttgcaccggttgaaggtgtattttctggttcaatttaatcattttgtctgttctcttgtaggctcagtggggacctctacgcagtgtgcgtgtgatcagggaacggaattctggcatgtctcgtggatttgcttttattgacttccccactgtggaagcagcccgtagaatgatggaagctacaggagagaatggtctcgaaattgatggcaggaatgtgttctttcagtacagtcttt

SEQ ID NO: 213727 - DNA, 4112 bp, Zea Mays
cgtctacgcatcacgttggtcgttgggctcggtctcgtccgctcctgctcttttctccgcacccagcgccgccgcgggcgattctagggtttcgtcgccggcggcaacaacctgcctgtagcgattcgacgtaggcatccctgttcctctcctccggaggcctgtctcctcgccatctcgtcggtgtagcctgagtgtgggtccacgccctgcagacccacgacgacggcctgcagatccagtccacctccgacgacctcgacctatctgcaacttgtggacagcctgcagaaacagctcgtattggaggctacacagaaaaacctgcacccaaaagttgtaaagctcaccaagaaccttgcaggataacacaagtgctgaattttggaaatggatcatgggcgttatgctccacaacatggatgggagaacaacagtgtaattgcagttttttcctttactaactactgaagatgatgaatagcagaattttggccttgcggttggcctgtgtatccagcgttagttgtaaaggagttcaagaagaggctgttgcttaaatggattggatttacctgcctgttctgtagaatttgttgctgactcgacttattctgttgaatctacaggcaccaaatgggtatggtgtaattaatgagccagattttaggtctggtggatcctacaatgctaggagatctgtggatgaaggctttcctagagattcatatggaaggggtgcattctatcatgatacacatgatagaaatatgtatgcatcaccaccctctgccggtggaatgtggtctcagcctcgaaggaatcatgatgaggactatgcaactgcaagagaccatagaaggcatgacactgattatcgcaatgatggaaagcatcatgagtttgattcatacagaggagttgatagactccatgataattatcgtgctactgacaactattatgaatctggcagtcaccgtgattttggtgctgataggagcaaaaggattggaagcagagaacgggcggagtttcatggtgagtttgaagaccggtaccgcagttctcaccaaagcagggaggacagctatgagagagatcatgaatatggtcgttatggttatgattcggattatgaaagaggcaagagagatagtagctggagaagacgtgattcatgtgacagcgaacgtgaaaggagtggattaagtcgtgaaagagaggaaagcccgtacacgcgccatagccgttctcgatcacatgggcgcgatgaccgatcaagatcacggtctagatcaagatctcctcgtccgagaagtcatggtcggaaccaaagagatggcctgtattatgataatcgatttgacagaagaagggaatatgattgggatgatagggggcatggtgattcagtggctccatctgccactgttgttgtcaagggactgtccctgaagactaatgatgatgacctatataagattcttgctcagtggggacctctacgcagtgtgcgtgtgatcagggaacggaattctggcatgtctcgtggatttgcttttattgacttccccactgtggaagcagcccgtagaatgatggaagctacaggagagaatggtctcgaaattgatggcaggaatgtgttctttcagtacaggactgctgctgcaccgtgtgactggatttgtactatatgcggatgtatgaattttgcccgcaggacctcctgctttcagtgcaatgaacctcgtactgaggatgctcttccagctgatgcgacaggttccgcttcacactttgggagaaggggatctgaactaggtccaactcatgttttagttgttcgtggcttggatgaaaatgctgatgaggaaatgcttcggtacgaatttgctaagcacgcaccaataaaggacatccgccttgttcgggataagtttactcatgtgtctagaggttttgccttcgttcatttccattcggtggaagatgctacgaaagctctggaagctacaaacgggattacacttgagaaaaacggtcaggttttgcgtgtagcatatgctaaaagtacacatggacctgcatcagggggttctcagtcaaacagccttgctgcagctgccattgaggctgcatcatttgctcagcagtatgatgccataggttgggctccaaaagagtacaatcctgatgacaaacagaacaacaactctgaatctcaaaaagatggcagcacagcacagtcgggatttgtttgggatgaaaaatctggttactactatgattctgcatctggattctattatgatggaactactggcctttactatgacagcaactctggagtttggtattcatatgatcaacagactcaacaatatgtcccttgtaatgaccagagcaacactaaggcagccggggaggcggccagcgaaaacacgaaaacctcagatagtaatagtggcaaaaaggttgtgatctctgcgcctgctgccacaattaaacaaagtgagaaaacttcacttcctgacgctgttcaagctgctgcaaatgctgcactggctgcagaaaagagagaaaaggagaaggcaaaagagattaaattggcctcaaaaaatagtctcatagctaataagaagatgagcaatgtcctagctatgtggaagcaaaggaatcaagaagggcaggccgcacgaattgtccttgatgacaaagaaccagcaaattctgatgataaatttagtcattcacgtagtggaactggattctctttgaaaagcaagccaaattctgaccttgaaaatgctatgggcaattctcttggccaaggaatgacatcgactcaaacattggattctgttgtaaagcctagacctgtcagtaacagcttagggactacagttatgggtgtcataagaggttctgctagaggagtgatcaagtcagatactacgtttcacgcattatctgatgctggtagcactgattcccgcaccactataaccacaagagcaagtgggttaatgacaagttctgaggcacttataactcctgcacccttcaaaactgatgtgtctgccttagtctctaatactccatcgggagtttctgggagtggtaaacgtcggttttctgaggcaccgggacaatcccagtacagggatcgagctgcagaaagacgaaatctgtatggatcatctcatggcactgatactgttggattggattcaaggttcaagtgagatagggtcgatgccgtttcctcctggtgtgggtgaacgttccagtggtgaaattggcaacagcgaaaactatgaagttattaccgctgatagagcaatcgatgaaagcaatgtgggcaaccgcattctacgcaacatggggtggcaggagggactgggtctcggaaaggatgccagcggtatcaaggaaccagtcctggcaaaatccgtcgacgccagggctggactgggaagtcagcagcggaagcctgatccatcccttgaagcccaagccggggacagctacaaaaccatcatccagaagaaggccatggcaagattcaaggagatgtcttagctacactgttttatctattttattgctgcattttgtagtccgtttttaacagcatgcatttttttgtttgctcgtgtgttttttaaataaactgagccgctgaattgtgatttattatcctgaaaggggcactacatagttcgagacctggatgctttggttcccttgtgtgttagttttcatttgcacgacctatgtgcccgggtgttcataagttgatttgccacaatgtggtcgtagagtctcaacatcaggtcatatcacatatcgtttttttaaacggtgagcatgttttctccattattactggatgaagagaaaggttcttcttggtttgagggaagggtgatttaagggattaagattctttttagaaaaatacattaagggccttttcgtttgtctcaattcatatggattggaagagttgagtgtgtttaaatctctagcaaatcaaaatctcttctaatcaatgctatctctctaatctcgatgggggatgagaataattgaacaagaacaag

SEQ ID NO: 213728 - DNA, 3987 bp, Zea Mays
cgtctacgcatcacgttggtcgttgggctcggtctcgtccgctcctgctcttttctccgcacccagcgccgccgcgggcgattctagggtttcgtcgccggcggcaacaacctgcctgtagcgattcgacgtaggcatccctgttcctctcctccggaggcctgtctcctcgccatctcgtcggtgtagcctgagtgtgggtccacgccctgcagacccacgacgacggcctgcagatccagtccacctccgacgacctcgacctatctgcaacttgtggacagcctgcagaaacagctcgtattggaggctacacagaaaaacctgcacccaaaagttgtaaagctcaccaagaaccttgcaggataacacaagtgctgaattttggaaatggatcatgggcgttatgctccacaacatggatgggagaacaacagtcaccaaatgggtatggtgtaattaatgagccagattttaggtctggtggatcctacaatgctaggagatctgtggatgaaggctttcctagagattcatatggaaggggtgcattctatcatgatacacatgatagaaatatgtatgcatcaccaccctctgccggtggaatgtggtctcagcctcgaaggaatcatgatgaggactatgcaactgcaagagaccatagaaggcatgacactgattatcgcaatgatggaaagcatcatgagtttgattcatacagaggagttgatagactccatgataattatcgtgctactgacaactattatgaatctggcagtcaccgtgattttggtgctgataggagcaaaaggattggaagcagagaacgggcggagtttcatggtgagtttgaagaccggtaccgcagttctcaccaaagcagggaggacagctatgagagagatcatgaatatggtcgttatggttatgattcggattatgaaagaggcaagagagatagtagctggagaagacgtgattcatgtgacagcgaacgtgaaaggagtggattaagtcgtgaaagagaggaaagcccgtacacgcgccatagccgttctcgatcacatgggcgcgatgaccgatcaagatcacggtctagatcaagatctcctcgtccgagaagtcatggtcggaaccaaagagatggcctgtattatgataatcgatttgacagaagaagggaatatgattgggatgatagggggcatggtgattcagtggctccatctgccactgttgttgtcaagggactgtccctgaagactaatgatgatgacctatataagattcttgctcagtggggacctctacgcagtgtgcgtgtgatcagggaacggaattctggcatgtctcgtggatttgcttttattgacttccccactgtggaagcagcccgtagaatgatggaagctacaggagagaatggtctcgaaattgatggcaggaatgtgttctttcagtacagtagtaaaccaaccggggggatgggtgggccttctcttggacaagaaaattttacgaggcctacttatgggcacaggactgctgctgcaccgtgtgactggatttgtactatatgcggatgtatgaattttgcccgcaggacctcctgctttcagtgcaatgaacctcgtactgaggatgctcttccagctgatgcgacaggttccgcttcacactttgggagaaggggatctgaactaggtccaactcatgttttagttgttcgtggcttggatgaaaatgctgatgaggaaatgcttcggtacgaatttgctaagcacgcaccaataaaggacatccgccttgttcgggataagtttactcatgtgtctagaggttttgccttcgttcatttccattcggtggaagatgctacgaaagctctggaagctacaaacgggattacacttgagaaaaacggtcaggttttgcgtgtagcatatgctaaaagtacacatggacctgcatcagggggttctcagtcaaacagccttgctgcagctgccattgaggctgcatcatttgctcagcagtatgatgccataggttgggctccaaaagagtacaatcctgatgacaaacagaacaacaactctgaatctcaaaaagatggcagcacagcacagtcgggatttgtttgggatgaaaaatctggttactactatgattctgcatctggattctattatgatggaactactggcctttactatgacagcaactctggagtttggtattcatatgatcaacagactcaacaatatgtcccttgtaatgaccagagcaacactaaggcagccggggaggcggccagcgaaaacacgaaaacctcagatagtaatagtggcaaaaaggttgtgatctctgcgcctgctgccacaattaaacaaagtgagaaaacttcacttcctgacgctgttcaagctgctgcaaatgctgcactggctgcagaaaagagagaaaaggagaaggcaaaagagattaaattggcctcaaaaaatagtctcatagctaataagaagatgagcaatgtcctagctatgtggaagcaaaggaatcaagaagggcaggccgcacgaattgtccttgatgacaaagaaccagcaaattctgatgataaatttagtcattcacgtagtggaactggattctctttgaaaagcaagccaaattctgaccttgaaaatgctatgggcaattctcttggccaaggaatgacatcgactcaaacattggattctgttgtaaagcctagacctgtcagtaacagcttagggactacagttatgggtgtcataagaggttctgctagaggagtgatcaagtcagatactacgtttcacgcattatctgatgctggtagcactgattcccgcaccactataaccacaagagcaagtgggttaatgacaagttctgaggcacttataactcctgcacccttcaaaactgatgtgtctgccttagtctctaatactccatcgggagtttctgggagtggtaaacgtcggttttctgaggcaccgggacaatcccagtacagggatcgagctgcagaaagacgaaatctgtatggatcatctcatggcactgatactgttggattggattcaatgagatagggtcgatgccgtttcctcctggtgtgggtgaacgttccagtggtgaaattggcaacagcgaaaactatgaagttattaccgctgatagagcaatcgatgaaagcaatgtgggcaaccgcattctacgcaacatggggtggcaggagggactgggtctcggaaaggatgccagcggtatcaaggaaccagtcctggcaaaatccgtcgacgccagggctggactgggaagtcagcagcggaagcctgatccatcccttgaagcccaagccggggacagctacaaaaccatcatccagaagaaggccatggcaagattcaaggagatgtcttagctacactgttttatctattttattgctgcattttgtagtccgtttttaacagcatgcatttttttgtttgctcgtgtgttttttaaataaactgagccgctgaattgtgatttattatcctgaaaggggcactacatagttcgagacctggatgctttggttcccttgtgtgttagttttcatttgcacgacctatgtgcccgggtgttcataagttgatttgccacaatgtggtcgtagagtctcaacatcaggtcatatcacatatcgtttttttaaacggtgagcatgttttctccattattactggatgaagagaaaggttcttcttggtttgagggaagggtgatttaagggattaagattctttttagaaaaatacattaagggccttttcgtttgtctcaattcatatggattggaagagttgagtgtgtttaaatctctagcaaatcaaaatctcttctaatcaatgctatctctctaatctcgatgggggatgagaataattgaacaagaacaag

SEQ ID NO: 213729 - DNA, 3871 bp, Zea Mays
cgtctacgcatcacgttggtcgttgggctcggtctcgtccgctcctgctcttttctccgcacccagcgccgccgcgggcgattctagggtttcgtcgccggcggcaacaacctgcctgtagcgattcgacgtaggcatccctgttcctctcctccggaggcctgtctcctcgccatctcgtcggtgtagcctgagtgtgggtccacgccctgcagacccacgacgacggcctgcagatccagtccacctccgacgacctcgacctatctgcaacttgtggacagcctgcagaaacagctcgtattggaggctacacagaaaaacctgcacccaaaagttgtaaagctcaccaagaaccttgcaggataacacaagtgctgaattttggaaatggatcatgggcgttatgctccacaacatggatgggagaacaacagtgcaccaaatgggtatggtgtaattaatgagccagattttaggtctggtggatcctacaatgctaggagatctgtggatgaaggctttcctagagattcatatggaaggggtgcattctatcatgatacacatgatagaaatatgtatgcatcaccaccctctgccggtggaatgtggtctcagcctcgaaggaatcatgatgaggactatgcaactgcaagagaccatagaagtcaccgtgattttggtgctgataggagcaaaaggattggaagcagagaacgggcggagtttcatggtgagtttgaagaccggtaccgcagttctcaccaaagcagggaggacagctatgagagagatcatgaatatggtcgttatggttatgattcggattatgaaagaggcaagagagatagtagctggagaagacgtgattcatgtgacagcgaacgtgaaaggagtggattaagtcgtgaaagagaggaaagcccgtacacgcgccatagccgttctcgatcacatgggcgcgatgaccgatcaagatcacggtctagatcaagatctcctcgtccgagaagtcatggtcggaaccaaagagatggcctgtattatgataatcgatttgacagaagaagggaatatgattgggatgatagggggcatggtgattcagtggctccatctgccactgttgttgtcaagggactgtccctgaagactaatgatgatgacctatataagattcttgctcagtggggacctctacgcagtgtgcgtgtgatcagggaacggaattctggcatgtctcgtggatttgcttttattgacttccccactgtggaagcagcccgtagaatgatggaagctacaggagagaatggtctcgaaattgatggcaggaatgtgttctttcagtacagtaaaccaaccggggggatgggtgggccttctcttggacaagaaaattttacgaggcctacttatgggcacaggactgctgctgcaccgtgtgactggatttgtactatatgcggatgtatgaattttgcccgcaggacctcctgctttcagtgcaatgaacctcgtactgaggatgctcttccagctgatgcgacaggttccgcttcacactttgggagaaggggatctgaactaggtccaactcatgttttagttgttcgtggcttggatgaaaatgctgatgaggaaatgcttcggtacgaatttgctaagcacgcaccaataaaggacatccgccttgttcgggataagtttactcatgtgtctagaggttttgccttcgttcatttccattcggtggaagatgctacgaaagctctggaagctacaaacgggattacacttgagaaaaacggtcaggttttgcgtgtagcatatgctaaaagtacacatggacctgcatcagggggttctcagtcaaacagccttgctgcagctgccattgaggctgcatcatttgctcagcagtatgatgccataggttgggctccaaaagagtacaatcctgatgacaaacagaacaacaactctgaatctcaaaaagatggcagcacagcacagtcgggatttgtttgggatgaaaaatctggttactactatgattctgcatctggattctattatgatggaactactggcctttactatgacagcaactctggagtttggtattcatatgatcaacagactcaacaatatgtcccttgtaatgaccagagcaacactaaggcagccggggaggcggccagcgaaaacacgaaaacctcagatagtaatagtggcaaaaaggttgtgatctctgcgcctgctgccacaattaaacaaagtgagaaaacttcacttcctgacgctgttcaagctgctgcaaatgctgcactggctgcagaaaagagagaaaaggagaaggcaaaagagattaaattggcctcaaaaaatagtctcatagctaataagaagatgagcaatgtcctagctatgtggaagcaaaggaatcaagaagggcaggccgcacgaattgtccttgatgacaaagaaccagcaaattctgatgataaatttagtcattcacgtagtggaactggattctctttgaaaagcaagccaaattctgaccttgaaaatgctatgggcaattctcttggccaaggaatgacatcgactcaaacattggattctgttgtaaagcctagacctgtcagtaacagcttagggactacagttatgggtgtcataagaggttctgctagaggagtgatcaagtcagatactacgtttcacgcattatctgatgctggtagcactgattcccgcaccactataaccacaagagcaagtgggttaatgacaagttctgaggcacttataactcctgcacccttcaaaactgatgtgtctgccttagtctctaatactccatcgggagtttctgggagtggtaaacgtcggttttctgaggcaccgggacaatcccagtacagggatcgagctgcagaaagacgaaatctgtatggatcatctcatggcactgatactgttggattggattcaatgagatagggtcgatgccgtttcctcctggtgtgggtgaacgttccagtggtgaaattggcaacagcgaaaactatgaagttattaccgctgatagagcaatcgatgaaagcaatgtgggcaaccgcattctacgcaacatggggtggcaggagggactgggtctcggaaaggatgccagcggtatcaaggaaccagtcctggcaaaatccgtcgacgccagggctggactgggaagtcagcagcggaagcctgatccatcccttgaagcccaagccggggacagctacaaaaccatcatccagaagaaggccatggcaagattcaaggagatgtcttagctacactgttttatctattttattgctgcattttgtagtccgtttttaacagcatgcatttttttgtttgctcgtgtgttttttaaataaactgagccgctgaattgtgatttattatcctgaaaggggcactacatagttcgagacctggatgctttggttcccttgtgtgttagttttcatttgcacgacctatgtgcccgggtgttcataagttgatttgccacaatgtggtcgtagagtctcaacatcaggtcatatcacatatcgtttttttaaacggtgagcatgttttctccattattactggatgaagagaaaggttcttcttggtttgagggaagggtgatttaagggattaagattctttttagaaaaatacattaagggccttttcgtttgtctcaattcatatggattggaagagttgagtgtgtttaaatctctagcaaatcaaaatctcttctaatcaatgctatctctctaatctcgatgggggatgagaataattgaacaagaacaag

SEQ ID NO: 213730 - DNA, 1517 bp, Zea Mays
aaaaagaaaaaaaaagtcctcataaactatagaggtccagttaagaaaatgaaccttttttcaacactaaggcccattcgataaggaggccgatgcgagtcaggccacatgacaaaacaaccgctcctactcttcagtggcaagcacatgttcactcgagcctgttcgcggtggagagtgatagctggggagtggagagtggcgaacccaagtggcggctacggttttacgatctctttctccttagcctcgtctgtcgtcttccttctacctccgttcctaaaccgtaaaccctagacctctcgtgtgtcgatacgatttgcccattcatggcattctctccgacggcgttgttcttgattactgattgagaggtcggattggtgtttcctttgatctgtgagtggagtttgaggcaaggagaggggcgacatggtccatgggcacgaagaactagttcgatctcctcgttgctcgcacctcatcgtggctgccgagaagaaggcggccgcatcgcccaagccggcgaccgtcgctccggccaaactggccaccgcccgcgcaggctgtaaaagagaccaggaactatggggctccagctattggggcaggacgtggtagatgtagcttctgtggaggcaggatgggaccaaggcgtgaatttggtgagggcaatggcaatggtgttgagggaggttatggtggtggtggatttggagatagtggtttcccgcggagggaggaaggtgatggaaaggctatgggaagaggccatggaccacgtcagccttaccgtggtggtggtcgccgtggtggctatactgatagtgaggctggtgatgagtctggtcgcccccctcgccgggcctatgagcgccacagtggcacaggtagaggttatggaatgaagtgtgaggtgcgctggccgtggcatctggggaattgtgactgatgaagcccttgcacaagaaacagtagaaactgagggggctcctgctgtggctgaggctgaaaacaagctggaagaagcaccacaatctgaggttgagaagggcaaagagggcgaatcaactgaagtggaggagcctgaagataagttaataccagttttttgtgttactgacgatggaaaaatatctaggctctgcacagccgcatcgcagtgtttgacattattttcagaaattgtttgccatgctcttgttttttggtgatgatctgttactgattatgggctgattgatccagtgagtcttgcacattcaacaaattgttggctctgcaagtgctcaatttcacccagcctatagatagcttaggtagcagcgtcaaggtttttatgcattacctttctgtgcataaattcaggaagctgctgcacatttatggctctctattaaaaatacgaacacacttgatctaccgtaggcatgtcacatggacatacaacatacctcagcatttttttgagagcatgtgttgtgtggtttctgtttactaattgagtttaatgagat

SEQ ID NO: 213731 - DNA, 2479 bp, Zea Mays
aaaaagaaaaaaaaagtcctcataaactatagaggtccagttaagaaaatgaaccttttttcaacactaaggcccattcgataaggaggccgatgcgagtcaggccacatgacaaaacaaccgctcctactcttcagtggcaagcacatgttcactcgagcctgttcgcggtggagagtgatagctggggagtggagagtggcgaacccaagtggcggctacggttttacgatctctttctccttagcctcgtctgtcgtcttccttctacctccgttcctaaaccgtaaaccctagacctctcgtgtgtcgatacgatttgcccattcatggcattctctccgacggcgttgttcttgattactgattgagaggtcggattggtgtttcctttgatctgtgagtggagtttgaggcaaggagaggggcgacatggtccatgggcacgaagaactagttcgatctcctcgttgctcgcacctcatcgtggctgccgagaagaaggcggccgcatcgcccaagccggcgaccgtcgctccggccaaactggccaccgcccgcgcaggctgtaaaagagaccaggaactatggggctccagctattggggcaggacgtggtagatgtagcttctgtggaggcaggatgggaccaaggcgtgaatttggtgagggcaatggcaatggtgttgagggaggttatggtggtggtggatttggagatagtggtttcccgcggagggaggaaggtgatggaaaggctatgggaagaggccatggaccacgtcagccttaccgtggtggtggtcgccgtggtggctatactgatagtgaggctggtgatgagtctggtcgcccccctcgccgggcctatgagcgccacagtggcacaggtagaggttatggaatgaagtgtgaggtgcgctggccgtggcatctggggaattgtgactgatgaagcccttgcacaagaaacagtagaaactgagggggctcctgctgtggctgaggctgaaaacaagctggaagaagcaccacaatctgaggttgagaagggcaaagagggcgaatcaactgaagtggaggagcctgaagataaggtacaagccatactatttatctcatgaaatcaatttgcatgtattgtactgttgtgggcttgtcgaaatatcatttctccctccataaatgatattgatgcgttacaatgtgaagaaactaatttctttaagcttgaagtttatcttgttttctagtagcccaagctttaatgacacattcttaaaaatagtttcagtgctagaaacgtccaaaaatagtttcaggataccggatacccttcttgcatgtaatagatagtacaagtaaaggttttatgtcttgtttcttatctactactgtcatgtttaaaaagtgtaaaactttagcatttggtgcctgctagtggtgtgccacatcttatcattcttgtataccggcaaacaacttaggttgtttctgcaatttagggagaaatattttagatgccaaatatctgcactaaaagctgttgtggattcctgtttagacattggaaaatattagacagctagctgagctccctgaagcttttcaggatagaaggctacagattataaagttgccacatggaaaatgatgtttgtactcttggttcacgtgatggaagcacatgtgatagtaattagaagttgcatgaaaggttattgaggcaactgagtaaatcctttactagggacaaatgtggtaatccgaattgttaggacaaatttaatattttaaaatagacatgtataaaatttgatgctgatttttcttatattatcaaacatattattacaaataagaatacatttttgcataaattgttttatgcattacttgctctctacaacaaaaaggtaaaaagataaccgaatttgtatccgaatccatatcgaattttatttctatcatttgaaaaaatatatgataaatttgaggtttacactttatgaatctttacaagctcaatgctaaaaataagaatatgaatttgcatagtggattctatatcctatttattcgcattcatagaaaaagacaagctatccgaataattactattttcatcctgttctcatccctgccgtttcctataacttcatgtttgctttgtgaatcaattgactcttgagtttttagcagcatataattgttgatcctctcaggtagttgatatttttaaatgtgagtcttgcacattcaacaaattgttggctctgcaagtgctcaatttcacccagcctatagatagcttaggtagcagcgtcaaggaagctgctgcacatttatggctctctattaaaaatacgaacacacttgatctaccgtaggcatgtcacatggacatacaacatacctcagcatttttttgagagcatgtgttgtgtggtttctgtttactaattgagtttaatgagat

SEQ ID NO: 213732 - DNA, 3148 bp, Zea Mays
aaaaagaaaaaaaaagtcctcataaactatagaggtccagttaagaaaatgaaccttttttcaacactaaggcccattcgataaggaggccgatgcgagtcaggccacatgacaaaacaaccgctcctactcttcagtggcaagcacatgttcactcgagcctgttcgcggtggagagtgatagctggggagtggagagtggcgaacccaagtggcggctacggttttacgatctctttctccttagcctcgtctgtcgtcttccttctacctccgttcctaaacctttgaggcaaggagaggggcgacatggtccatgggcacgaagaactagttcgatctcctcgttgctcgcacctcatcgtggctgccgagaagaaggcggccgcatcgcccaagccggcgaccgtcgctccggccaaactggccaccgcccgcgcaggctgtaaaagagaccaggaactatggggctccagctattggggcaggacgtggtagatgtagcttctgtggaggcaggatgggaccaaggcgtgaatttggtgagggcaatggcaatggtgttgagggaggttatggtggtggtggatttggagatagtggtttcccgcggagggaggaaggtgatggaaaggctatgggaagaggccatggaccacgtcagccttaccgtggtggtggtcgccgtggtggctatactgatagtgaggctggtgatgagtctggtcgcccccctcgccgggcctatgagcgccacagtggcacaggtagaggttatggaatgaagtgtgaggtgcgctggccgtggcatctggggaattgtgactgatgaagcccttgcacaagaaacagtagaaactgagggggctcctgctgtggctgaggctgaaaacaagctggaagaagcaccacaatctgaggttgagaagggcaaagagggcgaatcaactgaagtggaggagcctgaagataaggtacaagccatactatttatctcatgaaatcaatttgcatgtattgtactgttgtgggcttgtcgaaatatcatttctccctccataaatgatattgatgcgttacaatgtgaagaaactaatttctttaagcttgaagtttatcttgttttctagtagcccaagctttaatgacacattcttaaaaatagtttcagtgctagaaacgtccaaaaatagtttcaggataccggatacccttcttgcatgtaatagatagtacaagtaaaggttttatgtcttgtttcttatctactactgtcatgtttaaaaagtgtaaaactttagcatttggtgcctgctagtggtgtgccacatcttatcattcttgtataccggcaaacaacttaggttgtttctgcaatttagggagaaatattttagatgccaaatatctgcactaaaagctgttgtggattcctgtttagacattggaaaatattagacagctagctgagctccctgaagcttttcaggatagaaggctacagattataaagttgccacatggaaaatgatgtttgtactcttggttcacgtgatggaagcacatgtgatagtaattagaagttgcatgaaaggttattgaggcaactgagtaaatcctttactagggacaaatgtggtaatccgaattgttaggacaaatttaatattttaaaatagacatgtataaaatttgatgctgatttttcttatattatcaaacatattattacaaataagaatacatttttgcataaattgttttatgcattacttgctctctacaacaaaaaggtaaaaagataaccgaatttgtatccgaatccatatcgaattttatttctatcatttgaaaaaatatatgataaatttgaggtttacactttatgaatctttacaagctcaatgctaaaaataagaatatgaatttgcatagtggattctatatcctatttattcgcattcatagaaaaagacaagctatccgaataattactattttcatcctgttctcatccctgccgtttcctataacttcatgtttgctttgtgaatcaattgactcttgagtttttagcagcatataattgttgatcctctcaggtagttgatatttttaaatggtaagtgctgaaactgcagcttagatatgatttcatgtctccgatttcctaaagctatcatgcaattcttgtggtcgttgatgttgtgtgatagtttttttggaggccagccaaagctgttctcccaagtcttaactaatctcaatattctctgctaaactttcaatatgtttgtacctacaccctgatccatggagcagcataagatgagtgattcataaatactgttgctgaaatcgtagaagaccatggatttaaaaaattgacttattctccattcccactataatacttgctatcttattaaggaaagcaataatagagcctctttctaatcactaatcagttatagaactcatactgtattactatttggtttccaattaatgtggtttttattcttctcatgcacacttactggtgaaaagatgtaacaatacaatctacagatttgtcattatgcttaaattaaccagtaacatacgagtattggagtctttaccattataatcaatctggtattttctgagctgggaagatgccatctgccacatctgtgtcctgtgcaccacctaaagtatttggaactgttgcataactatgtaactgaatgaactgagtgattctgtttatttgtgcagttaataccagttttttgtgttactgacgatggaaaaatatctaggctctgcacagccgcatcgcagtgtttgacattattttcagaaattgtttgccatgctcttgttttttggtgatgatctgttactgattatgggctgattgatccagtgagtcttgcacattcaacaaattgttggctctgcaagtgctcaatttcacccagcctatagatagcttaggtagcagcgtcaaggaagctgctgcacatttatggctctctattaaaaatacgaacacacttgatctaccgtaggcatgtcacatggacatacaacatacctcagcatttttttgagagcatgtgttgtgtggtttctgtttactaattgagtttaatgagat

SEQ ID NO: 213733 - DNA, 2143 bp, Zea Mays
aaaaagaaaaaaaaagtcctcataaactatagaggtccagttaagaaaatgaaccttttttcaacactaaggcccattcgataaggaggccgatgcgagtcaggccacatgacaaaacaaccgctcctactcttcagtggcaagcacatgttcactcgagcctgttcgcggtggagagtgatagctggggagtggagagtggcgaacccaagtggcggctacggttttacgatctctttctccttagcctcgtctgtcgtcttccttctacctccgttcctaaaccgtaaaccctagacctctcgtgtgtcgatacgatttgcccattcatggcattctctccgacggcgttgttcttgattactgattgagaggtcggattggtgtttcctttgatctgtgagtggagtttgaggcaaggagaggggcgacatggtccatgggcacgaagaactagttcgatctcctcgttgctcgcacctcatcgtggctgccgagaagaaggcggccgcatcgcccaagccggcgaccgtcgctccggccaaactggccaccgcccgcgcaggctgtaaaagagaccaggaactatggggctccagctattggggcaggacgtggtagatgtagcttctgtggaggcaggatgggaccaaggcgtgaatttggtgagggcaatggcaatggtgttgagggaggttatggtggtggtggatttggagatagtggtttcccgcggagggaggaaggtgatggaaaggctatgggaagaggccatggaccacgtcagccttaccgtggtggtggtcgccgtggtggctatactgatagtgaggctggtgatgagtctggtcgcccccctcgccgggcctatgagcgccacagtggcacaggtagaggttatggaatgaagtgtgaggtgcgctggccgtggcatctggggaattgtgactgatgaagcccttgcacaagaaacagtagaaactgagggggctcctgctgtggctgaggctgaaaacaagctggaagaagcaccacaatctgaggttgagaagggcaaagagggcgaatcaactgaagtggaggagcctgaagataaggtagttgatatttttaaatggtaagtgctgaaactgcagcttagatatgatttcatgtctccgatttcctaaagctatcatgcaattcttgtggtcgttgatgttgtgtgatagtttttttggaggccagccaaagctgttctcccaagtcttaactaatctcaatattctctgctaaactttcaatatgtttgtacctacaccctgatccatggagcagcataagatgagtgattcataaatactgttgctgaaatcgtagaagaccatggatttaaaaaattgacttattctccattcccactataatacttgctatcttattaaggaaagcaataatagagcctctttctaatcactaatcagttatagaactcatactgtattactatttggtttccaattaatgtggtttttattcttctcatgcacacttactggtgaaaagatgtaacaatacaatctacagatttgtcattatgcttaaattaaccagtaacatacgagtattggagtctttaccattataatcaatctggtattttctgagctgggaagatgccatctgccacatctgtgtcctgtgcaccacctaaagtatttggaactgttgcataactatgtaactgaatgaactgagtgattctgtttatttgtgcagttaataccagttttttgtgttactgacgatggaaaaatatctaggctctgcacagccgcatcgcagtgtttgacattattttcagaaattgtttgccatgctcttgttttttggtgatgatctgttactgattatgggctgattgatccagtgagtcttgcacattcaacaaattgttggctctgcaagtgctcaatttcacccagcctatagatagcttaggtagcagcgtcaaggaagctgctgcacatttatggctctctattaaaaatacgaacacacttgatctaccgtaggcatgtcacatggacatacaacatacctcagcatttttttgagagcatgtgttgtgtggtttctgtttactaattgagtttaatgagat

SEQ ID NO: 213734 - DNA, 2846 bp, Zea Mays
aaaaagaaaaaaaaagtcctcataaactatagaggtccagttaagaaaatgaaccttttttcaacactaaggcccattcgataaggaggccgatgcgagtcaggccacatgacaaaacaaccgctcctactcttcagtggcaagcacatgttcactcgagcctgttcgcggtggagagtgatagctggggagtggagagtggcgaacccaagtggcggctacgtaaaagagaccaggaactatggggctccagctattggggcaggacgtggtagatgtagcttctgtggaggcaggatgggaccaaggcgtgaatttggtgagggcaatggcaatggtgttgagggaggttatggtggtggtggatttggagatagtggtttcccgcggagggaggaaggtgatggaaaggctatgggaagaggccatggaccacgtcagccttaccgtggtggtggtcgccgtggtggctatactgatagtgaggctggtgatgagtctggtcgcccccctcgccgggcctatgagcgccacagtggcacagaaacagtagaaactgagggggctcctgctgtggctgaggctgaaaacaagctggaagaagcaccacaatctgaggttgagaagggcaaagagggcgaatcaactgaagtggaggagcctgaagataaggtacaagccatactatttatctcatgaaatcaatttgcatgtattgtactgttgtgggcttgtcgaaatatcatttctccctccataaatgatattgatgcgttacaatgtgaagaaactaatttctttaagcttgaagtttatcttgttttctagtagcccaagctttaatgacacattcttaaaaatagtttcagtgctagaaacgtccaaaaatagtttcaggataccggatacccttcttgcatgtaatagatagtacaagtaaaggttttatgtcttgtttcttatctactactgtcatgtttaaaaagtgtaaaactttagcatttggtgcctgctagtggtgtgccacatcttatcattcttgtataccggcaaacaacttaggttgtttctgcaatttagggagaaatattttagatgccaaatatctgcactaaaagctgttgtggattcctgtttagacattggaaaatattagacagctagctgagctccctgaagcttttcaggatagaaggctacagattataaagttgccacatggaaaatgatgtttgtactcttggttcacgtgatggaagcacatgtgatagtaattagaagttgcatgaaaggttattgaggcaactgagtaaatcctttactagggacaaatgtggtaatccgaattgttaggacaaatttaatattttaaaatagacatgtataaaatttgatgctgatttttcttatattatcaaacatattattacaaataagaatacatttttgcataaattgttttatgcattacttgctctctacaacaaaaaggtaaaaagataaccgaatttgtatccgaatccatatcgaattttatttctatcatttgaaaaaatatatgataaatttgaggtttacactttatgaatctttacaagctcaatgctaaaaataagaatatgaatttgcatagtggattctatatcctatttattcgcattcatagaaaaagacaagctatccgaataattactattttcatcctgttctcatccctgccgtttcctataacttcatgtttgctttgtgaatcaattgactcttgagtttttagcagcatataattgttgatcctctcaggtagttgatatttttaaatggtaagtgctgaaactgcagcttagatatgatttcatgtctccgatttcctaaagctatcatgcaattcttgtggtcgttgatgttgtgtgatagtttttttggaggccagccaaagctgttctcccaagtcttaactaatctcaatattctctgctaaactttcaatatgtttgtacctacaccctgatccatggagcagcataagatgagtgattcataaatactgttgctgaaatcgtagaagaccatggatttaaaaaattgacttattctccattcccactataatacttgctatcttattaaggaaagcaataatagagcctctttctaatcactaatcagttatagaactcatactgtattactatttggtttccaattaatgtggtttttattcttctcatgcacacttactggtgaaaagatgtaacaatacaatctacagatttgtcattatgcttaaattaaccagtaacatacgagtattggagtctttaccattataatcaatctggtattttctgagctgggaagatgccatctgccacatctgtgtcctgtgcaccacctaaagtatttggaactgttgcataactatgtaactgaatgaactgagtgattctgtttatttgtgcagttaataccagttttttgtgttactgacgatggaaaaatatctaggctctgcacagccgcatcgcagtgtttgacattattttcagaaattgtttgccatgctcttgttttttggtgatgatctgttactgattatgggctgattgatccagtgagtcttgcacattcaacaaattgttggctctgcaagtgctcaatttcacccagcctatagatagcttaggtagcagcgtcaaggaagctgctgcacatttatggctctctattaaaaatacgaacacacttgatctaccgtaggcatgtcacatggacatacaacatacctcagcatttttttgagagcatgtgttgtgtggtttctgtttactaattgagtttaatgagat

SEQ ID NO: 213735 - DNA, 2925 bp, Zea Mays
aaaaagaaaaaaaaagtcctcataaactatagaggtccagttaagaaaatgaaccttttttcaacactaaggcccattcgataaggaggccgatgcgagtcaggccacatgacaaaacaaccgctcctactcttcagtggcaagcacatgttcactcgagcctgttcgcggtggagagtgatagctggggagtggagagtggcgaacccaagtggcggctacgtaaaagagaccaggaactatggggctccagctattggggcaggacgtggtagatgtagcttctgtggaggcaggatgggaccaaggcgtgaatttggtgagggcaatggcaatggtgttgagggaggttatggtggtggtggatttggagatagtggtttcccgcggagggaggaaggtgatggaaaggctatgggaagaggccatggaccacgtcagccttaccgtggtggtggtcgccgtggtggctatactgatagtgaggctggtgatgagtctggtcgcccccctcgccgggcctatgagcgccacagtggcacaggtagaggttatggaatgaagtgtgaggtgcgctggccgtggcatctggggaattgtgactgatgaagcccttgcacaagaaacagtagaaactgagggggctcctgctgtggctgaggctgaaaacaagctggaagaagcaccacaatctgaggttgagaagggcaaagagggcgaatcaactgaagtggaggagcctgaagataaggtacaagccatactatttatctcatgaaatcaatttgcatgtattgtactgttgtgggcttgtcgaaatatcatttctccctccataaatgatattgatgcgttacaatgtgaagaaactaatttctttaagcttgaagtttatcttgttttctagtagcccaagctttaatgacacattcttaaaaatagtttcagtgctagaaacgtccaaaaatagtttcaggataccggatacccttcttgcatgtaatagatagtacaagtaaaggttttatgtcttgtttcttatctactactgtcatgtttaaaaagtgtaaaactttagcatttggtgcctgctagtggtgtgccacatcttatcattcttgtataccggcaaacaacttaggttgtttctgcaatttagggagaaatattttagatgccaaatatctgcactaaaagctgttgtggattcctgtttagacattggaaaatattagacagctagctgagctccctgaagcttttcaggatagaaggctacagattataaagttgccacatggaaaatgatgtttgtactcttggttcacgtgatggaagcacatgtgatagtaattagaagttgcatgaaaggttattgaggcaactgagtaaatcctttactagggacaaatgtggtaatccgaattgttaggacaaatttaatattttaaaatagacatgtataaaatttgatgctgatttttcttatattatcaaacatattattacaaataagaatacatttttgcataaattgttttatgcattacttgctctctacaacaaaaaggtaaaaagataaccgaatttgtatccgaatccatatcgaattttatttctatcatttgaaaaaatatatgataaatttgaggtttacactttatgaatctttacaagctcaatgctaaaaataagaatatgaatttgcatagtggattctatatcctatttattcgcattcatagaaaaagacaagctatccgaataattactattttcatcctgttctcatccctgccgtttcctataacttcatgtttgctttgtgaatcaattgactcttgagtttttagcagcatataattgttgatcctctcaggtagttgatatttttaaatggtaagtgctgaaactgcagcttagatatgatttcatgtctccgatttcctaaagctatcatgcaattcttgtggtcgttgatgttgtgtgatagtttttttggaggccagccaaagctgttctcccaagtcttaactaatctcaatattctctgctaaactttcaatatgtttgtacctacaccctgatccatggagcagcataagatgagtgattcataaatactgttgctgaaatcgtagaagaccatggatttaaaaaattgacttattctccattcccactataatacttgctatcttattaaggaaagcaataatagagcctctttctaatcactaatcagttatagaactcatactgtattactatttggtttccaattaatgtggtttttattcttctcatgcacacttactggtgaaaagatgtaacaatacaatctacagatttgtcattatgcttaaattaaccagtaacatacgagtattggagtctttaccattataatcaatctggtattttctgagctgggaagatgccatctgccacatctgtgtcctgtgcaccacctaaagtatttggaactgttgcataactatgtaactgaatgaactgagtgattctgtttatttgtgcagttaataccagttttttgtgttactgacgatggaaaaatatctaggctctgcacagccgcatcgcagtgtttgacattattttcagaaattgtttgccatgctcttgttttttggtgatgatctgttactgattatgggctgattgatccagtgagtcttgcacattcaacaaattgttggctctgcaagtgctcaatttcacccagcctatagatagcttaggtagcagcgtcaaggaagctgctgcacatttatggctctctattaaaaatacgaacacacttgatctaccgtaggcatgtcacatggacatacaacatacctcagcatttttttgagagcatgtgttgtgtggtttctgtttactaattgagtttaatgagat

SEQ ID NO: 213736 - DNA, 953 bp, Zea Mays
aaaaagaaaaaaaaagtcctcataaactatagaggtccagttaagaaaatgaaccttttttcaacactaaggcccattcgataaggaggccgatgcgagtcaggccacatgacaaaacaaccgctcctactcttcagtggcaagcacatgttcactcgagcctgttcgcggtggagagtgatagctggggagtggagagtggcgaacccaagtggcggctacggttttacgatctctttctccttagcctcgtctgtcgtcttccttctacctccgttcctaaaccgtaaaccctagacctctcgtgtgtcgatacgatttgcccattcatggcattctctccgacggcgttgttcttgattactgattgagaggtcggattggtgtttcctttgatctgtgagtggagtttgaggcaaggagaggggcgacatggtccatgggcacgaagaactagttcgatctcctcgttgctcgcacctcatcgtggctgccgagaagaaggcggccgcatcgcccaagccggcgaccgtcgctccggccaaactggccaccgcccgcgcaggctgagaaacagtagaaactgagggggctcctgctgtggctgaggctgaaaacaagctggaagaagcaccacaatctgaggttgagaagggcaaagagggcgaatcaactgaagtggaggagcctgaagataaggtagttgatatttttaaatgtgagtcttgcacattcaacaaattgttggctctgcaagtgctcaatttcacccagcctatagatagcttaggtagcagcgtcaaggaagctgctgcacatttatggctctctattaaaaatacgaacacacttgatctaccgtaggcatgtcacatggacatacaacatacctcagcatttttttgagagcatgtgttgtgtggtttctgtttactaattgagtttaatgagat

SEQ ID NO: 213737 - DNA, 2228 bp, Zea Mays
cattccatccccaaccaaacaagtttagatataaaaatatagcatcgcccgcgctctggagagtctggatcctcctgaacctccaagcagcaagcgatgaaaggagggacgcaagcaattagcctgatggtgcaccttgctgtgccatggctctgccttgcttcttgggcagctctgctaccagcgctagcatctggaaatgtgggtgcagcagctccgatactgagagcagattacataaaattgaacttcagcaccgcttcggcgacccccgacaagtacaagagcttcatcgcttctgttcgtgctggcttgggcgctccgtaagcttgaagatggatgtctccagagcctacttcgtggcttacgtagcagggcagcgctcgtgcctcctcaagagatcaggccgcacgttctcgtcggcgatctgttactacggtggcccgtggggaacaagttcggctcctgtcacgcgacctgctgctgctgccggcgacggcgaggatcctggggtcgcggcatggcgagcgagagatctcgacgaggccatctcgtcgctgttcctgttccccactggcaacgctaccgaagaggagctgagacggggcgtcgccgcctgcgacatgatggtggcgagcgcggcgacgttcccgtacgtcgagcggcggatgagcgccggcatgtgggacagcaacggcgtggccaacgacccgagcctgcgggggctccaggcgcgctggccgtggctctccgccgccgtccagcagtcctaccagggcgccttcgccgccccggtccctgtccagcggagcaacggcaagtggatgcgggtggacaacgtgcgtagcgcggtccccctcgtgtccttcctggagcacggaagctgcaacaggacgcggggggcgccggccttgctcataaggtccgtcgtgcaagagccggacgaggacatgcagccgggcggcggcgctcgagccacgacggcggcgtgcggcctgccggccgagccgacggtgcgcctcgtcggcccggaagggaggtgcgtggacgtgccttacggctactactacaacggcaaccaggtgcagctgtggagctgcaagtccaccagcgccgtgaaccagctctggacgctcaagagggacggcaccatccggtccaacggcaaatgcctgaccagcagcggcgacgcggccggcgctcgcgcggtggtcgacgactgcccgcgcttccccacgggccgcgtcgtctgggaggtgcgcgtggacggtaccgtcgcgctcaagtggtcccgcggcctggtgctggccgtgacctcgtcgactctcttcgcggggctcacggtgcggcaggacgaccgcggcaccggccagtcgtggacgccgaccaacgtcaccgcgcccctggacgccgccatcgtggggttccgcgacctctgcctgcaggcggactacgcggggtccgtatccgtcgctgcctgccgcgacggcgtgcagtggtcgctctaccccgacggctccgtacgcccgcccgcgtggctcctccttcaatggcagtgcctggctgctgatgccagcgggggtgtgacggtgaaactctgcgacggggctggatcgtcttgcgagcgctgggtgttccgcaacgacggcaccatcttcaacaccggcaccgggatggtcttggacgccaggccatctgcgggggctaatgctactgctagccaagtcatcgtgtcgcccgccactgggagtcccacccagcagtggacgctcatgctgtgatctcatctacggctcatgagtcatgactgtgggggcagggcagtactgcactgcaacagctagctggtgtgttttgtgtatatatctggcgagctaggttgttaaagcaagcattagctattttaccagtacaataatgcatgcttgctactactactagtaatgcagtctagctctgtgtaccattgcctgcacggctgcacggcccctgttggagtactctataataaatgtacccctagtaaaatctgttttcagtttaccttgccgaaaaatataaacagggctagtttggaggggtgtttggtttgtcactccattcatcgtgaatccattactcaaatttggtgggatgatctaattatttatattagtaataactaactaactataagaaataaggtgatgatggatcaactcattccatttcataaaccaaacaaaaaa

SEQ ID NO: 213738 - DNA, 2889 bp, Zea Mays
cgccggatgatccaaaaaaacaaaaacaaataaaaaaacccgcaggaaaacgcgagagagcacagcacaaggccgccggtcccttctccccaagttcttcccactactcgccgcttcctgctcggaccgccgcggcgactggccggagatccagccgccgggagcgcggaggtcggccggtagctgccgtttcctgctggtggttgctgctggagatcggcggacggaagcagttggtgccacagggcttcgtgctgccgaatttcccagatattttgggggttcggttgaacccccatgcccgacgccactgtacttccctctgattattggtgttgtgcaaactgctcatgtaaattttgccacgaacattctagtgatggtgctgaagacactgctgatgttgattattcattgcatacttgttcccagtgcgaagagcagtatcatgaagcctgctctcctgagactgattccataactaacctttccagtcagacaggcaatttattctgccaacaaagctgcagactgctgttcgaggaattgcagaatcttcttgcagtcaagaaggatcttgaaccagaatattcatgcagagttgttcaacgcatccatgaagatgtaccagaagaagtccttgctttggacaaaagagttgagtgtaactccaggattgccgttgcactttcattaatggatgagtgcttccttccgattattgaccagagaactggcatcaacttgatacgaaatgttgtgtatagctgtggatcaaattttgcccggttggatttccgtggattctatatatttattttagaacgtggagatgaaataatagctgcagcatctgtccgaatacatggaaccaagttagctgagatgccgttcattggtacccggaatatgtataggcgacaagggatgtgccgccgacttgtagatggaatcgaaatgatcctcagctctctcaatgttgagaagttgatcattcctgctatcacagaacttgtggacacctggacatcgaaatttggatttagtccacttgaagattctgagaagcaagaagtgaaatctatcagcatgttagtttttcctggtacaggtctcctccaaaagccattgctaaaggccttgcctaatgaagaacaatgttcccaaggagacaaaactgagaaagcatctgatgtagtcaatgaagattctccttgctctgatgcaagtgctgatcccctaggtttgggggtcaaagagcatgaggacagcagcaaagacgctgatggcacttgtaacggtgacgtttcacaggaatgtccccattcttgatgggaagatttggttgcagttttctaggccccaagctttacatggactaagcctccatttgtttttgcacctcgagtttttgatccagcagttagcatgacatccatccgttggtgagaaagaggcttgccgggtttttttttggcatattatattagttgatggggcaccccttttagttttactcagaaattgatgattgacgcgtcggcctgggaaaagaatcaacccgtgcagttctgaaaagcgtttactccatccagccagctaacttaatgtgcagctgaaaaatcggcatgtagaagaatgtggaggataacgtcccttcttttgtttctcgtcgttaacttgagactccgagggcgaatgcagccattgaatcgtcgtaaatgttacagcagttgttgttttgttaataggtttttttatgtcttcgctagcgcattcctggaatctaatctcattcctgtaagataattcacatgtctgtaagatcagctaatgtatgcgcaaagctagaaatcatccgcctcatccctgtgttcgttcctgtggaaaggattcgctttgctggaatgtgtttgtttgttcttcctgtgaaggaaagcttttgcaggtcaaatcatcagttcatcaccattaagatgtgcatgcaatacaatgcccctggagaagcaaaatctacaggcaggcaggcgtctgcgatgctggtgctgctaaggttatcgaggatcttgttcttgacatcctgtggaagcggggcggacggccctgccagcctgccttggagcagaactccgccagcgatctgatccccttctccagcgcgacgtgactcctgcagtgcagtgaatagcgtcggcacggcgttcctgtaactgtgtcgactatattttgtcaattcgctacccaagacatttggaacctgcttggaacagctttttatgaatagcttttctgagaatctagcgcatgttcgtttctgagtattttgtctctgtagattagtagctacggctacaaaacagctaagattctcgatattctacctgtcaaagagaatcctagatgaataggtatgcaggtttagggctaggaaatgatgaatttctctcgtcatgacgacaaaaaaattctgcatttccgttgatttggcgatgtgtttagcggtcagaagctgattccaacagtcaaaatctgggcagaacccgaaaccaacatgccactggtatcgccactagccactgtttatgggaagcagagcactctagtttacttatcctaaaagaactgagaatgtggaaattcattatcatatcagatgtctaaactttgcattcctctcgacgtagaggacgtgtgtagaaaggaagaacaaaaaaaaaaaaaaaaacggcaagcatgaacagaaaaccaatccacaaaccacttcaatacttcatcccctattcgtttccgtcgattgggtcgtgggctgggcctggcccccgatccggcgctttttaaaggcctcgtggtcgtggccggatatttgcgcgttatttcggcgaagaaaac

SEQ ID NO: 213739 - DNA, 5895 bp, Zea Mays
cgccggatgatccaaaaaaacaaaaacaaataaaaaaacccgcaggaaaacgcgagagagcacagcacaaggccgccggtcccttctccccaagttcttcccactactcgccgcttcctgctcggaccgccgcggcgactggccggagatccagccgccgggagcgcggaggtcggccggtagctgccgtttcctgctggtggttgctgctggagatcggcggacggaagcagttggtgccacagggcttcgtgctgccgaatttcccagatattttgggggttcggttgaacccccatgcccgacgccactgggcttgaaatgggccttaaaggctctaagggagctccagtaccaggaatggaagggggtgtggcaaaggctcctgcttccttggaggaaaacaagtcctctgctgatgaggatcttggcagagggcctgccttgactgggaagaaaaggagggactgcaggggttctgcggatgaggacagaaacgtgacaaaaagggtgttgagatccgacgcaatgaagctgcgggctgaggctgaggcagcttgtgtggtagctgtggaggttagtaaaactgacagtttggagaggaaacgctgtgaggctattgtggaggctgagccttgtaatagcaggctgctgatggaagttacttgcaatggtgaggaagccaacgaattggttaacttggactccagtgacgtctcggaagagtcagctaggtgttctgagaataatatgggaatgcctagtgttcctgcaacagattcttctcaagataacggtttaggcacgcaaagtagccttgcagaatcagatattaagacaatgaagtcagatgagaagatgtctactgcaactctttcagagtgcaatgactccagagctggaatgaacagtttgagtgttgatgaggctcaagatgacaaagtgagacatgggccttgtcagggtgaggtcatagactcagcaatggctaatgatgctggcacaagtacaaatttaatcaaaatcagccctaccagcggatcagaatctgttaagcaggagaataatgtggttggtaccgaggaagtgatactccacagtagcgatacgaaagttgagaagcattctcacattgacgatgtttgtacagaaactgagatttctttgactgataatggaatatgcgcagtagataaccacaccgatctaactgggtgcactaagcaggaggagaggggcagccccatgaatgaagccaatgatgtttcatcacatgacattgtatttacaaggagaggtagaaaatcatgtgaggcaaagcagaggacatgtgaagaggaggcacggtttgagaagcgaatcacaaggtcagctacagttaggcagagagaagtttctgcgagctcacacaaaacttccacaaatgaggctgcactagaaggcagagggaggaagggagatattgttgctcactatacaaggaaagtaagcagtgcagtatctccaaaaggtcaccatgctgagctgggagactgtaataccagtatgccgaaacaaacagtgaaagaaacggtggttgatcgaagagactcaggtgtccctgagaatgataatcatgcgaatgtcacagagaataaggagtcagaaaatggaaaggagatcaatttgaagacccaaccacctgtgggaattgttaagaaaacatccggaggaggtgtttctgcggtggatcagaatgtctctggttcagccatcactgagagaaatgatacggagcatactgattctgatggagttaaatcggaaaataaaactcctgtgcagaaaccactactgtctgttggtgcgaagattgttgccagcaagaagaggatattggaagcagagcttgataaatccactgggagatcaccaattgctttgccatccatgaaaaagacaagaaatatgtcttctggtcctgagataaaccaacctgataagtctactggagataaacttattgagaataattgtgattcgggcaataagcgtgttctgagggaacggcagcatcgcaatcaaacaaatttgtcaaccagatattctaatcactctaatcaaaatgatatggagcagacacaggatcaatctgatgatgatgagatcagcagcgatacttcctacaggagaactcgtagcagacgtcgttgtggtgctgcccgtcttgctgtgccaaaacaagaggactctagtgattctgaagattttattgctgtgaaaaagaatcggcggaaacggaagaaatctgtgcataaacaaagggctggatctaagttgaagcatacttctggtccttccaaagcaggtcgtttgggtagacctcctctgatcaaatctgaatctagttccttatctctgcagccaggaaaaggggaaaggaaggtgcctgaaggtacaggaactcttcgcgaagaaaagcaaaaaataagtgatcagataaaggccatgcttctagatgctggttggacgattgatttaagacccaggaatggtagaaactacatggattctgtgtatatacctcctagtggcaaagggtcttactggtcagtcacaaaagcatattatgcgtttcgtgctggtatggaatctgagcagcaggaaagtcctaaagaccagtctttgtcaacaaaatctgttggtagccccgacaaaaggcaggtctctagttcttcaggttatactttaacagaggatatccttagcaaattaaaaagagttgttgtaaacaaacgaacaaccaaattagagattcaaaggttgagacagaaaaggttcaaaaaggaaaagaagaagaagaacgtttcaaattcaagaagcctgcatctaggcaatgaaaggaaaaagagaggtggctgtgctctactcgctcgtggatcgaacaaggagtctggcagcagcactgatggttttgttccatatgaatggaaacgtacgatcttttcctggctgattgatctggatgttctatcagtcaacactaagctgaaatgtatggatggaagccactcaaaggttttactagagggttttgccactagggatgggattaactgcagctgctgtaacgaggtctattcagtgcttgaatttgtgactcatgctggttctgaagtaaataagccatacagaaacatacttgtggatgggctagacattgaccttttgcactgtctcattaatgcatggaatatgcagtctgatgttgaaaggcaagatttctttccagttagcattgagggcgatgaccccaatgatgacacatgtggtatttgcggcgatggaggcaatttgatctgctgtgatggatgcccctcgacatttcacatgagttgtctaggactggaggtacttccctctgattattggtgttgtgcaaactgctcatgtaaattttgccacgaacattctagtgatggtgctgaagacactgctgatgttgattattcattgcatacttgttcccagtgcgaagagcagtatcatgaagcctgctctcctgagactgattccataactaacctttccagtcagacaggcaatttattctgccaacaaagctgcagactgctgttcgaggaattgcagaatcttcttgcagtcaagaaggatcttgaaccagaatattcatgcagagttgttcaacgcatccatgaagatgtaccagaagaagtccttgctttggacaaaagagttgagtgtaactccaggattgccgttgcactttcattaatggatgagtgcttccttccgattattgaccagagaactggcatcaacttgatacgaaatgttgtgtatagctgtggatcaaattttgcccggttggatttccgtggattctatatatttattttagaacgtggagatgaaataatagctgcagcatctgtccgaatacatggaaccaagttagctgagatgccgttcattggtacccggaatatgtataggcgacaagggatgtgccgccgacttgtagatggaatcgaaatgatcctcagctctctcaatgttgagaagttgatcattcctgctatcacagaacttgtggacacctggacatcgaaatttggatttagtccacttgaagattctgagaagcaagaagtgaaatctatcagcatgttagtttttcctggtacaggtctcctccaaaagccattgctaaaggccttgcctaatgaagaacaatgttcccaaggaggtttgggggtcaaagagcatgaggacagcagcaaagacgctgatggcacttgtaacggtgacgtttcacaggaatgtccccattcttgatgggaagatttggttgcagttttctaggccccaagctttacatggactaagcctccatttgtttttgcacctcgagtttttgatccagcagttagcatgacatccatccgttggtgagaaagaggcttgccgggtttttttttggcatattatattagttgatggggcaccccttttagttttactcagaaattgatgattgacgcgtcggcctgggaaaagaatcaacccgtgcagttctgaaaagcgtttactccatccagccagctaacttaatgtgcagctgaaaaatcggcatgtagaagaatgtggaggataacgtcccttcttttgtttctcgtcgttaacttgagactccgagggcgaatgcagccattgaatcgtcgtaaatgttacagcagttgttgttttgttaataggtttttttatgtcttcgctagcgcattcctggaatctaatctcattcctgtaagataattcacatgtctgtaagatcagctaatgtatgcgcaaagctagaaatcatccgcctcatccctgtgttcgttcctgtggaaaggattcgctttgctggaatgtgtttgtttgttcttcctgtgaaggaaagcttttgcaggtcaaatcatcagttcatcaccattaagatgtgcatgcaatacaatgcccctggagaagcaaaatctacaggcaggcaggcgtctgcgatgctggtgctgctaaggttatcgaggatcttgttcttgacatcctgtggaagcggggcggacggccctgccagcctgccttggagcagaactccgccagcgatctgatccccttctccagcgcgacgtgactcctgcagtgcagtgaatagcgtcggcacggcgttcctgtaactgtgtcgactatattttgtcaattcgctacccaagacatttggaacctgcttggaacagctttttatgaatagcttttctgagaatctagcgcatgttcgtttctgagtattttgtctctgtagattagtagctacggctacaaaacagctaagattctcgatattctacctgtcaaagagaatcctagatgaataggtatgcaggtttagggctaggaaatgatgaatttctctcgtcatgacgacaaaaaaattctgcatttccgttgatttggcgatgtgtttagcggtcagaagctgattccaacagtcaaaatctgggcagaacccgaaaccaacatgccactggtatcgccactagccactgtttatgggaagcagagcactctagtttacttatcctaaaagaactgagaatgtggaaattcattatcatatcagatgtctaaactttgcattcctctcgacgtagaggacgtgtgtagaaaggaagaacaaaaaaaaaaaaaaaaacggcaagcatgaacagaaaaccaatccacaaaccacttcaatacttcatcccctattcgtttccgtcgattgggtcgtgggctgggcctggcccccgatccggcgctttttaaaggcctcgtggtcgtggccggatatttgcgcgttatttcggcgaagaaaac

SEQ ID NO: 213740 - DNA, 878 bp, Zea Mays
cacagtttcaaatcccattactttctcccttaaaacctcctctcccctcgttctcctccgcctcctcctcccacctccccacacgggcacacctgccctccccgtcgccgcggacccactcccatggcaaagctcccgcgtctaccctgctcgtttgccgttctcgcgctcatgtgcatcatcccgctcacagcgccgcggcctgcactgtcctcgcgcgcggccccaagggacggtgtctccttcgccggcgcaggcaacacgatacatcaacttcttaaagatcacggccttcccggaggactgctcccgcgcggcgtggagtcgtacaccctggacgagtcgaccggcctgctggaggcgcggctgtcggcgccgtgctacgccacgtacgacaacggcgaactggcctacttcgacaacgtggtgcgcggcaacctcagcaagggcgcgctccgaggcgtggagggcctctcccaggaggagctcttcgtctggctccccgtcaagggcatcctcgtccaggaccaggaacccggggtcatcctgttcgacatcgggttagcccacaagagcctgtcgaggtcgctcttcgaggacccgccggactgcaagccgtcggcctccggcgggatgagcgccgcctccgccgccaggagggagggcacgcaaggtgttactggactacggttgaggcgagagatggcagcagcaggcagcgaccagagtcaggagcagaggtgaggaggaggaggaggagctctgagacgacaacacccgagacaatggcgagccagttttccgctttataaaatcctgcggtgagtgagtgagtgagtgagtgagagagagagagagagagagagagggcacaacaa

SEQ ID NO: 213741 - DNA, 3029 bp, Zea Mays
gcaaagtatgcgtattaaggacgaaattaatgcccatacccctctcattgtcccatcaaactcgctactggcctcgggcccgcccgtcgtgaggtccgagctcgatgcagccgatccggcggcggcaccgaggctttgcactcctctgtctctccgccgccctcctcgctgccgccactctgctccccggcgccgccgtcgccgaaggtgtcacgccctccgaggcgcgccggctccgcgacgaggtgaaagatatgttctatcatgcgtttgatggatacatgaagtatgctttcccactcgatgagctgcggcccttaagttgccaaggtgaagactcccttggtggttatgcgctcactcttatcgattctttggataccttggctttactgggtgataaggagaaatttggtgctgctgtggagtgggttggtaagaatgtccactttgatattaataaaaccgtctctgtttttgaaaccaacatacgtatccttgggggtctgctatcagctcacctgattgccagtgattatgccactggtatgagaatccaatcttatgatgaccagttacttcatttagctgctgacttagctcagaggttgttgcccgcatttgacactcctacaggtattccatttggatctgttaatttattgtacggagtcgatgaaaatgaaagcaagataacatcaacggctggtggtggtactttgacactggaatttggcatattgagtcgcttgactaataatactgtttttgagcgagttacaaaaaaatcagtgcgtggaatatggtcacgcagatcaaaactcaatcttgttggtgcccatataaatgtctttactggtgaatggacacagaaggatgcaggaattggcacaagcattgattcattctatgaatatcttctaaaggcatatttattgtttggagatgaagaatacctgtacatttttcaggaggcttacaaagctgccatgcactatctccatcatgatccttggtacgtggaggttaatatgaactctggtgctactgtttggccactcttcaatagtctgcaggcattctggccagggcttcaggttttagctggagatgttgatcctgctattcgcacacatgctgccttcttcagcgtctggaaaaagtatggttttacccctgaaggttttaatcttgctacatccactgtacaggtaatgaaactgttaaactataatagtcaagagtattagcataatctcctatctaaggtttgccatttgcctctcattatccctaacaaaaacaatttttaccaaaccttatggaaggatgcactctaacccttgaacttcaaactctcatattaggcctttctacaggaaaaggattgtagataaattgtatgaatcgattgaagggttaatttttttcctgttgccctgtgatagctgggtgcacaaaagttgaaggacagaagagacttactgatttatacctgcactaatatttgctgttttcaacaattcatagaatggacaaaggagctacccgctacgaccagagttgattgaaagcacatattggttgttcaaggctaccagagattacagataccttgatgttggaagggacatattagcaagccttcaatatggtgccagatgcccttgtggttactgccacatatcagatgtggaaacccacaagcaggatgatcacatggagagttttttccttgcagaaacggtcaagtatctctggcttctttttgatttagctgctggccctgacaatattgttgaaaatggaccatataagtacatatttagtacagagggccatttgttacctgttactcctgagatagccttggaagatgaacattgttcatattttggagcattctgtaatggcggtgccgaccatggatatggtgctagtgctagttctactaagcatcgaaatggaaactatacccaattagatgatattcaaaccccttccagtcactattcaatgtccaatgtgttgtttacgccaggttacatcaagggagtttgtccaggattgactcatgcgcagaaatttgggatatcatactctgatgaagaggataactttatagagcagacttctgagagtcttgatcatcatggtgaatctgccatagaatctagcgtccaagaccaatcaagttctattatattgatctctcacccagtcgcaagccaacaggatgaggcttttgagagcgagtctggaagtcaagatcatgcaaatattgttgtaacttctgattctgattctgattccacaagccgtgataatactgttggctctcccggaatgaactcggaagaacttatggacgacatatagggcacctctagacaggacaaaagatgaagaggttgctcacagtgttgagtccaagatatcagctgaccctttgctcatgtagcaacccatttctgtggaatcttcagggtcaatggcttgccgaatgcagaacaagttagcaagcaagcaaaatgtctggtagacgattccagtatcttgccagcttcaacatcggaaattgatatttactttcagatagaatatattacagggcgtacattcactaatttgttcttttttttctgtatcgatcactaatagatattattttgattaatagagaatgcacgagttttgtacaccagatgcatatgaagaggcgcggcacacatcacaggatctatttagtgtagaacagaacagcaaacgagttttagcgtgtatcttacaagattttagattcgaaaaaatcaaggatttgaagctaacatgctcttgatagataagcagcaggagacatgttttcttttagggtgtgtttgcgaccctgtgtctggccagctcgacctgttcaactggtccagacagctcgacctgttcaactggtccaggctgaggctagactgtcctagatactgcaatttattttgtttgtgcacttgtactatatgagtctggttcatacgatc

SEQ ID NO: 213742 - DNA, 884 bp, Zea Mays
gccatttttcgtctcctgtgcgctattctttgtccaatgccgttcctgtggtgaagccaccgcccctcttcatgatgactccgccaactgggaactgcagtgaccatgaagcgcatgctggaaacctcatttcctggcattcatgttatcttgcataattatcctcctccattccccaagcgtgtactcagcaaagttatcccaattgttcaagttggagccgttgcaacaataatggctggtgaccagattttccccagaattggaatggttgctcctccatggtactactcgcttcgtgccaatagattcggaaccatggcaacaatctggctatttggcaactttgctcagtcctttctacaaagctctggtgcctttgaagtttactgcaatggagatttggtattctcaaaacttgctgagcagaggttccctagcgagttcgagttgcgggaccttgttggcagcagattgcctgggtctccatttgggaggaatccggggaaaaccctgacttgatgatgaccccggaaatcagagctcagaatgccacaatttattatgttgcttttaaggtattagtagatagtaactatttggtattgatctatcgaggctgcagcttgtctgtaaacacaactttccagcttgtataatggatcaacggatcacctgacatgtgacggtggccgaagtactacgaactctaatgacattggaacggtaaagatattgtgatggcctgttagtttatgggaggtgtactgtttggcattgatctcgatgtaaacaaacaatgttagcattgtcccatggggaagattaagcgagcaggatgttaaagatacaatcattggcatcaagaggtcgttagatctttt

SEQ ID NO: 213743 - DNA, 820 bp, Zea Mays
attgccctggcaactataagaaaaggggaactgcagtgaccatgaagcgcatgctggaaacctcatttcctggcattcatgttatcttgcataattatcctcctccattccccaagcgtgtactcagcaaagttatcccaattgttcaagttggagccgttgcaacaataatggctggtgaccagattttccccagaattggaatggttgctcctccatggtactactcgcttcgtgccaatagattcggaaccatggcaacaatctggctatttggcaactttgctcagtcctttctacaaagctctggtgcctttgaagtttactgcaatggagatttggtattctcaaaacttgctgagcagaggttccctagcgagttcgagttgcgggaccttgttggcagcagattgcctgggtctccatttgggaggaatccggggaaaaccctgacttgatgatgaccccggaaatcagagctcagaatgccacaatttattatgttgcttttaaggtattagtagatagtaactatttggtattgatctatcgaggctgcagcttgtctgtaaacacaactttccagcttgtataatggatcaacggatcacctgacatgtgacggtggccgaagtactacgaactctaatgacattggaacggtaaagatattgtgatggcctgttagtttatgggaggtgtactgtttggcattgatctcgatgtaaacaaacaatgttagcattgtcccatggggaagattaagcgagcaggatgttaaagatacaatcattggcatcaagaggtcgttagatctttt

SEQ ID NO: 213744 - DNA, 2526 bp, Zea Mays
gccgtcagccccagccgaaggaacattaacaaaccgcccgccgcttccttcacgtaatctcgcgtctcctccgccgcccccgtcttctcctcccctcttgctaaagcaaagcaacctgcaacccgcaattattcctcccccgcacgcgaaatccgcccgcagctcttcgtccccggaggaccaagcctgcgcaccagagatgtcgtacgcctacctgttcaagtacatcatcatcggcgacacaggcgtcggcaagtcgtgcctgctgctgcagttcaccgacaagcgattccagcccgtccacgacctcaccatcggcgtcgagttcggggcccggatgatcaccatcgacaacaagcccatcaagctccagatttgggacacggctggtcaagagtcattcagatccataactagatcatactacagaggcgctgctggtgctcttttggtttatgacataactaggagggagactttcaaccaccttgcaagctggctggaggatgcgagacagcacgccaatgctaacatgacaataatgcttgttgggaacaagtgcgatctgtctcacaggcgtgcggtgagctatgaggaaggcgagcagtttgcaaaagaacatggtcttatcttcatggaagcctctgcgaagaccgcacagaatgtcgaggaggcatttgttaagactgctggagcaatctacaagaagattcaagatggtgttttcgatgtatctaatgagtcctatggaatcaaagttggatatgcaatccctgggcaatctggaggtgctggtagctcgtcttctcaaggtggtggctgctgcagctaatctgctaacgccgttaacaaatgcatatctgtcgtgtgtcacataccagctgcgctgtgaaaaatagttattgctgctccagggtgccttgttatttgacgcaccaatggatcctgtgcctgatcgacttgagagattcagtttatttacgtcaggtgtttataaactccctgtaaatcactagattcttcactgttttccgtcattaggcactcaacaatcgtgtgtccgtttgcatgtgtaaataaggcacatctacatattgtttgatatgatattaatttgtcctgttcgaatatgttggcaagtttcgtaaaatatgcgtcttcaatacatgcccaaagaaaaaatgttaggacaccttttgtgtgtgcttcgatgattgcatcttgctggttttgtagttaaatggcatcaagcggagaggttgagaagagagaaaaaaataaaagtaaaataaaagaaggggaaaaagaaataagatgcagagagagagagataaaaggaaagaaaaacaaggtttgcagctattgtacctcgttgttatatatatatatatagtttacgtattaggagtcctgagctctctttaactagagaaagccctgattcttatccgaccagccacaagatgtttcagatgcaccgtctgatccattcaatataacgtcaacagacttttatgctttgttgtacacaagtttacgtttattttgtcatactgtctgaaaccgcctcctgtactatcatataaaccgaccgcgacgactgctttgaccgagaggaatagggtttcagcggcggcggcagctgccgagccccatcccccgatccaaagcacctcaaaccaccgctctgcccagatccacccagctactgcggtgagcccgtggggacggtggcggtggcgacggagcggttccctcgggaggtgagctcggaggcgttattccactgcgtccgcctaggcccggtccacgagactggcaccgaggtggcgtaccagaccagcgtcaaaatcgccggccacgtcttcaagggcatcctgcacgacgtcggcccggacccatcatcgtcggtcgctgcgagcgacgactacttccgccacgccaccgacgggtcctccccgggcacggtgggcgaaggcagcgtcgcgggggcgggcccgtctcgtcattggctgtggtcatggacccgtacccgacgccaacgcccgaaccgtacgacggctcacatttcttccacggccatccgaggtacgttgaaaataaatattggatctcaaaaatggcattctagatctatctaccatttcgcttacacattatggctatctcacattcatgggttgcaagatatggacgacatgattttctccatattaggaaagctggaagagccttttgaactcacttttttttgctaacaatggtgttatggtgaaacatagttttgcgtgtatgtaccaacaactaaaatataaatacgacattatcatagttgagtacaggaataattattcttatatcttattgtaaaatctaaaacagttctcctgtagatggttagcttgcattttacgctacaattacctcagatcacttcttgttgtattttacacgaatttacgatatttcttgatgcgttttatgacaacctcgtgcgcagagagatatattcggtctacattcgtt

SEQ ID NO: 213745 - DNA, 3209 bp, Zea Mays
aaaaaaaacacccgaaggaaagggaaatcgaccaactgaccaagtgttcgccaaaaaccaagcatagcaaagaccaaagcaaaaggccatcactgacggcaagaaagaggaaggagaccccccgagggtcgacgtctcgcgatttccggtggcaaggttcggttttgatccagacgcggccccaggttgctcatcccagtaacagtcgccgcttccggcggagcaaccgtaggaaaagatcccgatttcctttttatccggtagcagttcgtggtggcgccgccgccccccgctaccttcgttttgcgaggttccgattcgccagctgctggagtgaggtggggagcgcgtgtcgtgggattcccgttcggatctgcggagggggctgctctcctgctccaatttggttggccggcaatgagggtccttgaatcttgttgatgcgctgccagatgcgggaggagtactgggggaaggtttcttgaaatcttcgtctgggctccgtggagtgaggtccctcgccgggatcgccctgtcgtcctatgggctgtgtcagttccagacaattccacggcggggacgaccgtggggacggcaagccgcgccggcggccctcgagcaactcgctgaagcgcctggttagttccagttccagcaagaggcatgaggagttagaagaggagtatgaggaaggggtggctgtggcagccacgtcctcaagcgccggacgccgcgctgggaatgacgccagcacggcgaggttgatccggaagcctccagcattggtggtcgaggctgtgccggcattgttagaggaggcagccactttggcggttggtgtagttgatgcagaaagggaggtttctgcaacgactgggaaccggaagaggcctccagcggatgtacaagtcaatggtgtggcggaacaagagccgaggagcggtggcgttagagcagagggggaggccaaactgaggaccaaggacatgcccaatggcgtccagggggagcacgtggcagcaggatggccgagatggctcacagaggtggcggcagaggcggttcgtgggtggcaacctcggagggccgagtcttttgagaagttggacaagataggacaaggtacatatagcagcgtttataaagcacgtgatcttgagaacggaaaaattgtggctctgaagaaagttcggtttgccaatatggaccctgagagtgtccgatttatggcaagggaaatccacatcttaagaagacttgatcatccaaatgtcatcaaacttgaaggtttggtgacgtcacgcatgtcaagcagcttgtatcttgtatttgaatacatggagcatgaccttgcaggccttgcagctaccccaggcttaaaattctcagaacctcaggtcaagtgttacatgcaacagctactctctggacttgaccattgtcataaccgtggtgttttgcatcgggatataaagggtgcaaatctcctacttgacaataatggcattcttaaaatagcagattttggtctagctacattctttaatcccaaccaaaaacaacatttgacaagtcgcgtagtaacattgtggtaccggcctcctgagcttttgttgggttctactaactatggtgctgctgttgatctatggagtgccggttgcattcttgctgagttgctgtcagggaagcctatcatgccaggacgaactgaggtggaacagttacacaagatttttaagctttgtggttcaccatcagaggagttttgggctaatctgaagttatcccgagctaccatattcaagcctcagcatccgtaccgccgatgtgtgaatgatgtatataaggacttccctactactgctttaacacttctggactatctacttgctgtagaacctgggaataggggtaccgctgcatctgcccttgacagtgaatttgttgttttctttttgtagttctttacaacaaagccttatgcctgtgatccatcaaatctacccaaatatcccccaagcaaggaatacgatgctaagcttcgagatgaagaagctaggaggcaaagagcagctgctaaaggacaggaagctgaagctggacggaggaagcaacttcctgcacccgatggtaatagtggattgcagcaccgccgagttcaggtgaattccaaaaacagcacttacaagttcactccaaaggaggatgtttctggatttccaattgatccgtcagcaagagctgcagataatggttacccacagcgtgttcctttgatgcaagctggccgttcttcgtccactctgggcagatcaagtggaatggatccaaaagcccaacgatttcacacctcccaaattgttactattactacagaaatgtccaaccaatctactgcatctgggcagagaggcaatgctccgaagatgtctaaccttggggaaagtgcccggaggcaatatttgagagagcaccggtccagttcaagatacagtcagctcaccgctgctgacccttctgacagacctgagtggaatcatcagttccaagaaagaccatcatcttcccatcggaaggatgatgctgcggtaaacaaagagactacagtggtgaatggcacaaagaagaacagaatccactattcgggaccactgatgcctcacggagcgaatatggatgagattcttagagagcacgagcgacagatccaacaggcggtacgaagagcccgccttgacaaggggaagggaaagcacaacggcgagagagaccagtcagaggcactgctgtacaccaccgggaatgtcagggctgatcgctgaaaagttcagtttggtgtggacccccgatttgagcaaccatcagaagcgtagaaaatagcattgagtcccttctatttttccacaccaagtggagaggtttttgctttgccagaaactccaactcctgatgcggtttggtgcccaggagatacagctgccaaaaagaaaacctgttcctgtagagatttaccacccagagtttagcattaggctgtctaaaatatttttttctcaagatttgttgctggttatccatagccatcaattgtatatctcaagtcaagagtactctccctgaaagttgatccacatacctgttttgacatatgacaagatgaatacagatcgaaatacaggccactgtctgctaccctctgaactctg

SEQ ID NO: 213746 - DNA, 3032 bp, Zea Mays
caaacctcaccggcggcggtcattgaccgcaactggttgccgtgtttacttcccccacgcgccacgtttccgcgcatcccgagactccgagagagtggctggcggaacggaacacaaatccaatctcgctacgtgaagttcgcctcgcggcctcgcctaccaccacccgtgcccgtgtcccgccgccggcggcgctggggatggcggggcccaaggcggctgaggacggctcggcggctccgctgctgcctgcgcaggcgggggaacggagctcaggaggcgtgggcggaggggccacgtccgcgcagacgctggggaacgtggttgtctccatcgtgggcaccggtgtgctcggcctcccctacgccttccgcgcggccggctgggtcgcgggctccatcggcgtcgccgccgccggctccgccacgctctactgcatgttgctactctgcaaatacccccgtttatattatttgaagacaccataagatggacaatcaaaggcggagattgcttgattgcacgattgcaccaatacatataattgcacaagatatgtcttcatactggactactggtgtattccctccgaccccccaaaatatctttctagttaatcaatcttaacttttgtcaaatatataaaaaaatgtgttaatttattatgcataaggagcatcattagatgaataatgaaacacatttcagtaataaatttatttggagcttactccaaacctaggatgatactttttccttggtggagagggagtaagaaatttcccacctgttcttgtatcgtacagattattgagttgtggtttcccatgtccaaattttcaagaaacgaactgcaaaggacaaagtgtttctgcttgcattactctctcattcatcttccaataaaaaaactgtgagtccgtctttctgccatttgaagcacgactctcctaaatgtgctaagattctgccaaaagattagtcaatgaatcaaacttgattttgcaattgaccagcttcttgactccattttaaattcaaaatgcactggtttctttccgacttaaagaaaaaatcgtttaaagatagccaaatacaatagttcttagagcaactccaagtgattagataaaaagactagccaaatttactgatttagctactctctaaaatagattttaaagaaaaagtgtaggctaatccaacagactcgataaacctacggactgaatagagagtgaaaagcatgctatccaaaattggagagcgaagatggagaaatagagagtcactaaatttgaagagtcgtttatagagtctattggatacaatttttttttaatattagctaaatttacctttacaaaaccatatagctagtctcttggagttgctcttatattgtctgtttagattgtgcaagattttgattggatttagtgtaaggagtttgttgatgctgcttaacatttgacagcaatattatgattgtaacttatataaatcaactaaggtttggaactgctatgccaggtctttgtcaattatgaatagaataacattaattgctttctttttgggcaaacattttttctataaaaattaatccctctctgtttagtttactcggtgccattttgattttgaaggtggactgcagggataaactcaaagaggaagaaactgaagagtgctgtcatggtcactatacatatggggatttgggtgacaggtgcttcgggactataggccgatgcttgacagagaccctcgtccttgtttcgcagatagcgctctccttcatccgctcactgtcgtccctttctccgttcagtatatttgcagacgtgtgcaatgtccttgccatggcaatcgttatcaaagaggatcttcagctctttgaccaccccttttcaaacagaagcgcttttaatggactgtgggcagtaccattcaccttcggtgttgcagtcttctgtttcgaaggattcagcatgacccttgcactagaagcgtcgatggcagaccggagaaagttccgctcggtgctttcccaagcagttgccgccattatagccgtgtatgtctgttttggagtttgtgggtacttggcctatggcgaggccaccaaagacatcataacacttaatcttccgaacaattggtcgtctgctgcagttaaggttggcctatgcatcgcactggcattcaccttcccagtcatgatgcacccgatccatgagatcgtcgagacaaggttcagatccaacagatgctttcggaagctcagccacaacgatggcggcgcggagtggataggcttgcacgcaagccgcgtcctcgtggtggcggtcctcactgtggtggcgtccttcatccccttctttgggtccttcatctcgttcgtcgggagcaccatgtgcgcgcttctctcctttgtgctgccggctctcttccatctcagcattgtaggctcgtcaatacccttgtggaggcgggtgctggactacggcatccttctctttggtctggctttcgctggatatggtcttgtcactgctctctcctcgcattgaacaatggcccaaacagtcaaaaaagtgcagagatcaggatatcttgtgatgacaggagtcaaatggatgctaggagcaccatatatcagatagcacggctcggattagtgcgtgattgaactgatccgcttcaacccatatagccgcagtcatccatggaagatataccttagcggattggaatggtgatttcgagaaaccaagttgacattgttctatgcatgttacaaaaatctacagatgtcatgaactttaagagccatatcttaatcgcgtatgcatgttacacatctacatgtgtcacgtttcaaaaaaaaagtttatgttgactattcgatccgatccatcatgtatgtcacatttgaataacaaaaatccattaatgtgtatgtttgcagtgctcgcttaaagggtaactggaacgtgcctgtgtaatgccacggaacataaattgcg

SEQ ID NO: 213747 - DNA, 780 bp, Zea Mays
ccgaatcagccatgtatataccttctgtagaagataccgttcttggtattgtggtcgacaccaaaccagactactttcatttgaaggcggtacaaggagaaacatacccaagttcgagattggtacattaatatatgctcgagtggtgaaagcaaatagtatcatgaatcccgagctctcatgcatggatgctactgggaaagctgccgaatttggacagctcaaagatggttatatgttcgacacatcaactggcatgtcacgaatgttgttaagttccccaacgtgtccagttctggaggtccttgggaaaaaactgtcgtttgagattgctgttggactcaatggtcgagtctgggtgaatgctcctgcagcaagtactgtcattcttgtatcaaatgcaataatgaggtcagaatctttgagcggcataaaacaaagagctatggtagaaaatctattggagagattgtcatgatgataagtcagcaagcattagtctaaagtaaaatggaggagtttccattgtgtcagttcaaagtaaaagtaggaaagtttgagatcaaagtgactatccccatcaaaagattattatgtatcacgtgtcgtagtatacagtacactatactcttttttatattaaattatcaatgtatttatcaaagtcttgcgtcccttgtttaatattcgaagggcgggtctagtgcaatcgtgagacctgtctcactaaatcaccaggtcacggctttgaagcagtcttatcatgtttgtgggaaaaag

SEQ ID NO: 213748 - DNA, 877 bp, Zea Mays
ctccgtttgcatgttgatattggagggcatggaattgaactgggttgaataccgaatcagccatgtatataccttctgtagaagataccgttcttggtattgtggtcgacaccaaaccagacaactttttggtagacataaagggtcctaatttggcctttctaccagtactttcatttgaaggcggtacaaggagaaacatacccaagttcgagattggtacattaatatatgctcgagtggtgaaagcaaatagtatcatgaatcccgagctctcatgcatggatgctactgggaaagctgccgaatttggacagctcaaagatggttatatgttcgacacatcaactggcatgtcacgaatgttgttaagttccccaacgtgtccagttctggaggtccttgggaaaaaactgtcgtttgagattgctgttggactcaatggtcgagtctgggtgaatgctcctgcagcaagtactgtcattcttgtatcaaatgcaataatgaggtcagaatctttgagcggcataaaacaaagagctatggtagaaaatctattggagagattgtcatgatgataagtcagcaagcattagtctaaagtaaaatggaggagtttccattgtgtcagttcaaagtaaaagtaggaaagtttgagatcaaagtgactatccccatcaaaagattattatgtatcacgtgtcgtagtatacagtacactatactcttttttatattaaattatcaatgtatttatcaaagtcttgcgtcccttgtttaatattcgaagggcgggtctagtgcaatcgtgagacctgtctcactaaatcaccaggtcacggctttgaagcagtcttatcatgtttgtgggaaaaag

SEQ ID NO: 213749 - DNA, 1641 bp, Zea Mays
ctttatttacccagaaaccctagtctctcacgctcgcggagtcagtctcaccatctctctcggccgacagccggccaccaccagccgccagtagcaatagcaaattagcaacccgccgagcaccgacctctccatagttcctctacggctctaccgagcaaccgccggcgtcgaccctgccgtccaggcccgtcctgccgcggtgccgcctgcgtccctgccccagccacccggccgccacccgccgccgccagcgaggagcgagtagtagcgaccctggtccctgccgcccttgcgttcgtggctccctgcccagtgcccctgcgtcagcgtcactgcactctccgaggtggaggtggttctcaaatctcaagtccatccacggcgctactaccctcgctgcaatggagttgaggaggcctgcatcctctcctcttgtcgacaactacgtggtacctggtgacgtcgtcctggacctctctgagatgaacaaccagaccattaaactcggcgcgggtctgcgtcaggagtgtgacaccatccaggcgactagtgctgggaagctgcggcagttgaaacccaacaagtattggattgaaaactcacagaaaagatatataccttctgtagaagataccgttcttggtattgtggtcgacaccaaaccagacaactttttggtagacataaagggtcctaatttggcctttctaccagtactttcatttgaaggcggtacaaggagaaacatacccaagttcgagattggtacattaatatatgctcgagtggtgaaagcaaatagtatcatgaatcccgagctctcatgcatggatggtaagttttttagttttcagctcagtgtccattttccttaattgatcatcagaacttcagaagtatggagtaccaaattttcttcgtcttagcaaatatatcctcattgcctgtgcgaacctctcagcttgtggaatgatactcagtctggcctgttttcttttggctttatctggttgttcttttactgtattgatgctgttcctattttcaagctactgggaaagctgccgaatttggacagctcaaagatggttatatgttcgacacatcaactggcatgtcacgaatgttgttaagttccccaacgtgtccagttctggaggtccttgggaaaaaactgtcgtttgagattgctgttggactcaatggtcgagtctgggtgaatgctcctgcagcaagtactgtcattcttgtatcaaatgcaataatgaggtcagaatctttgagcggcataaaacaaagagctatggtagaaaatctattggagagattgtcatgatgataagtcagcaagcattagtctaaagtaaaatggaggagtttccattgtgtcagttcaaagtaaaagtaggaaagtttgagatcaaagtgactatccccatcaaaagattattatgtatcacgtgtcgtagtatacagtacactatactcttttttatattaaattatcaatgtatttatcaaagtcttgcgtcccttgtttaatattcgaagggcgggtctagtgcaatcgtgagacctgtctcactaaatcaccaggtcacggctttgaagcagtcttatcatgtttgtgggaaaaag

SEQ ID NO: 213750 - DNA, 3846 bp, Zea Mays
gccgacacaacgccactgttcgtcgcacttttttttggtgtgcgccgcccgctaaactgcgctacggctacggatttcactagtacctcgtagccaccacgaagtcgccaatcccaatgccaggaaggaagtctcacgaattccctcatgtgccgatgtgcgcaccgcctccgaatgctggaacgggtattcctcttctcgccgccgtcctccgctccggtgagggtcgctaccgctttccggatgcgcttcctactcgttactgacagagggtactgggattccctttgcaacaacctcgcaacccatgggaagagtagacatatctgtataaggatccaccaggtaccagagctggcttgcattgataatgaggctccggcaagagcttgggcctgcaatatcatcttgatttgttgcttctcttgagcatcctacaactactgagacaggattcactacaggagccaagaactggatgatcaaggatggtgtcatgcccagagcatgataattgcatcccaggtgtgccacaggatggagggtggcttggaagccgaaaggggaaccggatctctggtccatgcttgtggcatcgatgcgatgggcaagatttgcggaagtcatcatcttccttcgatgtggcagcataggatgcatagttgagaagcaaaagcagcagcactgccagaagaaatttatgcgagttcatgggggatgtgttcggagatgaaggtgggcgaggagaaggttgcaagtgcttcagaatgagcacctatctctatttgctttaacctctcgggaggagagattatgtgaatgtcatgaccgctacgcggtggaaaggaattcctgctgccaatattgctttaccaggaagtttcctttcttcttcagtcttattcctcccttctcgaatattatatttatcttctgttagtattattttgactgctttgtgcacgcctaacgacctggcttttattttcctagtcaagtcactataagactttttaatttcggataaggcttgtgattgccgtgtttcaactgaaagataacctttttttttcttactctttcggactttcggttgcgtgaaagacccatgcgaaccaaaaaagagaagacacaaaagaagaaagactcaagtcagtggcatcacaatcatgaagtgtgattctcttgctcaaatagctgttacgtggaaggtgcatacgaaccaaaagacagacaaaagaagatagactacaattgaagtgcgattttcttgcaagttgctatgctcggcctatctaggggtaccgtcccactagtaggagataaaaatatacctacatatttcgtacgtgacgtaagacaaccgtcaaaactagtgttttatagtagttgagattgtgatgctctagatatatatgcttaagttacaaaggatatgttgttaaatttttatatgttttcctattttctataagtgaagtcttctctcccttttttcttattttctgtttttatttcaatttctaaattcaaatcaatttcaatttaaatgtaacaataaaaaacccagcatgtagtgcaaggtaaaattttaactttaccttttttcaagaaaatatttctaagtagacaattcataagagaataattccctcaaataaataattaaaaactttttatttaattctgaacttaaaatctggtattacaggtcccatccaatcgcaggccatttgcaaaccagaaaaagcgaaacgcaaaaaaaatcacaattatgtggaccagtcatgtgcgtttgtttctcaaatacaagatgatactcaggctgtgactcttgtttctactcactccacgccactgactggcaggcgattatgtgattcatgaaccttcttgccatggcgacgatgtctgcagcgtctcatcgctgctgtgcttcttccttgagagctttaaccgtgttatttgtgttggcagctcctgtttcagatgtagaggggcgacatcatcgtcatgtctgtccttatttctcctgcggtggtttaagcaatatatcgtatccattccgtcggcaaggtgatccatctgggtgcggtgtccaatcgtgtgagctggtttgcacggatacagacgccacaattcgcatcggcagtggaacatacaagtctgcagccttcatgcggttacctagccatgactcctttgggtagtccaggcatgccggtgcccaagaatacaagctatccagatgttgttaagttcatgaggaatggatttgcccttggatttactgtttcgattcctgaccccaacatcagagaatgtttcgctgagtttatgcgtactttccttaaggatccaagaagtagtacaggcatcaaggaactgattgtggacattcttagggtcgtcgacatattcttggcttgtgttatctatcaacttcaatcaactaataataatggtgtcacaactgttctcatcggcatcattgaaacgatacaatatgttagcggggtcctgaaatatacagcggttgtttgcaggttcgtattaatgccgctggcagtattcatcttcctagtctataaatactggaaaacaaggataacagtagatgcagtcgagaagttcttgcaaatgcagcagatgctcgttccaatgagatatgcatacacaaacatcattgctatcaccggccatttcagagacaagctcggacaaggtggttacggttctgtatacaagggggtgctacagccaggtgaagttcatgttgctatcaagatgttgggcaactccaactgtaatggagacgagttcatcagtgaggtcgccaccattggcaagatccaccatgtcaatattgtgcgcctcatcgggttttgctccgaggaaaatagcagggcacttatctacgagttcatgccccatggatctctcgataagtacatcttctcgtcggagaagagtttctcgtgggacaaactcaatgagatcgctctgggcattgctagaggtctcaactacttgcatcatgggtgtgatatgcagattgtacacttcgacatcaagccacacaacatccttctcgacaacaactttgttccaaaagttgctgattttgggcttgccaagctgttcccaaaagatgacaatttcgtgccactgagcgctatgcggggaacgattggctatatagctccagagatggtatctcgaagctttggtgttatctctagcaaatccgatgtgtacagctttgggatgctactattggagatgacgggcgggcgaaggaacgcagatcctcatgcaggaagctccagtcaagcatactacccatccttggtgtacagccagctgagccaaggagatgcgaacgagatcagtgaaggtgttgatatgcacgagttagagaagaagctatgtatcattgggctttggtgcatacagatgaagccgcaagatcggccgacgatgagcgaggtcatagagatgtttgaagctggtgtcgatggcatccaaatgcctccaaggccattcttttgtgatgacgagggtgatagttcttactctgcaatctctaaactggatacaatagaagagtagtagttgtagtaaaatacacttgtgtctatgtgatcttaatgtattagactactaataatgcaaggttgtcgtaagctaaggtactggttgtatacttttattgagagtgtggtaatgtgttttgatataaaatacctccatgaacctttttttacaaagaactcaagaacattgtttgcctacaagcacaagatcagagtcctagccgttgtatcttccaaagggctgcacttc

SEQ ID NO: 213751 - DNA, 3942 bp, Zea Mays
cggagcacatcggtttgggtgcacgatcgacgcgcattgtgcggtcggccgccttcgcgttgccggccgctgctgccccaacctccactccccatctcgcagtccgccactgcttcgtcttctcgtccgatccccttcgagccccgcctccacacgaacaccccttcggccgttgttgaccaacctcacgcgtcctcctccggtacgtggccaccagttacaatatgctcaactgttgcgagtggaagcaacccgactgttgctgatcaaactgagggcgtcagccattatgttgcttcaaagggtttcatggtttgcgtacgcacaggttgaagtactttgcttgccgctcgcagaggccacccatctcttggtggatttcaatgtgggcactcaagggaaatagaaagaaggattttggaccagtttcatttttttgaactaaagctcaacgtccaagactttaaagagaagtaatgatcttgttcaaaaatgaacagagaatgtattgccctttttttgggggagttaggtgggctaaattctccctttcttcttcctgcattcctcaaaggcgacgtgaagttgtgagatctgggtctccttatgaattgagctggctaaccgtactttaccatttggttaagtccatcattgccaggtgagctgagctacgtactgccggcatgcacgcagccattgtgcaccgaccagtaacagtaaccatatgggctatggcatgcagcacacattcacccctctagctagcattaacatgggggacagaagcacagacgaactttagcccagagttggttggttgccactccgcttcaggggaaaaaaaaaattaagagtcagttgagacagataatcgcttctggcaaaagtactggcggcacaaacagtactgtacatggattagctgctaatcatgcagattcaggcacaggcatcgaggcagggaggcccccacctgccggcaaatctacatgggggtccgtgtgggaacgtgacgtaaaccgtcaaagggaaaaaggtgcggggaatcgagtaccaaccttgggcccctcaccctttccaacgggggagctgactaggcattgctctggtggcccacaaagcagccaatggccttccgatcctacagtcctgctgcggctacaccagctcgctttggctgccaaagacaagaagagaagattgggatatttctattctattcaccgatataaagctactgacgcaggacacagcaaaagcaaaagccaaagtttgagagagagagagagaggggtaatatagcttcatgtgaaagatgacaagaatcccagcataaaataatctcccaaactttgctataaagccacaacccctccccctcctcctttccctccctctctctccttcctcatgcgcgcgcctgccattagcccaggctgtgtacattatttgtagctgaccattcattcatatagagctagttgagcaggcctggttggctgtccataatttttgcttcggatagcattgctgccaggcgactgcaaagctccaagcagacttttgctgtgaggatttttttgcgaggaagggcagagggagcaatggcgccagtcagtttgcctcctggtttcaggttccaccccactgacgaggaactcatcatctgctaccttaagaggaagatcaacgggagacagatagagctcgaaatcattccagaggttgatctttacaagtgtgagccctgggatctgccagaaaaatcatttcttccgagcaaagaccttgaatggtacttcttcagccctcgggaccgcaagtacccaaatggatcgaggacaaaccgcgcaacaaaatctgggtactggaaggcaactgggaaggacagaaaagtgaactcgcataggcgtgcagttggtatgaagaagaccctggtgtactatcggggccgagctccacatggttctcgcactgattgggtcatgcatgagtaccgcctcgacgagagggaatgcgagactgacactggcttacaggacgcatatgctttgtgccgagtgtttaagaagacagcgcctgggccaaaaatcatagagcattatggcgcagtgcaccaccccatcgagcaaactcagtggatgggaagcagcgttgagcgctccccaacgctggacttgtccagtgatgttagaggtgatgacttcgacagcagcagtttctcgttcccgacagaggcgccaatggactcctccatgcatggtgggttgttcgggatgcagatgagtgcacctcacgaggatgccaaatggatgcagtttctgagcgaagacgcctttaacgcaaccaatcctttcttcacgaatccagcttcttccagcttctcatgcctcccatccaaggtggatgttgcactggaatgtgcaaggcttcagcacaggctctcattacctcccctggaagtggaagacttcccacacgacgtcagcctcgacacaaaggcgagcgtgctccgcagcagcaaccccaacaacgaggttgacatccttcaagagttcctctccgtggcgtcggcctcccaggagctaatcaacggaaccagcagcagctacgctgcagaaatgtgggcaggcgctggcacgagcagcaccagcgacacccactacgtcaacgaactatcttccctctttgagtttggggtgaaggctaaagaggaggccgacaatttctaccacatggactgcattggcacatcttcaggcttctcaccgaagccggtccgtgtcgatgaaccggttaggttggttgagatcgctgacatggaggagttcaaggaagagaagaggcgagtagagaaccttagaggagtgaggctgcacaacaatgacgacctaggagagattccaacagactgctgcatcacacaataccccatatcggacactgctgacatttcagattgcaggagaagccggtcacctgaccaatcccactagcgccggcggcctagacactgcacccatcttctcgcaatctcaacctgacgacttcgctattgggttcagtgacgacgccgaccccaatgcatctttcgacctatgcgagagggttgacgtcaagcatgggctcttcgtctcaacggtgggtgcgcccaagacgttcttccaccacgttgagccatcgaagaaggtcagcttccacctgaataataatcccgtagcaagcgacgacgacgtcagcaaggcgacgaccgggaagtcccgttcacccattattagtgtgatgacaaccaaagatagtggcagcagcttttctgtttttagcaagttgaaggcgctcatcagggacaaattcctggtgaagaagctgccttcatcgtgccagaggtccttgttaggcagcaaagaaacagcggcagtgagcgagctgctgcagatggtggtgtcgtcgctcctcttaacaccaacggaggtgacaggccccactaccgagcaagaaaagttggccaggaaggcgatgaagccgggaccccgtcgttgtgatggaagccatgcgtggcttcttccactccccaaaaggagcaaaggcatttccagcatgttttttagtgggaaatgggcatttctgacatccgcattggccatccgcgctccaggtccagggtgcaatcactgaaagaaaggtcttccttctggtcatagctcgtgtaaaaattaaagtacggctctttataatgctactgcttaggaaactcgtatcgggtgccagtgcacgggacgcatagtctttcgtgcatcagacagttaacagcgggtgtataacgggagaaatgtcataattcgtatttattttttttattcgtccttatattaacacgtctgaagtctagccccctgctgtacatcgaaacacagttcataaattgaaattttaatttat

SEQ ID NO: 213752 - DNA, 4013 bp, Zea Mays
gggtgggttcggcgccgagtcggagcacatcggtttgggtgcacgatcgacgcgcattgtgcggtcggccgccttcgcgttgccggccgctgctgccccaacctccactccccatctcgcagtccgccactgcttcgtcttctcgtccgatccccttcgagccccgcctccacacgaacaccccttcggccgttgttgaccaacctcacgcgtcctcctccggtacgtggccaccagttacaatatgctcaactgttgcgagtggaagcaacccgactgttgctgatcaaactgagggcgtcagccattatgttgcttcaaagggtttcatggtttgcgtacgcacaggttgaagtactttgcttgccgctcgcagaggccacccatctcttggtggatttcaatgtgggcactcaagtccgaactccggaaaaattttcagggaaatagaaagaaggattttggaccagtttcatttttttgaactaaagctcaacgtccaagactttaaagagaagtaatgatcttgttcaaaaatgaacagagaatgtattgccctttttttgggggagttagatgcatgagctgatcttctgggtccaggtgggctaaattctccctttcttcttcctgcattcctcaaaggcgacgtgaagttgtgagatctgggtctccttatgaattgagctggctaaccgtactttaccatttggttaagtccatcattgccaggtgagctgagctacgtactgccggcatgcacgcagccattgtgcaccgaccagtaacagtaaccatatgggctatggcatgcagcacacattcacccctctagctagcattaacatgggggacagaagcacagacgaactttagcccagagttggttggttgccactccgcttcaggggaaaaaaaaaattaagagtcagttgagacagataatcgcttctggcaaaagtactggcggcacaaacagtactgtacatggattagctgctaatcatgcagattcaggcacaggcatcgaggcagggaggcccccacctgccggcaaatctacatgggggtccgtgtgggaacgtgacgtaaaccgtcaaagggaaaaaggtgcggggaatcgagtaccaaccttgggcccctcaccctttccaacgggggagctgactaggcattgctctggtggcccacaaagcagccaatggccttccgatcctacagtcctgctgcggctacaccagctcgctttggctgccaaagacaagaagagaagattgggatatttctattctattcaccgatataaagctactgacgcaggacacagcaaaagcaaaagccaaagtttgagagagagagagagaggggtaatatagcttcatgtgaaagatgacaagaatcccagcataaaataatctcccaaactttgctataaagccacaacccctccccctcctcctttccctccctctctctccttcctcatgcgcgcgcctgccattagcccaggctgtgtacattatttgtagctgaccattcattcatatagagctagttgagcaggcctggttggctgtccataatttttgcttcggatagcattgctgccaggcgactgcaaagctccaagcagacttttgctgtgaggatttttttgcgaggaagggcagagggagcaatggcgccagtcagtttgcctcctggtttcaggttccaccccactgacgaggaactcatcatctgctaccttaagaggaagatcaacgggagacagatagagctcgaaatcattccagaggttgatctttacaagtgtgagccctgggatctgccagaaaaatcatttcttccgagcaaagaccttgaatggtacttcttcagccctcgggaccgcaagtacccaaatggatcgaggacaaaccgcgcaacaaaatctgggtactggaaggcaactgggaaggacagaaaagtgaactcgcataggcgtgcagttggtatgaagaagaccctggtgtactatcggggccgagctccacatggttctcgcactgattgggtcatgcatgagtaccgcctcgacgagagggaatgcgagactgacactggcttacaggacgcatatgctttgtgccgagtgtttaagaagacagcgcctgggccaaaaatcatagagcattatggcgcagtgcaccaccccatcgagcaaactcagtggatgggaagcagcgttgagcgctccccaacgctggacttgtccagtgatgttagaggtgatgacttcgacagcagcagtttctcgttcccgacagaggcgccaatggactcctccatgcatggtgggttgttcgggatgcagatgagtgcacctcacgaggatgccaaatggatgcagtttctgagcgaagacgcctttaacgcaaccaatcctttcttcacgaatccagcttcttccagcttctcatgcctcccatccaaggtggatgttgcactggaatgtgcaaggcttcagcacaggctctcattacctcccctggaagtggaagacttcccacacgacgtcagcctcgacacaaaggcgagcgtgctccgcagcagcaaccccaacaacgaggttgacatccttcaagagttcctctccgtggcgtcggcctcccaggagctaatcaacggaaccagcagcagctacgctgcagaaatgtgggcaggcgctggcacgagcagcaccagcgacacccactacgtcaacgaactatcttccctctttgagtttggggtgaaggctaaagaggaggccgacaatttctaccacatggactgcattggcacatcttcaggcttctcaccgaagccggtccgtgtcgatgaaccggttaggttggttgagatcgctgacatggaggagttcaaggaagagaagaggcgagtagagaaccttagaggagtgaggctgcacaacaatgacgacctaggagagattccaacagactgctgcatcacacaataccccatatcggacactgctgacatttcagattgcaggagaagccggtcacctgaccaatcccactagcgccggcggcctagacactgcacccatcttctcgcaatctcaacctgacgacttcgctattgggttcagtgacgacgccgaccccaatgcatctttcgacctatgcgagagggttgacgtcaagcatgggctcttcgtctcaacggtgggtgcgcccaagacgttcttccaccacgttgagccatcgaagaaggtcagcttccacctgaataataatcccgtagcaagcgacgacgacgtcagcaaggcgacgaccgggaagtcccgttcacccattattagtgtgatgacaaccaaagatagtggcagcagcttttctgtttttagcaagttgaaggcgctcatcagggacaaattcctggtgaagaagctgccttcatcgtgccagaggtccttgttaggcagcaaagaaacagcggcagtgagcgagctgctgcagatggtggtgtcgtcgctcctcttaacaccaacggaggtgacaggccccactaccgagcaagaaaagttggccaggaaggcgatgaagccgggaccccgtcgttgtgatggaagccatgcgtggcttcttccactccccaaaaggagcaaaggcatttccagcatgttttttagtgggaaatgggcatttctgacatccgcattggccatccgcgctccaggtccagggtgcaatcactgaaagaaaggtcttccttctggtcatagctcgtgtaaaaattaaagtacggctctttataatgctactgcttaggaaactcgtatcgggtgccagtgcacgggacgcatagtctttcgtgcatcagacagttaacagcgggtgtataacgggagaaatgtcataattcgtatttattttttttattcgtccttatattaacacgtctgaagtctagccccctgctgtacatcgaaacacagttcataaattgaaattttaatttat

SEQ ID NO: 213753 - DNA, 958 bp, Zea Mays
ggtgggttcggcgccgagtcggagcacatcggtttgggtgcacgatcgacgcgcattgtgcggtcggccgccttcgcgttgccggccgctgctgccccaacctccactccccatctcgcagtccgccactgcttcgtcttctcgtccgatccccttcgagccccgcctccacacgaacaccccttcggccgttgttgaccaacctcacgcgtcctcctccggtacgtggccaccagttacaatatgctcaactgttgcgagtggaagcaacccgactgttgctgatcaaactgagggcgtcagccattatgttgcttcaaagggtttcatggtttgcgtacgcacaggttcgttgaggctgagaagacaaaccaatacctgcaacagccattcttggcaagtttctgcctcgaagagcctgagttgctcctaatgcctcatccgcaacatgccatatgctgttatcaccatctgcttcattattttcttcaacccattcattttctcatgtaaactcttcaagcaccggtgggttgcttctttttcccttggatcctagctttcttaatgtttgaaacctattttccatctttctgttgtaactgacatagaccaatttattaagcctatggtgttctagtcggttcctcttttttttgtatggacctgaaaatgcacaattgcacaatgcatacaacagattcaacaagctgtaatgaacaggaccagtgctatcagcatttgaggtcacaggaggaacaaaagcacttccacttgcactgccgaccacattggactcagggaatatgacctcaacattattagcatgtccacagccaccatcaaactctgaacagacaacagagacagagatgcagatactactatgcaatctacatacatcctgtgaactacaacattccagtggtaagataggaaagggagagaaggaggggat

SEQ ID NO: 213754 - DNA, 1825 bp, Zea Mays
gttattttcctgaagagtacatagctgcccttaaagtatccatgtacagaagatgctctctgcgccctatagtactcctggttcccttaatgcaggatgcctaataaaccactttcagcattgactctacaagatcgaaatgcagaggttcaaatacaggtccacaggaaatgggagtttcgaggtgccgttgacaatggccctatattacacatcgacatgatcctgacagactgcacaggcaatgctatccattgtcagattccttcgttcctagcagctacaagaggcgatgaatttcaagttggcaaaatatacaagatgacccgcttttcagtagcccgtgcaaaatccacctacaagcctgttgatggtgatctcatgttgtatgtcaaaccatacacaacccttgaactttgccacacttcaccatcaggttttcccctttatgtttatcatctaacaagctatgacaagattgatccagatggatcaaatgcaagaaacttccatgacgtccttggtattattacggaaatctctgcgattaagcctgtcggaaatgcacacataccctcatcttacaatcgacatgttctgataaaaaacctcaggggaagtactgttaagtggtggcgcagcctgtcattggtacttcaacccatcaattgaagaagctgaagctttttatagcaggattgaatctgaaaagataaacatagaattgcccagtcttgacaaacaagaaattacacctccaagttttccacaacgagaacatcacaaccttaaatacatactgtctttaaacccacatgatgtaccggatcaaggatatgaatgcacggtaaccattacatgtattcctgaaggcaagacttggtattatattgcttgcaacacttgcccaaacaaaccaagcattgatcccgtcatccgtcaatgctccacatgtagatcaacaaattactgcttcagatacaagctcactttcaaggcatcagatggaactgaagaagctgaaatgtttgcattcgacaatgttgctaggacaattattgggaaaccatgtccaacagttgttgcatcctttcctgatgcatcagctatcccacctgaaattgcagcaatagtttcacggaaatacacattcattatagaattcaacagccagtcattcagatttctagaaaaaacattgctcatcaaaggaattgtagcatcatatggaagaatgacatcactaccaatagtacaagaaaaagatgatgtgcaacttcctctcactccaacaaaaaacaaactgataacaacagctgccgaatctccttctacacccatgtctagactttccacagcagactcaccaagcatgccccaaaagctgacatattctccagcaaagaataagccttagacaaacctccccgatgctaacagaagcagagctcctacaactacaattgagtcgccaacaaaaagaatcaaacaaaatcccaagaatcaacaagagtagacgttgtctacaacacaacacagcgaggaatattttggatcgtcggagccaaaattcagatgaaaaaaacatgttcgtcgctattttgtctctatatataattagagtcacagcttccatgaagcagatcttattttggacatgctacatgatatctatgtactactatgtcatgtacctttctgtatacttatctggtgctataacgaaccgtcatgtttcatatatagaatcgtttgctttggcttgctgaaaacgtataacatcaaaaacaagatgaacgcgcgcgctggcgcgcgccagttgact

SEQ ID NO: 213755 - DNA, 3295 bp, Zea Mays
ctgcctcctgcctgcatcccgccggtggacgcaccccgccccgcatcccgcgaccttcttcctctgctgcctccacgggagccttctcacctccacacgttgttgcgtcagatccgtctgccgctagagaaaaccctacccaatgaccacatgcattcttactggggcgacgccactattggcgcagaggagccgatatggcgcatcgcatgtactccgtcgctgccctcctcgactccgcctctttctccaacgccacaggcaaggagatgcctgcccaccgccccggcaccccccgccctcgccgcgcacacccccaagccccgcggatcacagtcgcctctaccctagcgggagccgcgcccgcacccacattacccgcacgatggcaagaggcagcggcacaaggccacggcgactcctcgagcagaggaacctgaccgagcgcagcaacgcaaatcttcaatctcaaatccctgctgcgagaaaagagagctcccacaagtggtatggctcgatagaggttatttggatctgtgatgcgatagaaattcatgggtttttaggatctgttgtgtatatgcatggtttaaagataggggtgacgagtagccgcgggtggctgagcatttgctgtcttgcatcagggctgaaggcagctgcagggattacgtggctataaagatggatggctcgagtattctgcgacttctttagagtaaagtgctttcggcaaggagaactgcagtgggtttgctcatggaactggtctgcttaagaaggagagaaatggttgaattgctcctgcatggatcgagagcagagtcggtcgtggaggcaatggatgtgctgttggagtacctccggagcttgctcgcagaagaacaagccccaatcgccgttctactgatgtgtttggatgcattggtggagccaaacagaaacagcacgtacagagaagaggcgatcaagaccatcgcacgttctctgagatgctgcctgccagaggacactgccgtgcccagcactcggagagctctgctgctgcttctcaggcgaccttcacgcagaggactggatgctggaacatgccggcttcgtcgaccattcacgggccaccactgccacttctgatgctgttgtacacgacaaggaagcggccgaaaacgatgcgtggctgagacacgtggccgcggcgctactcggcagccgtagcaggatcaggagaccgttcctggaggcgctgtccacgtgcctgggctcccccgacgccgacctggtgggggcgtgcctgacgatggcctggtggaggttatcagtgagaaagtagatatctggataaaccacctcttcagctatgattttgcactctggttttatgcaaatgttgcctatcatattattgaattgcaattattttttttgtactggttaaatactaatagtgccatgagttaacgttagtgtttgtgattttttacaggctattgggtgtctcttgtatagaatctgcactgaatattaactgttggttatgattatggaaggtcttgttttcagctcatgaatataggtttcaaattttagttgtttttttattaggatggtcgaatataaaagtaactgattttattgtatgtacctgattaatctaaaagcattgaaataattctgctcttggctcgagtatgtatctgaagtatacagagaaatggaacgtgctggatgcgctccagatagaaaggctagagaaatgtttcatataaaaaaatttactaccgtcgcaacgcacaagcacatacctagatgagtctgtctgttactgtgaaaagctacatacaaattataattgagggcacattttcattactaatagtttttttgttttccttctttttttacctgaggttacaaagggtgcagggtattctccacgtcagtgtgtccaataatcctaaacaaggcaatatgtatttgctctttattatcaattcatgtgaaaatctgaaagaacgtggaacctaaaactattgtctggtgggctggtggctgattttcattcaattgggctggtacacctctgttttgactcccatacaccaagaatcgagggcgcctgcatccgtgggagtaagactctccggctttgaaggaggagacaaaggccgaagggcagacacattgccttctgttcatgctgcttgatgttgaaacaccaaccactcaccagtcatttactctctcacttgctcattggatcatgtgcaccaccatagttagaaacctttatgtcatagttagagcaatgcattgggattttttttgctatgcacagaatacttgtatttggatctggcataattacaatcatcctgtcatcatcagtttcactcctctggctgctccttgtgtgtgtgtccactaatgcgttcagcattgcaactgctgctgccaaatgctgagcattcgttgccaacatagatggtcactctgataaatcaaattgtatgctgtcatttccttgaattatactagaataaaatcagaagctcacaatgagatttattggtctaaagtgaatcagaagttagttcacataaaaaactatgaccatgcagttacatgtgttgcatagctccagaaggtggtagcacaaatcccataggcccagtaacccatccataaaagttttttgattgattgcttgattccctattctcacttgtaggttttgagaccgaacctatatgtaccaccaaaacaatatcctaattgcaaggaaggtgaccttcctctcatcatcgcgattgactagcaaccaatggccctgataggtgttatgcaagtgtagggcgacatcactaatgctcggacaacggatgtggtgagacggacgcaaaagaagtataggtttttgttgctgcagttagctggctgtgactaattagtatggatttggtgtcatgttattaggcatttcgatggatgcaaagcagacttggttgtttgcgatggaggcttcggatagtaagatatcatatgagtgcaagagaactactcccaccattaactataacaaattttgtcaccagtgaggattacatgattactgctcttttgggtgactatagttactggccaccctgatatttgatacaattgatctttttttatctcatgctaaagaaatttggtggctggtggatctgcttaagaatcaaaagtcagacaaggtggacatcaccatccaaccggaggagcaggaagccatgaatgatgttctagcagccagggc

SEQ ID NO: 213756 - DNA, 3139 bp, Zea Mays
ctgcctcctgcctgcatcccgccggtggacgcaccccgccccgcatcccgcgaccttcttcctctgctgcctccacgggagccttctcacctccacacgttgttgcgtcagatccgtctgccgctagagaaaaccctacccaatgaccacatgcattcttactggggcgacgccactattggcgcagaggagccgatatggcgcatcgcatgtactccgtcgctgccctcctcgactccgcctctttctccaacgccacaggcaaggagatgcctgcccaccgccccggcaccccccgccctcgccgcgcacacccccaagccccgcggatcacagtcgcctctaccctagcgggagccgcgcccgcacccacattacccgcacgatggcaagaggcagcggcacaaggccacggcgactcctcgagcagaggaacctgaccgagcgcagcaacgcaaatcttcaatctcaaatccctgctgcgagaaaagagagctcccacaagtggtatggctcgatagaggttatttggatctgtgatgcgatagaaattcatgggtttttaggatctgttgtgtatatgcatggtttaaagataggggtgacgagtagccgcgggtggctgagcatttgctgtcttgcatcagggctgaaggcagctgcagggattacgtggctataaagatggatggctcgagtattctgcgacttctttagagtaaagtgctttcggcaaggagaactgcagtgggtttgctcatggaactggtctgcttaagaaggagagaaatggttgaattgctcctgcatggatcgagagcagagtcggtcgtggaggcaatggatgtgctgttggagtacctccggagcttgctcgcagaagaacaagccccaatcgccgttctactgatgtgtttggatgcattggtggagccaaacagaaacagcacgtacagagaagaggcgatcaagaccatcgcacgttctctgagatgctgcctgccagaggacactgccgtgcccagcactcggagagctctgctgctgcttctcaggcgaccttcacgcagaggactggatgctggaacatgccggcttcgtcgaccattcacgggccaccactgccacttctgatgctgttgtacacgacaaggaagcggccgaaaacgatgcgtggctgagacacgtggccgcggcgctactcggcagccgtagcaggatcaggagaccgttcctggaggcgctgtccacgtgcctgggctcccccgacgccgacctggtgggggcgtgcctgacgatggcctggtggaggttatcagtgagaaagtagatatctggataaaccacctcttcagctatgattttgcactctggttttatgcaaatgttgcctatcatattattgaattgcaattattttttttgtactggttaaatactaatagtgccatgagttaacgttagtgtttgtgattttttacaggctattgggtgtctcttgtatagaatctgcactgaatattaactgttggttatgattatggaaggtcttgttttcagctcatgaatataggtttcaaattttagttgtttttttattaggatggtcgaatataaaagtaactgattttattgtatgtacctgattaatctaaaagcattgaaataattctgctcttggctcgagtatgtatctgaagtatacagagaaatggaacgtgctggatgcgctccagatagaaaggctagagaaatgtttcatataaaaaaatttactaccgtcgcaacgcacaagcacatacctagatgagtctgtctgttactgtgaaaagctacatacaaattataattgagggcacattttcattactaatagtttttttgttttccttctttttttacctgaggttacaaagggtgcagggtattctccacgtcagtgtgtccaataatcctaaacaaggcaatatgtatttgctctttattatcaattcatgtgaaaatctgaaagaacgtggaacctaaaactattgtctggtgggctggtggctgattttcattcaattgggctggtacacctctgttttgactcccatacaccaagaatcgagggcgcctgcatccgtgggagtaagactctccggctttgaaggaggagacaaaggccgaagggcagacacattgccttctgttcatgctgcttgatgttgaaacaccaaccactcaccagtcatttactctctcacttgctcattggatcatgtgcaccaccatagttagaaacctttatgtcatagttagagcaatgcattgggattttttttgctatgcacagaatacttgtatttggatctggcataattacaatcatcctgtcatcatcagtttcactcctctggctgctccttgtgtgtgtgtccactaatgcgttcagcattgcaactgctgctgccaaatgctgagcattcgttgccaacatagatggtcactctgataaatcaaattgtatgctgtcatttccttgaattatactagaataaaatcagaagctcacaatgagatttattggtctaaagtgaatcagaagttagttcacataaaaaactatgaccatgcagttacatgtgttgcatagctccagaaggtggtagcacaaatcccataggcccagtaacccatccataaaagttttttgattgattgcttgattccctattctcacttgtaggttttgagaccgaacctatatgtaccaccaaaacaatatcctaattgcaaggaaggtgaccttcctctcatcatcgcgattgactagcaaccaatggccctgataggtgttatgcaagtgtagggcgacatcactaatgctcggacaacggatgtggcatttcgatggatgcaaagcagacttggttgtttgcgatggaggcttcggatagtaagatatcatatgagtgcaagagaactactcccaccattaactataacaaattttgtcaccaaaatttggtggctggtggatctgcttaagaatcaaaagtcagacaaggtggacatcaccatccaaccggaggagcaggaagccatgaatgatgttctagcagccagaacggtctttcttgtacgtgtatttctactt

SEQ ID NO: 213757 - DNA, 1808 bp, Zea Mays
ctgcctcctgcctgcatcccgccggtggacgcaccccgccccgcatcccgcgaccttcttcctctgctgcctccacgggagccttctcacctccacacgttgttgcgtcagatccgtctgccgctagagaaaaccctacccaatgaccacatgcattcttactggggcgacgccactattggcgcagaggagccgatatggcgcatcgcatgtactccgtcgctgccctcctcgactccgcctctttctccaacgccacaggcaaggagatgcctgcccaccgccccggcaccccccgccctcgccgcgcacacccccaagccccgcggatcacagtcgcctctaccctagcgggagccgcgcccgcacccacattacccgcacgatggcaagaggcagcggcacaaggccacggcgactcctcgagcagaggaacctgaccgagcgcagcaacgcaaatcttcaatctcaaatccctgctgcgagaaaagagagctcccacaagtggtatggctcgatagaggttatttggatctgtgatgcgatagaaattcatgggtttttaggatctgttgtgtatatgcatggtttaaagataggggtgacgagtagccgcgggtggctgagcatttgctgtcttgcatcagggctgaaggcagctgcagggattacgtggctataaagatggatggctcgagtattctgcgacttctttagagtaaagtgctttcggcaaggagaactgcagtgggtttgctcatggaactggtctgcttaagaaggagagaaatggttgaattgctcctgcatggatcgagagcagagtcggtcgtggaggcaatggatgtgctgttggagtacctccggagcttgctcgcagaagaacaagccccaatcgccgttctactgatgtgtttggatgcattggtggagccaaacagaaacagcacgtacagagaagaggcgatcaagaccatcgcacgttctctgagatgctgcctgccagaggacactgccgtgcccagcactcggagagctctgctgctgcttctcaggcgaccttcacgcagaggactggatgctggaacatgccggcttcgtcgaccattcacgggccaccactgccacttctgatgctgttgtacacgacaaggaagcggccgaaaacgatgcgtggctgagacacgtggccgcggcgctactcggcagccgtagcaggatcaggagaccgttcctggaggcgctgtccacgtgcctgggctcccccgacgccgacctggtgggggcgtgcctgacgatggcctggtggaggttatcagtgagaaagttacaaagggtgcagggtattctccacgtcagtgtgtccaataatcctaaacaaggcaatatgtatttgctctttattatcaattcatgtgaaaatctgaaagaacgtggaacctaaaactattgtctggtgggctggtggctgattttcattcaattgggctggtacacctctgttttgactcccatacaccaagaatcgagggcgcctgcatccgtgggagtaagactctccggctttgaaggaggagacaaaggccgaagggcagacacattgccttctgttcatgctgcttgatgttgaaacaccaaccactcaccagtcatttactctctcacttgctcattggatcatgtgcaccaccatagttagaaacctttatgtcatagttagagcaatgcattgggattttttttgctatgcacagaatacttgtatttggatctggcataattacaatcatcctgtcatcatcagtttc

SEQ ID NO: 213758 - DNA, 1780 bp, Zea Mays
cgcaaatcttcaatctcaaatccctgctgcgagaaaagggctgaaggcagctgcagggattacgtggctataaagatggatggctcgagtattctgcgacttctttagagtaaagtgctttcggcaaggagaactgcagtgggtttgctcatggaactggtctgcttaagaaggagagaaatggttgaattgctcctgcatggatcgagagcagagtcggtcgtggaggcaatggatgtgctgttggagtacctccggagcttgctcgcagaagaacaagccccaatcgccgttctactgatgtgtttggatgcattggtggagccaaacagaaacagcacgtacagagaagaggcgatcaagaccatcgcacgttctctgagatgctgcctgccagaggacactgccgtgcccagcactcggagagctctgctgctgcttctcaggcgaccttcacgcagaggactggatgctggaacatgccggcttcgtcgaccattcacgggccaccactgccacttctgatgctgttgtacacgacaaggaagcggccgaaaacgatgcgtggctgagacacgtggccgcggcgctactcggcagccgtagcaggatcaggagaccgttcctggaggcgctgtccacgtgcctgggctcccccgacgccgacctggtgggggcgtgcctgacgatggcctggtggaggttatcagtgagaaagtagatatctggataaaccacctcttcagctatgattttgcactctggttttatgcaaatgttgcctatcatattattgaattgcaattattttttttgtactggttaaatactaatagtgccatgagttaacgttagtgtttgtgattttttacaggctattgggtgtctcttgtatagaatctgcactgaatattaactgttggttatgattatggaaggtcttgttttcagctcatgaatataggtttcaaattttagttgtttttttattaggatggtcgaatataaaagtaactgattttattgtatgtacctgattaatctaaaagcattgaaataattctgctcttggctcgagtatgtatctgaagtatacagagaaatggaacgtgctggatgcgctccagatagaaaggctagagaaatgtttcatataaaaaaatttactaccgtcgcaacgcacaagcacatacctagatgagtctgtctgttactgtgaaaagctacatacaaattataattgagggcacattttcattactaatagtttttttgttttccttctttttttacctgaggttacaaagggtgcagggtattctccacgtcagtgtgtccaataatcctaaacaaggcaatatgtatttgctctttattatcaattcatgtgaaaatctgaaagaacgtggaacctaaaactattgtctggtgggctggtggctgattttcattcaattgggctggtacacctctgttttgactcccatacaccaagaatcgagggcgcctgcatccgtgggagtaagactctccggctttgaaggaggagacaaaggccgaagggcagacacattgccttctgttcatgctgcttgatgttgaaacaccaaccactcaccagtcatttactctctcacttgctcattggatcatgtgcaccaccatagttagaaacctttatgtcatagttagagcaatgcattgggattttttttgctatgcacagaatacttgtatttggatctggcataattacaatcatcctgtcatcatcagtttc

SEQ ID NO: 213759 - DNA, 3197 bp, Zea Mays
atggctcgtgctagttatctccttcccctcttcctgatactgatacaccacctccgctcatcactagcttcatccacttggtatggtaacctcacagctccttggtgccatccagaccatgctgcagcactcctccagctcaagcgatcctttctcttcgactactccaccaccacccttgcttcatgggaagcaggcacggactgctgcctctgggagggtgttggatgcgacagtgtctccggccatgtcactgttcttgacctcggtggccgtggcttgtacagctacagtcttgacggcgcgctcttcaacctcacctcactccagcgactcgacctgagcaagaatgacttcggtggatcccctattccggcggctggctttgagaggctttcgctataaccttttggtcctacaagaaccaagtttcgagacactattgtcaaacctcacaaatctgagagagctctaccttgatggcgtggacataagtagtagtggcagagaagattggggcagaactcttggaaaatacgttcctcatcttcaggttcttagcatggaggaatgcaggcttgttggtcctatccatcgacattttctacgtctccgctctatcgaagtgattaatctaaaaatgaatggaatttccggcgtggttccagaattctttgcagattttctcaatttaagagttcttcaactcagctttaataacttgagaggcacctttccaccgaaaatctttcaactgaagaatctggcagtattggatgtgtcaaataacgatcaactctcggggcttattccaaaatttctccatgggagctcgctggaaactttgaatctacaggatacacatttctctgggccaattccacagttaattggcaaccttacgacattggaatatttgacaatctctgattgtgcttttactggtcaattactctcttcagttggcaatctagaaaacttaagattcctgcaaatatcctataaccatcaaggtttatctggccctataacaccgacaattggacatctcaacaagttgacagtattaatacttcgaggttgcagcttctctgggagaataccaaatacaatcgccaacatgactaaactgatttttgtggacctttcacagaatgacctcgtcgggggcgtaccgacatttctattcactttaccatcattattacaattggatctttcatcgaatcaactctctggacctatacaagagttccatacactatcttcgtgcatcgaagttgttactttaaatgataataaaatcagcggaaatattccttcagcactcttccacctcataaatttggttattttggatcttagctcaaataacataacaggttttgtagaccttgatgatttttggaaactacggaagctcgctcaaatgagtttatccaacaacaagctgtatatcaaggagggaaaaagaagtaactccacattccggttattaccaaagctcactgaattagatctgaaatcatgtggcttaactgaaattcctagtttcttggtacaccttgatcatatcactatattggacctttcttgcaacaagatacttgggactattccaaattggatatggcacacatgggaccatagccttaggaatttgaatctttcaaacaacgcattcacaaatttgcagctcacttcatatattctccctaatagtcatttggaatttcttgatttgagttccaacagaatccagggtcaaatcccgattccgaacatgttgacaatggaaagcaattatgaacaagtcttggattattcaaataacagtttcacatctgttatgttaaacttcactttgtatcttagccaaactgtgtatctcaagctatccgacaataacatagcaggctacataccacccacactttgcaatttaacttatcttaaagtccttgacctggcaaataacgacttcagagggaaggttccatcttgcctgatagaagatggcaacttaaatatattgaatttgagggggaatcgcttcgaaggagagttgacttataaaaattatagtagccaatgtgatctgcggacaatagatataaatggaaataacattcaaggacagctgcctaaagctctttctcaatgcactgatttggaggttcttgacgttggatacaataacattgtagatgttttcccatcttggcttggcaacctttccaatcttcgtgtccttgtattaaggtccaatcaattctatggcacactagatgaccctttcacaagtggaaatttccaggggtacttcttggggatacaaataattgatattgccttgaacaatttctctggctatgtgaaaccacaatggttcaagatgtttaaatctatgagggagaagaataataacactggacagatcctgggtcattctgcatccaaccaatattaccaagatactgttgcaataacagttaaggggaattacgtctcaattgataggattttgacagccttaactgcaatggacttatcaaataataaactcaatggtactattccagatttggtcggaaaccttgttatactacatttattgaatatgtcacacaacgccttcacaggaaatattccactccaattaggcaggatgagccagctggaatcactggacctgtcatggaactacctttccggggagataccacaagaactaacaaatctcacatttcttgagaccctagatttgtctaacaacaatttggcagggatgattccacaatcacgccaatttggaacatttgagaacagttcatttgaaggtaacataggcctctgtggagcacccttaagcagacaatgtgccagttcacctcagccaaatgacctgaaacaaaaaatgtcgcaagatcatgtcgatataactctatatatgttcattggattaggatttggacttggatttgctgttgctattcttgtcatgcaggttccacttggcaaattctatagaactataagcattttgcgaaacttatcctaggtcacaagggatcaatatctgcacagttcgcatgtatgtaatactggaaaggagaatgacacttagatggatgtgtcatgtgtgattgtgattattcatctctatattctagcgatacttgtaaagtatgtcatgc

SEQ ID NO: 213760 - DNA, 1222 bp, Zea Mays
ggaacatctatatatctaagctatggaaaattttactgctgatcgcgtggttctagcagcatcaggtgttgatcacgaacacttgctaggctatgcagatttgttgttgaaagattggcacaaggggaccccaatggaaaagccaaagtctacatatgttggtggagattccagacacagagcagattcagatatgacacatgttgcattagcttttgaagtgccagggggctggcttcaagagagagacgctacaattatgactgtcatacagactttaatgggtggtggtggttcattctcatctggcggtcctggaaaaggaatgcattcacggctttatcgacgtgtcctaaataaatatcacttggttgattctttttctgcatttaacaatgtatatgacagcagtggcctctttggtatctacttgaccacaccatcagattttgtggcaaaggctgtcgacatcgcagtaagtgaattaattgctgtcgcaactcctggagaagaggttgaactgcaacgagcaaaaaattcaacgatttcatctgtattaatgaatcttgaatctagggtagttgttgccgaagatattggaaggcagctgttatcttatggttgcaggaagcctattgactacttccttcaatgtatggaagaaattactctagatgatgttgcaacatttgccaggaagatgctagctacgcaacccacaatggctagctggggaaatgttgacaaagttcccccatatgaatttatttgcaagcggctacaatagtacccctacacaatgacctctggactctggtggtcttgaaggatcctttcgtggaaaactaaacaatcacttgtatgaagtgccctagcttagaaactgcttttctttcagacatgcagtttagtgagtttaggatttcaacagctatgttcaattgtaactgttcaagcaacacatagtaaatgagaggctgatgaatggcaaatatcaacagtttctccatggcccattagcattttattgtcatgttcagtgtttttatgtacattttctgcgattatggatagcaggagtattctgttgcccttaatttcatgtataattggcttctggagcattgaatcattgatgcattaataccatgtttggttttgtttggggaacggagtgatccgttcctcattttgatttgtttttggtaatggaacgaagttt

SEQ ID NO: 213761 - DNA, 1234 bp, Zea Mays
tggaacatctatatatctaagctatggaaaattttactgctgatcgcgtggttctagcagcatcaggtgttgatcacgaacacttgctaggctatgcagatttgttgttgaaagattggcacaaggggaccccaatggaaaagccaaagtctacatatgttggtggagattccagacacagagcagattcagatatgacacatgttgcattagcttttgaagtgccagggggctggcttcaagagagagacgctacaattatgactgtcatacagactttaatgggtggtggtggttcattctcatctggcggtcctggaaaaggaatgcattcacggctttatcgacgtgtcctaaataaatatcacttggttgattctttttctgcatttaacaatgtatatgacagcagtggcctctttggtatctacttgaccacatccagccatcagattttgtggcaaaggctgtcgacatcgcagtaagtgaattaattgctgtcgcaactcctggagaagtgacagaggttgaactgcaacgagcaaaaaattcaacgatttcatctgtattaatgaatcttgaatctagggtagttgttgccgaagatattggaaggcagctgttatcttatggttgcaggaagcctattgactacttccttcaatgtatggaagaaattactctagatgatgttgcaacatttgccaggaagatgctagctacgcaacccacaatggctagctggggaaatgttgacaaagttcccccatatgaatttatttgcaagcggctacaatagtacccctacacaatgacctctggactctggtggtcttgaaggatcctttcgtggaaaactaaacaatcacttgtatgaagtgccctagcttagaaactgcttttctttcagacatgcagtttagtgagtttaggatttcaacagctatgttcaattgtaactgttcaagcaacacatagtaaatgagaggctgatgaatggcaaatatcaacagtttctccatggcccattagcattttattgtcatgttcagtgtttttatgtacattttctgcgattatggatagcaggagtattctgttgcccttaatttcatgtataattggcttctggagcattgaatcattgatgcattaataccatgtttggttttgtttggggaacggagtgatccgttcctcattttgatttgtttttggtaatggaacgaagttt

SEQ ID NO: 213762 - DNA, 1214 bp, Zea Mays
catggaacatctatatatctaagctatggaaaattttactgctgatcgcgtggttctagcagcatcaggtgttgatcacgaacacttgctaggctatgcagatttgttgttgaaagattggcacaaggggaccccaatggaaaagccaaagtctacatatgttggtggagattccagacacagagcagattcagatatgacacatgttgcattagcttttgaagtgccagggggctggcttcaagagagagacgctacaattatgactgtcatacagactttaatgggtggtggtggttcattctcatctggcggtcctggaaaaggaatgcattcacggctttatcgacgtgtcctaaataaatatcacttggttgattctttttctgcatttaacaatgtatatgacagcagtggcctctttgccatcagattttgtggcaaaggctgtcgacatcgcagtaagtgaattaattgctgtcgcaactcctggagaagtgacagaggttgaactgcaacgagcaaaaaattcaacgatttcatctgtattaatgaatcttgaatctagggtagttgttgccgaagatattggaaggcagctgttatcttatggttgcaggaagcctattgactacttccttcaatgtatggaagaaattactctagatgatgttgcaacatttgccaggaagatgctagctacgcaacccacaatggctagctggggaaatgttgacaaagttcccccatatgaatttatttgcaagcggctacaatagtacccctacacaatgacctctggactctggtggtcttgaaggatcctttcgtggaaaactaaacaatcacttgtatgaagtgccctagcttagaaactgcttttctttcagacatgcagtttagtgagtttaggatttcaacagctatgttcaattgtaactgttcaagcaacacatagtaaatgagaggctgatgaatggcaaatatcaacagtttctccatggcccattagcattttattgtcatgttcagtgtttttatgtacattttctgcgattatggatagcaggagtattctgttgcccttaatttcatgtataattggcttctggagcattgaatcattgatgcattaataccatgtttggttttgtttggggaacggagtgatccgttcctcattttgatttgtttttggtaatggaacgaagttt

SEQ ID NO: 213763 - DNA, 3697 bp, Zea Mays
cgcaaaccaaagcaagcaaaccccctctgctccgaatcgcgcgcgtcacagcaatagcacgctgcactgcacgctgcggagtctacctgaccacaccttatccggacggcgcgggcgccatggagcggaggctgtcggcgacgtccaggcggtccgcgccgtcggccatccaacggctgtcccacctggcgcagcgcgtcggcgccgtcaacctcgccgagggcttccccgacttccccgcaccgccccacgtcaaggccgccgccgtcgccgccattgccgcggacctcaaccagtacaggcatgtgcaggggatctgcgacatcctcgccaacacgatgaaacgtgaccatgacctcgacgtggacccgctcacggactttgtcatctgctgcggccaatccgaagcattcgccgcggccatctttgcaataatcgaccaaggagacgaagttctcatcttcgaccctgcttatgaaacgtatgagacaagcattgagctagctcgaggcgtccctgtgtatgtgccattggatccaccttcttggactctgaacgaagaaaaatttctgaaatcttttacaagtcggaccaaggcgttggtcttgaacagcccacacaatccaacagggaaggtcttcagcaaagaggagctgcttattatctcccaagcttgtcagaaaatggactgctttgtgataactgatgaggtttatgagtatattacttacgatgcgaacaagcatatctcactggcttctcttccagggatgcaagagaggaccatcatcacatcctcactgtcaaaaacttacagtgtgactggttggagactcggttgggcttgtgcagcagcaagcatcgcctcagctattagaaatatccacataaaattaacagattcagctcctgcaccattccaagaagctgcattgattgcattaacaagcacagcagattactacatatccctgagaaaagactatgaggtgaaaagagacttcatccttctgttgctgaaagacttgggcttcaaaatcagcgtcaagccacaaggttcagtatttgtgtttgctgagctgccaaggtcctgccaactttcagatgtgagttccttcgatgagaaatagaactacatctgagagttcctttagaacacaagaatttcacaggaatgatataggaatttcacagaaattagcacaaaatacaggaaaaacgtaggatttggaaaaatatcctttaatccaaaggaggcctgaagcatttttctctatacagtggaactcagataagaccatttttgttgagcttaaaatgaaactctgaatttgctaatgctggaaacgaaaatcactttgtttctagtgacacaatagcataagtagttagtagcacgagtttgtattatattgatcttatgacttcacactacaagcttacacacattgcttgatcttcacaatcaagctctactatcacacatacacattagcttactatacaccatacactagcttgatcttcacaaccaggctttatcttctctatatctcaaacccacttctacacaggaggattgctgcctcttttacaggactttcaggtcggttgctacaggaaccgacctaatagtgcacagctcaagttctcctacttgctagctaagcaacctctaaaaaccagttttgcttcattttcgccccagcagcctgcttcttgcagtggtaaacttggagttcactaacaagtagctagtactagaaacgtcatagctgctgtcttcatgtagctttctcatccataaaccatataggcctatacatgcttgttcaacactaatatacctcaacaacaacatcaacatagccttttagtcccaagcaagttgggatagactagagttgaaacccaacaaaatgataaaataaatcctaacagctagttggtccttttttcctgcactatgcaattcaggtagaatttgtgacaaagttgatcaacgatgctggtgtggttgccgtgcctggccgtgggttcttccacaagacttgtgacggtgaaagctactgccaccgatatgtcaggtttgcgttctgcaagggcgacgacacacttaaggctgctgccatgaagatgaggaagctggcaagcaggcagggagaaccatggcttactggcagacaataggataagactatgccctcctctaattgatcaaaacccttagatttattcctctttttagtttctggatacaactttgatgccatgtcacacggcccatgaaagtgtaacagctagttgcatccttttcccataaaagtgtaagggcatgtacaacctagaacccacttcacggttctccaagcgcaagacacacctaagacagtttcatacagtgggttgtatcttagattaaatgctttaataaatgcattgtatttacgtgtatgaaagtatgattgatctagtgtgcatatacacttaggtgccgtttggtttccaaaatgtaacgtaaatggtaatggtaacggtttgcattcgattatcagtggtaacaagtttgaataggctggtatcaatttctagtgtggtatccgattacgattggacttaaacaaacatgatttaacgttatttgttaccgattacattacaaatatgtgaaccaaacagcaccttagtccatgcattcacattttcagtttcaggttgtaacacacatgtttcagactgcattcccgtctcattttctgagatacacagttttatgctaaattcacagaaacgtgactgaatcatcacagaacatactacatatgtcacatactgaaaacataactgaatcatcagagaaacatggttgaaccatcaatttcgcacaagcatattcaaaacatccattagcacaaaatgaggccctttgttttcatcctcatagaacttgtgtgctttttctatccacatttgatccaaatacctgctagtgaacaaccttctaggcttcaacgaacagtcattgaacatgtttatccacttatttatcttgtgccaccttcaactaaaataggtagattgaaatggcaatctagggctaaaactgaatttaatctggtactgaaactgtatgcaaacctgaattaagtaaattgaaattgtaatctgggctgaaactgaatgtaatctagggcggtttactaaatgtaatctggtgctgaaactaaatataaacctaaactgggtaaattgaaattgttactctaaaataatcaataaactgaaatgtaaacctaaacctaaatatacattcattcaaactgggtttagggttgatcatcctttagaaattaatcaataaactgttgtacagtctctaaacaacttgtattacctttgaagcaaatcagagaaagaaggtgatgtacgtgatgggggcatgaaagagcagcagaggaccctgggcaccggtgaagcccacctggttgccgacgggggagggaactctggagccaaacggggttgttgttgatgggcgggtcgacgttgacgacggagctaggggcgacaatagccagaggacggggcaacgatgactggccatggcgatctggtgggttgcggtagcggtagaatggatttaggcacgagagtagaagatgcaacagatgcggagaagagagttcgcgtaccacag

SEQ ID NO: 213764 - DNA, 3712 bp, Zea Mays
cgcaaaccaaagcaagcaaaccccctctgctccgaatcgcgcgcgtcacagcaatagcacgctgcactgcacgctgcggagtctacctgaccacaccttatccggacggcgcgggcgccatggagcggaggctgtcggcgacgtccaggcggtccgcgccgtcggccatccaacggctgtcccacctggcgcagcgcgtcggcgccgtcaacctcgccgagggcttccccgacttccccgcaccgccccacgtcaaggccgccgccgtcgccgccattgccgcggacctcaaccagtacaggcatgtgcaggggatctgcgacatcctcgccaacacgatgaaacgtgaccatgacctcgacgtggacccgctcacggactttgtcatctgctgcggccaatccgaagcattcgccgcggccatctttgcaataatcgaccaaggagacgaagttctcatcttcgaccctgcttatgaaacgtatgagacaagcattgagctagctcgaggcgtccctgtgtatgtgccattggatccaccttcttggactctgaacgaagaaaaatttctgaaatcttttacaagtcggaccaaggcgttggtcttgaacagcccacacaatccaacagggaaggtcttcagcaaagaggagctgcttattatctcccaagcttgtcagaaaatggactgctttgtgataactgatgagggatgcaagagaggaccatcatcacatcctcactgtcaaaaacttacagtgtgactggttggagactcggttgggcttgtgcagcagcaagcatcgcctcagctattagaaatatccacataaaattaacagattcagctcctgcaccattccaagaagctgcattgattgcattaacaagcacagcagattactacatatccctgagaaaagtgagccttaattctaaccatgcttctttcagtttgagctgtcttaccttgcaattgtgatgactttggctaggactatgaggtgaaaagagacttcatccttctgttgctgaaagacttgggcttcaaaatcagcgtcaagccacaaggttcagtatttgtgtttgctgagctgccaaggtcctgccaactttcagatgtgagttccttcgatgagaaatagaactacatctgagagttcctttagaacacaagaatttcacaggaatgatataggaatttcacagaaattagcacaaaatacaggaaaaacgtaggatttggaaaaatatcctttaatccaaaggaggcctgaagcatttttctctatacagtggaactcagataagaccatttttgttgagcttaaaatgaaactctgaatttgctaatgctggaaacgaaaatcactttgtttctagtgacacaatagcataagtagttagtagcacgagtttgtattatattgatcttatgacttcacactacaagcttacacacattgcttgatcttcacaatcaagctctactatcacacatacacattagcttactatacaccatacactagcttgatcttcacaaccaggctttatcttctctatatctcaaacccacttctacacaggaggattgctgcctcttttacaggactttcaggtcggttgctacaggaaccgacctaatagtgcacagctcaagttctcctacttgctagctaagcaacctctaaaaaccagttttgcttcattttcgccccagcagcctgcttcttgcagtggtaaacttggagttcactaacaagtagctagtactagaaacgtcatagctgctgtcttcatgtagctttctcatccataaaccatataggcctatacatgcttgttcaacactaatatacctcaacaacaacatcaacatagccttttagtcccaagcaagttgggatagactagagttgaaacccaacaaaatgataaaataaatcctaacagctagttggtccttttttcctgcactatgcaattcaggtagaatttgtgacaaagttgatcaacgatgctggtgtggttgccgtgcctggccgtgggttcttccacaagacttgtgacggtgaaagctactgccaccgatatgtcaggtttgcgttctgcaagggcgacgacacacttaaggctgctgccatgaagatgaggaagctggcaagcaggcagggagaaccatggcttactggcagacaataggataagactatgccctcctctaattgatcaaaacccttagatttattcctctttttagtttctggatacaactttgatgccatgtcacacggcccatgaaagtgtaacagctagttgcatccttttcccataaaagtgtaagggcatgtacaacctagaacccacttcacggttctccaagcgcaagacacacctaagacagtttcatacagtgggttgtatcttagattaaatgctttaataaatgcattgtatttacgtgtatgaaagtatgattgatctagtgtgcatatacacttaggtgccgtttggtttccaaaatgtaacgtaaatggtaatggtaacggtttgcattcgattatcagtggtaacaagtttgaataggctggtatcaatttctagtgtggtatccgattacgattggacttaaacaaacatgatttaacgttatttgttaccgattacattacaaatatgtgaaccaaacagcaccttagtccatgcattcacattttcagtttcaggttgtaacacacatgtttcagactgcattcccgtctcattttctgagatacacagttttatgctaaattcacagaaacgtgactgaatcatcacagaacatactacatatgtcacatactgaaaacataactgaatcatcagagaaacatggttgaaccatcaatttcgcacaagcatattcaaaacatccattagcacaaaatgaggccctttgttttcatcctcatagaacttgtgtgctttttctatccacatttgatccaaatacctgctagtgaacaaccttctaggcttcaacgaacagtcattgaacatgtttatccacttatttatcttgtgccaccttcaactaaaataggtagattgaaatggcaatctagggctaaaactgaatttaatctggtactgaaactgtatgcaaacctgaattaagtaaattgaaattgtaatctgggctgaaactgaatgtaatctagggcggtttactaaatgtaatctggtgctgaaactaaatataaacctaaactgggtaaattgaaattgttactctaaaataatcaataaactgaaatgtaaacctaaacctaaatatacattcattcaaactgggtttagggttgatcatcctttagaaattaatcaataaactgttgtacagtctctaaacaacttgtattacctttgaagcaaatcagagaaagaaggtgatgtacgtgatgggggcatgaaagagcagcagaggaccctgggcaccggtgaagcccacctggttgccgacgggggagggaactctggagccaaacggggttgttgttgatgggcgggtcgacgttgacgacggagctaggggcgacaatagccagaggacggggcaacgatgactggccatggcgatctggtgggttgcggtagcggtagaatggatttaggcacgagagtagaagatgcaacagatgcggagaagagagttcgcgtaccacag

SEQ ID NO: 213765 - DNA, 1727 bp, Zea Mays
atcagaaggaagaccaatcaaagggaggcaaacgccatagcggccaatcacttggcggcggcggcggcggcgatggggcggctgaccgaggagcaggcggcgcgcgaggcgggctcggcggggaccaacgctatgtccctcaagctcacacaccgcgctctctccgacgtgtcgtgcctgagcagcttcaagaacctggagcacctcgacctcggcttcaactgcctcgtcaccctcgagtggctttcggttaaggaaaacaagcttgtgagcttaaaaggtgttgaggggctctcaaagctgcaggtactgaatgctggcaagaacgaacttacaaaaatggacgaggtcacatctttaacaagcctgggagcattgattcttaatgataacaatatttcttccatctgcaagcttgatcagttgcaacagttgaatacacttgttctctctaagaaccctgtctttaccattggcaatgctttggtcaaggctaagtctatgaaaaagctatccttgtctcactgccaaatagaaaatattggatcttctcttgttaagtgtgtggaactgaaggaacttaggctttctcacaacaagatcagtacaatcccttcagatttggccaaaaatgtgaagatcttgagccttgatttggggaataactttattgagaggagttcagatttgaaggtactttctgaattgcgctacttgaggaaccttaatttgcagggaaatcctgtttccaagaaagacagtcttgtcaaaaaggttaagaaatctgtgccaaccttgcgcatactgaacgcaaagcccctagaggccacctccaagagtgataagaggtctacaaaagagaatcctccgagcaaagatgaagacctcattgggattgatgcgaagaagaaggataaaaggaagggatctaaacaagaggtaaagggccttgaagagcttgaagtccagagtgtttctacaggtatcaccacttcgaaccctggtaaacttgaagtgccagacagtaaggaaaagaaaaaggtcaaggaagctaagacgaagaaatctgaagagccgtaccatgccaataacagtagcttaaagaacaaagaagttcaatcttttgtctatgataccagcacgaaggacaagaaggaagccaagaggaagaaatttgttgacgaagaagatgtagatgctgaaggaattgacaatacagaaatctcgtttgcagatttaatgttttccaatgtgggcaatccagagactaagctaaagaacatctcaaccctggaagcagctcctgatggaaaatctgttggaggtctggtaattgatcacacaaagaagagaaagaaaccaaaaggtgttgtcaccatcactgactcctcagctcttaagatgttttcctcaatgccagaggtaggagcaggagggcttggcctgtcaggatgggatgagtagcgtctagctctctagtaccataagtttgctgcctgatgaatatcgttttttggtgaaaacctcaattttatgtgaactgagcagcattttcttctcttcccatcaagtgcatttatgatgtgtgatttgaggaaccaagcccctctagatgagtggtgcatcttcggttcaaccaataatttagtggaataactacttttctcacgcttgcatgaattataaactactccgtccattctaaattataaaatattttacttttc

SEQ ID NO: 213766 - DNA, 1697 bp, Zea Mays
atcagaaggaagaccaatcaaagggaggcaaacgccatagcggccaatcacttggcggcggcggcggcggcgatggggcggctgaccgaggagcaggcggcgcgcgaggcgggctcggcggggaccaacgctatgtccctcaagctcacacaccgcgctctctccgacgtgtcgtgcctgagcagcttcaagaacctggagcacctcgacctcggcttcaactgcctcgtcaccctcgagggtttgtcctcctgtgccaatttgaagtggctttcggttaaggaaaacaagcttgtgagcttaaaaggtgttgaggggctctcaaagctgcaggtactgaatgctggcaagaacgaacttacaaaaatggacgaggtcacatctttaacaagcctgggagcattgattcttaatgttctctctaagaaccctgtctttaccattggcaatgctttggtcaaggctaagtctatgaaaaagctatccttgtctcactgccaaatagaaaatattggatcttctcttgttaagtgtgtggaactgaaggaacttaggctttctcacaacaagatcagtacaatcccttcagatttggccaaaaatgtgaagatcttgagccttgatttggggaataactttattgagaggagttcagatttgaaggtactttctgaattgcgctacttgaggaaccttaatttgcagggaaatcctgtttccaagaaagacagtcttgtcaaaaaggttaagaaatctgtgccaaccttgcgcatactgaacgcaaagcccctagaggccacctccaagagtgataagaggtctacaaaagagaatcctccgagcaaagatgaagacctcattgggattgatgcgaagaagaaggataaaaggaagggatctaaacaagaggtaaagggccttgaagagcttgaagtccagagtgtttctacaggtatcaccacttcgaaccctggtaaacttgaagtgccagacagtaaggaaaagaaaaaggtcaaggaagctaagacgaagaaatctgaagagccgtaccatgccaataacagtagcttaaagaacaaagaagttcaatcttttgtctatgataccagcacgaaggacaagaaggaagccaagaggaagaaatttgttgacgaagaagatgtagatgctgaaggaattgacaatacagaaatctcgtttgcagatttaatgttttccaatgtgggcaatccagagactaagctaaagaacatctcaaccctggaagcagctcctgatggaaaatctgttggaggtctggtaattgatcacacaaagaagagaaagaaaccaaaaggtgttgtcaccatcactgactcctcagctcttaagatgttttcctcaatgccagaggtaggagcaggagggcttggcctgtcaggatgggatgagtagcgtctagctctctagtaccataagtttgctgcctgatgaatatcgttttttggtgaaaacctcaattttatgtgaactgagcagcattttcttctcttcccatcaagtgcatttatgatgtgtgatttgaggaaccaagcccctctagatgagtggtgcatcttcggttcaaccaataatttagtggaataactacttttctcacgcttgcatgaattataaactactccgtccattctaaattataaaatattttacttttc

SEQ ID NO: 213767 - DNA, 1182 bp, Zea Mays
ctagggcatcaggagtgaacaatatctcaaaaagcccatcttctcttcctctctcgcagcaccgcctctcaacctccgccgccgctcgcccggggcgtcacccacccgcgcagaaggcccccgccgctcaaactaccggtgccctaaaccccgatattcttcttcgcctccctttcctcctcagcacccaaaccccgaccttcagggttccgccgccatgccgcagggagaccacatcgagcttcaccagaagcgccatggcaagcgcctggaccacgaggagcgcaagcgcaagcgcgaggcgcgcgaggtgcacaggcgctcgaaggacgcccgcaatttgattggtgctaagggcaagaggttcgccaagaaacgctatgctgagaaggcgcagatgaagaagaccctgaaaatgcacgatgaatcaaataagcgacagaaggttgatgatgatgtccaagagggtgctcttcctccgtatctactggatcgtgatcagacacagcgtgctaaggtactcagcaacacaatcaagcaaaagaggaaggaaaaggctggcaaatgggatgttccgctgccaaaggtcagacctgttgctgaagaagaaatgttcaaggtgctacgaactggcaagcgaaaaaccaagcagtggaagagaatggttaccaaagccacttttgttggagctggatttacaaggaaaccaccaaagtatgagcggttcattcgaccaactggtctgcgtttcaccaaagctcatgtgactcacccagaactgaagtgcactttcaaccttgacataatttctgtgaagaaaaacccaaatggtccgatgtacacttctcttggtgttatgacaaggggaacaatcattgaggtaaatgtcagtgagcttggtctggtaactcccgctggaaaagttgtttgggggaaatatgctcaagttacaaacaacccggagaatgatgggtgtatcaatgctgttttgctagtgtagaaccatagagtttgttttgcaccgtggtccatgggcgagcattctatatccttgctatgtgcgacaagccgacaaatgacttggctattatagcctgctataaagttgactaatacaaattagcaacatttttcttgagctacatgattttggcttcgaaacttacgcgtctccgatgaacc

SEQ ID NO: 213768 - DNA, 1371 bp, Zea Mays
attttatcattttgttgggtttcaactctagtctatcccaacttgcttgggactaaaaggctatgttgatgttgttgttgaggtatattagtgttgaacaagcatgtataggcctatatggtttatggatgagaaagctacatgaagacagcagctatgacgtttctagtactagctacttgttagtgaactccaagtttaccactgcaagaagcaggctgctggggcgaaaatgaagcaaaactggtttttagaggttgcttagctagcaagtaggagaacttgagctgtgcactattaggtcggttcctgtagcaaccgacctgaaagtcctgtaaaagaggcagcaatcctcctgtgtagaagtgggtttgagatatagagaagataaagcctggttgtgaagatcaagctagtgtatggtgtatagtaagctaatgtgtatgtgtgatagtagagcttgattgtgaagatcaagcaatgtgtgtaagcttgtagtgtgaagtcataagatcaatataatacaaactcgtgctactaactacttatgctattgtgtcactagaaacaaagtgattttcgtttccagcattagcaaattcagagtttcattttaagctcaacaaaaatggtcttatctgagttccactgtatagagaaaaatgcttcaggcctcctttggattaaaggatatttttccaaatcctacgtttttcctgtattttgtgctaatttctgtgaaattcctatatcattcctgtgaaattcttgtgttctaaaggaactctcagatgtagttctatttctcatcgaaggaactcacatctgaaagttggcaggaccttggcagctcagcaaacacaaatactgaaccttgtggcttgacgctgattttgaagcccaagtctttcagcaacagaaggatgaagtctcttttcacctcatagtcctagccaaagtcatcacaattgcaagcttcttggaatggtgcaggagctgaatctgttaattttatgtggatatttctaatagctgaggcgatgcttgctgctgcacaagcccaaccgagtctccaacctaatcagtccagacagtgaggatgtgatgatggtcctctcttgcatccctggaagagaagccagtgagatatgcttgttcgcatcgtaagtaatatactcataaacctggaaggtatttacacacattgagacaagatgtagacagatttttatgaaaaattgattgggaaatatgtacaaaaaaaaagctcatgaaatttcactgtgtgggtaatggggataagaacaatccttattgctcatcagagatgtacctcatcagttatcacaaagcagtccattttctgacaag

SEQ ID NO: 213769 - DNA, 714 bp, Zea Mays
cgaaaccgtgcctgcattgtacgatgaatgtcgtttcttcccgatccactgtgatcgccatggccagtcatcgttgccccgtcctctggctattgtcgcccctagctccgtcgtcaacgtcgacccgcccatcaacaacaaccccgtttggctccagagttccctcccccgtcggcaaccaggaccttggcagctcagcaaacacaaatactgaaccttgtggcttgacgctgattttgaagcccaagtctttcagcaacagaaggatgaagtctcttttcacctcatagtcctagccaaagtcatcacaattgcaagcttcttggaatggtgcaggagctgaatctgttaattttatgtggatatttctaatagctgaggcgatgcttgctgctgcacaagcccaaccgagtctccaacctaatcagtccagacagtgaggatgtgatgatggtcctctcttgcatccctggaagagaagccagtgagatatgcttgttcgcatcgtaagtaatatactcataaacctggaaggtatttacacacattgagacaagatgtagacagatttttatgaaaaattgattgggaaatatgtacaaaaaaaaagctcatgaaatttcactgtgtgggtaatggggataagaacaatccttattgctcatcagagatgtacctcatcagttatcacaaagcagtccattttctgacaag

SEQ ID NO: 213770 - DNA, 1453 bp, Zea Mays
ggtagatccctccttgataacttgatgagtagataatgggtaacaaactttcgacgttagccctcatgactgaatgcaaggaaatgtaaagcacaaatttgatgaagcccacgctcccgatgccacaggcaaggatgctggagcttctgcccaccaatccaagtggatcgatgtgtgatgctgatatcaatactgagcttaaagcgattgttcctgtgattatcgatgtgtgcatgactgcactgtatgcgaagaatccatcatgattatggagtgcacccttccagataatcatctcaacttatggggagattgacaagaacaattatctggaccccaggactgcgcaagttgctactatagatcatatgaaacagacttgtacaaaactgaggcctgctgaagatgaggagcttccatcagcttacattgaagagtttaggtgtgctttagatgttgaattgtcaaagtatgtttctgaagcttatcctaaaggggcctgtgccgtttattgtactagtggaaaggatatagagggaccaggagcagatttcagttttgcagcagttatttctgctgctaagcgtagcccacagaacttttgcaatggcagctggtgttcagtttggactattgaattcaattatgagttgcagtttgttgatattaaaggaaagatacaggtagatgctcactattttgaagagggaaatgtccagctggatactaacattgatcgtaaggactccaccagaatgcagtcacctgacgattgtgcggtttcaatcagtggcatcattcgacatcacgagtctgaatatttgtcctctctcgaggaatcatacttaaatttatctgatgcaacttttaaggaccttcggcgaaaacttccagttacccgtactcttttcccctggcataacacactggtgttcggtcttacgagagaccttgccaaagaattagcgcttggaaaatgaagtctccgctggccatgtcaccagattgtttcatctttgaacttcccaatcccagtgtaaatcaacaagatactttttttttgggggaggatgacattcaaaaaatacacattctcttcacatatcctagggcttttatttggatgccgttaggaaccaaacagactcttgttgacgtgtgtgaatcatttgtttcttcaccaatgctccattgtgatagattattttaggtgttctgtatgagcctttttttaacagaaagaggtttccctcctatttaattaggaaataagaacatagttcggaacaagatctggcatccaacttgtttacatgacttagtgaccaacaacgagaggaaaagctaaaccacctttccagaatgtatctgaagaggagactaacaacaccaagcataaaaggacggccaaactaagtcagcatcaccagcgaaaggtttacgacttcgcaac

SEQ ID NO: 213771 - DNA, 1417 bp, Zea Mays
tggggtcaagatcatttgcctggcactgcctgctcggcacccgcctgctcggctgctcccaccgtcccacgtgccgtccgtccgtgttggagcgtgttgccatcgccattccctccgcttcgctccgtttcgttgccaccctttacacgcactccaccttcgctcctccgggcccccgaaatgtcggacgaaggcggcgccggcgagccgctcagcgaccgccagaaacgggagatcgccacctggttcctatccaacgcgccagccggcgagatccattacatcgccaaagatgtgcgcgcgctgctggggaacgacgcggtgtacgaggccgccgccgcggaggccttcccggagtacaacaaggcccgcctcgtgtccatcgagctccccgaccgcagtggcgacataatcatctcaacttatggggagattgacaagaacaattatctggaccccaggactgcgcaagttgctactatagatcatatgaaacagacttgtacaaaactgaggcctgctgaagatgaggagcttccatcagcttacattgaagagtttagtggaaaggatatagagggaccaggagcagatttcagttttgcagcagttatttctgctgctaagcgtagcccacagaacttttggtagatgctcactattttgaagagggaaatgtccagctggatactaacattgatcgtaaggactccaccagaatgcagtcacctgacgattgtgcggtttcaatcagtggcatcattcgacatcacgagtctgaatatttgtcctctctcgaggaatcatacttaaatttatctgatgcaacttttaaggaccttcggcgaaaacttccagttacccgtactcttttcccctggcataacacactggtgttcggtcttacgagagaccttgccaaagaattagcgcttggaaaatgaagtctccgctggccatgtcaccagattgtttcatctttgaacttcccaatcccagtgtaaatcaacaagatactttttttttgggggaggatgacattcaaaaaatacacattctcttcacatatcctagggcttttatttggatgccgttaggaaccaaacagactcttgttgacgtgtgtgaatcatttgtttcttcaccaatgctccattgtgatagattattttaggtgttctgtatgagcctttttttaacagaaagaggtttccctcctatttaattaggaaataagaacatagttcggaacaagatctggcatccaacttgtttacatgacttagtgaccaacaacgagaggaaaagctaaaccacctttccagaatgtatctgaagaggagactaacaacaccaagcataaaaggacggccaaactaagtcagcatcaccagcgaaaggtttacgacttcgcaac

SEQ ID NO: 213772 - DNA, 2138 bp, Zea Mays
atcaggcgttggatttcttatgcctggggtcaagatcatttgcctggcactgcctgctcggcacccgcctgctcggctgctcccaccgtcccacgtgccgtccgtccgtgttggagcgtgttgccatcgccattccctccgcttcgctccgtttcgttgccaccctttacacgcactccaccttcgctcctccgggcccccgaaatgtcggacgaaggcggcgccggcgagccgctcagcgaccgccagaaacgggagatcgccacctggttcctatccaacgcgccagccggcgagatccattacatcgccaaagatgtgcgcgcgctgctggggaacgacgcggtgtacgaggccgccgccgcggaggccttcccggagtacaacaaggcccgcctcgtgtccatcgagctccccgaccgcagtggcgacataatcatctcaacttatggggagattgacaagaacaattatctggaccccaggactgcgcaagttgctactatagatcatatgaaacagacttgtacaaaactgaggcctgctgaagatgaggagcttccatcagcttacattgaagagtttaggtgtgctttagatgttgaattgtcaaagtatgtttctgaagcttatcctaaaggggcctgtgccgtttattgtactagtggaaaggatatagagggaccaggagcagatttcagttttgcagcagttatttctgctgctaagcgtagcccacagaacttttggtattgtctggttcatgtcttctgtcttttccttgttcctgaagaaatttgccatattttcttaaatcttgcacatatggatcagttagttttgctctgcgttataataagactaaaaaatttgatagatccttttcagcctttaaggccatttagacatttacccatcctctgtttctagtttctctttagttttagaactttattcaggaaattcttcaaactttagtttcttattagtgtctccttacattcctttgagaacctctcatttttccattcagcatgcaacttttagtcttcagttttttcatgggtgtcattttcaatatccctgtgaactgtggtttgttttgagtatactattttatcatcagcctagaaccttttgagttatgacatgtttaatgccggcctgttctttctatttctccatcagaggaattgcttcacataatctcaatagaactgttaaacatgcttcaaatagatttaatcttttaatcgtttagcctctgatgaaggccttgtgtcatccagcaatggcagctggtgttcagtttggactattgaattcaattatgagttgcagtttgttgatattaaaggaaagatacaggtagatgctcactattttgaagagggaaatgtccagctggatactaacattgatcgtaaggactccaccagaatgcagtcacctgacgattgtgcggtttcaatcagtggcatcattcgacatcacgagtctgaatatttgtcctctctcgaggaatcatacttaaatttatctgatgcaacttttaaggaccttcggcgaaaacttccagttacccgtactcttttcccctggcataacacactggtgttcggtcttacgagagaccttgccaaagaattagcgcttggaaaatgaagtctccgctggccatgtcaccagattgtttcatctttgaacttcccaatcccagtgtaaatcaacaagatactttttttttgggggaggatgacattcaaaaaatacacattctcttcacatatcctagggcttttatttggatgccgttaggaaccaaacagactcttgttgacgtgtgtgaatcatttgtttcttcaccaatgctccattgtgatagattattttaggtgttctgtatgagcctttttttaacagaaagaggtttccctcctatttaattaggaaataagaacatagttcggaacaagatctggcatccaacttgtttacatgacttagtgaccaacaacgagaggaaaagctaaaccacctttccagaatgtatctgaagaggagactaacaacaccaagcataaaaggacggccaaactaagtcagcatcaccagcgaaaggtttacgacttcgcaac

SEQ ID NO: 213773 - DNA, 1955 bp, Zea Mays
caaacgaaggcgcggagacgtgctgcagagcctgcagaggcttttcttccccccaccccacccatcgcgtgtgagtccacggtgtgatgtcacggagcggtggcggctttcccgattcactgtgcgggagaaatccccgtgcagccttcttccacctcctcctactctccgctattcgtcttcgctgatttctgccgctccaattccatcgcttccctgctttagaaccttctctgctagcttctccccgtcacagcttttggtgcctcgtcatcggcgaccaaaccgccggcgaccggataaactaagccagctccttcgctccgaaagtcgtctctcgtagagagcacttgctcacctgctccccgcccccctctgctggcgctggacttgctcggagtggagatccatccggacctggttcgatttcttcatttcggttgcttctctgctcagtgggtggataactggattgtggattttgctaactacatgctgggttatcagcctatcataaggaaagcaaagaagagacaacaaagcaatttgttgtctctttcttaggagctggcgagtactcggcatggcagatgctagttcgaggactgacacctcgactgttttagacatggatgataagaatcaaaggttagaaaatggacagagtggagctatggccctggcttcgaattcatctgatcggtctgacagatctgacaaacctatggaccaaaaggttttacgacggcttgcccaaaatcgtgaggcagcaaggaaaagtcggctgaggaaaaaggcatatgtgcaacaactagagagcagcaagctaaaacttgcaagcctggagcaagaactccagaaagctcgacaacagggaatcttcatatccagttctggagatcaaactcatgctatgagtggaaatggagctatgaccttcgatttagaatattctcgatggcaagaggaagaaaataagcagataaatgagctgaggactgcagtaaatgctcatgcatgtggaaaacacctgctgaaaggtgcttcttgtggcttgggggtttccgttcgtctgagcttctaaagctccttgtgaatcagcttgagcctctaactgagcagcaattgatggggctatccaatctccagcaatcctcccagcaggctgaggatgcattgtcacaaggcatggaagcattgcagcaatccttggcagaaacgctggctgggtcccttggtccatcaggatcttccggaaacgtcgcaaactatatgggtcaaatggctatggccatgggaaaacttggcacactcgagaatttccttcgtcaggctgacaatctacgacagcagaccttgcatcagatgcaacgcatcctgacaattcgacaagccgctcgcgcgcttcttgcaatacacgactacttttcacgtctacgcgccctgagttctctttggctcgctaggccgcgagagtagcatcacccacgttggagtcactccatgggccgatctgtgaatgtggggctgctggctgcaaactcgcaacgcatttgcagatggctggagggtcagttctctttgtacaagttgtattaacatcttctggtctcatattgcgcttcagtgttgtacaagttagggtaaagcttgcatttaacttgtaagttatcatggattcatgattgacatattgtacaattgtattagcaataagaatagaagtacataaatgctggaaggactatccagcgtctatattggttggaaacgagcagcagaagcttgtcatgtcgattttgaatagtcggttgaagtgttctttttggggtctatagagaacaaagaaagcttcaggagaaatgtataggtattcaccagtctaccatagtgtgtgcttcggggagctccttgtgatggtaaaatttgataacgaggatgagttcagtgacatt

SEQ ID NO: 213774 - DNA, 2048 bp, Zea Mays
caaacgaaggcgcggagacgtgctgcagagcctgcagaggcttttcttccccccaccccacccatcgcgtgtgagtccacggtgtgatgtcacggagcggtggcggctttcccgattcactgtgcgggagaaatccccgtgcagccttcttccacctcctcctactctccgctattcgtcttcgctgatttctgccgctccaattccatcgcttccctgctttagaaccttctctgctagcttctccccgtcacagcttttggtgcctcgtcatcggcgaccaaaccgccggcgaccggataaactaagccagctccttcgctccgaaagtcgtctctcgtagagagcacttgctcacctgctccccgcccccctctgctggcgctggacttgctcggagtggagatccatccggacctggttgcttctctgctcagtgggtggataactggattgtggattttgctaactacatgctgggttatcagcctatcataaggaaagcaaagaagagacaacaaagcaatttgttgtctctttcttaggagctggcgagtactcggcatggcagatgctagttcgaggactgacacctcgactgttttagacatggatgataagaatcaaaggttagaaaatggacagagtggagctatggccctggcttcgaattcatctgatcggtctgacagatctgacaaacctatggaccaaaaggttttacgacggcttgcccaaaatcgtgaggcagcaaggaaaagtcggctgaggaaaaaggcatatgtgcaacaactagagagcagcaagctaaaacttgcaagcctggagcaagaactccagaaagctcgacaacagggaatcttcatatccagttctggagatcaaactcatgctatgagtggaaatggagctatgaccttcgatttagaatattctcgatggcaagaggaagaaaataagcagataaatgagctgaggactgcagtaaatgctcatgcaagtgaaagtgacctccgtcttatcgtcgatgggataatggcacattatgatgagatattcaggctgaagggtattgctgcaaaggctgatgtgttccatatactttcaggcatgtggaaaacacctgctgaaaggtgcttcttgtggcttgggggtttccgttcgtctgagcttctaaagctccttgtgaatcagcttgagcctctaactgagcagcaattgatggggctatccaatctccagcaatcctcccagcaggctgaggatgcattgtcacaaggcatggaagcattgcagcaatccttggcagaaacgctggctgggtcccttggtccatcaggatcttccggaaacgtcgcaaactatatgggtcaaatggctatggccatgggaaaacttggcacactcgagaatttccttcgtcaggctgacaatctacgacagcagaccttgcatcagatgcaacgcatcctgacaattcgacaagccgctcgcgcgcttcttgcaatacacgactacttttcacgtctacgcgccctgagttctctttggctcgctaggccgcgagagtagcatcacccacgttggagtcactccatgggccgatctgtgaatgtggggctgctggctgcaaactcgcaacgcatttgcagatggctggagggtcagttctctttgtacaagttgtattaacatcttctggtctcatattgcgcttcagtgttgtacaagttagggtaaagcttgcatttaacttgtaagttatcatggattcatgattgacatattgtacaattgtattagcaataagaatagaagtacataaatgctggaaggactatccagcgtctatattggttggaaacgagcagcagaagcttgtcatgtcgattttgaatagtcggttgaagtgttctttttggggtctatagagaacaaagaaagcttcaggagaaatgtataggtattcaccagtctaccatagtgtgtgcttcggggagctccttgtgatggtaaaatttgataacgaggatgagttcagtgacatt

SEQ ID NO: 213775 - DNA, 2074 bp, Zea Mays
caaacgaaggcgcggagacgtgctgcagagcctgcagaggcttttcttccccccaccccacccatcgcgtgtgagtccacggtgtgatgtcacggagcggtggcggctttcccgattcactgtgcgggagaaatccccgtgcagccttcttccacctcctcctactctccgctattcgtcttcgctgatttctgccgctccaattccatcgcttccctgctttagaaccttctctgctagcttctccccgtcacagcttttggtgcctcgtcatcggcgaccaaaccgccggcgaccggataaactaagccagctccttcgctccgaaagtcgtctctcgtagagagcacttgctcacctgctccccgcccccctctgctggcgctggacttgctcggagtggagatccatccggacctggttcgatttcttcatttcgggttcgattcggtttttctatcccagagcgaaagatcaatatcacctgacacaacataacgatttcgtggaagccgaggttgcttctctgctcagtgggtggataactggattgtggattttgctaactacatgctgggttatcagcctatcataaggaaagcaaagaagagacaacaaagcaatttgttgtctctttcttaggagctggcgagtactcggcatggcagatgctagttcgaggactgacacctcgactgttttagacatggatgataagaatcaaaggttagaaaatggacagagtggagctatggccctggcttcgaattcatctgatcggtctgacagatctgacaaacctatggaccaaaaggttttacgacggcttgcccaaaatcgtgaggcagcaaggaaaagtcggctgaggaaaaaggcatatgtgcaacaactagagagcagcaagctaaaacttgcaagcctggagcaagaactccagaaagctcgacaacagggaatcttcatatccagttctggagatcaaactcatgctatgagtggaaatggagctatgaccttcgatttagaatattctcgatggcaagaggaagaaaataagcagataaatgagctgaggactgcagtaaatgctcatgcaagtgaaagtgacctccgtcttatcgtcgatgggataatggcacattatgatgagatattcaggctgaagggtattgctgcaaaggctgatgtgttccatatactttcagctccttgtgaatcagcttgagcctctaactgagcagcaattgatggggctatccaatctccagcaatcctcccagcaggctgaggatgcattgtcacaaggcatggaagcattgcagcaatccttggcagaaacgctggctgggtcccttggtccatcaggatcttccggaaacgtcgcaaactatatgggtcaaatggctatggccatgggaaaacttggcacactcgagaatttccttcgtcaggctgacaatctacgacagcagaccttgcatcagatgcaacgcatcctgacaattcgacaagccgctcgcgcgcttcttgcaatacacgactacttttcacgtctacgcgccctgagttctctttggctcgctaggccgcgagagtagcatcacccacgttggagtcactccatgggccgatctgtgaatgtggggctgctggctgcaaactcgcaacgcatttgcagatggctggagggtcagttctctttgtacaagttgtattaacatcttctggtctcatattgcgcttcagtgttgtacaagttagggtaaagcttgcatttaacttgtaagttatcatggattcatgattgacatattgtacaattgtattagcaataagaatagaagtacataaatgctggaaggactatccagcgtctatattggttggaaacgagcagcagaagcttgtcatgtcgattttgaatagtcggttgaagtgttctttttggggtctatagagaacaaagaaagcttcaggagaaatgtataggtattcaccagtctaccatagtgtgtgcttcggggagctccttgtgatggtaaaatttgataacgaggatgagttcagtgacatt

SEQ ID NO: 213776 - DNA, 2033 bp, Zea Mays
caaacgaaggcgcggagacgtgctgcagagcctgcagaggcttttcttccccccaccccacccatcgcgtgtgagtccacggtgtgatgtcacggagcggtggcggctttcccgattcactgtgcgggagaaatccccgtgcagccttcttccacctcctcctactctccgctattcgtcttcgctgatttctgccgctccaattccatcgcttccctgctttagaaccttctctgctagcttctccccgtcacagcttttggtgcctcgtcatcggcgaccaaaccgccggcgaccggataaactaagccagctccttcgctccgaaagtcgtctctcgtagagagcacttgctcacctgctccccgcccccctctgctggcgctggacttgctcggagtggagatccatccggacctggttcgatttcttcatttcgggttcgattcggtttttctatcccagagcgaaagatcaatatcacctgacacaacataacgatttcgtggaagccgaggttgcttctctgctcagtgggtggataactggattgtggattttgctaactacatgctgggttatcagcctatcataaggaaagcaaagaagagacaacaaagcaatttgttgtctctttcttaggagctggcgagtactcggcatggcagatgctagttcgaggactgacacctcgactgttttagacatggatgataagaatcaaaggttagaaaatggacagagtggagctatggccctggcttcgaattcatctgatcggtctgacagatctgacaaacctatggaccaaaaggttttacgacggcttgcccaaaatcgtgaggcagcaaggaaaagtcggctgaggaaaaaggcatatgtgcaacaactagagagcagcaagctaaaacttgcaagcctggagcaagaactccagaaagctcgacaacagggaatcttcatatccagttctggagatcaaactcatgctatgagtggaaatggagctatgaccttcgatttagaatattctcgatggcaagaggaagaaaataagcagataaatgagctgaggactgcagtaaatgctcatgcatgtggaaaacacctgctgaaaggtgcttcttgtggcttgggggtttccgttcgtctgagcttctaaagctccttgtgaatcagcttgagcctctaactgagcagcaattgatggggctatccaatctccagcaatcctcccagcaggctgaggatgcattgtcacaaggcatggaagcattgcagcaatccttggcagaaacgctggctgggtcccttggtccatcaggatcttccggaaacgtcgcaaactatatgggtcaaatggctatggccatgggaaaacttggcacactcgagaatttccttcgtcaggctgacaatctacgacagcagaccttgcatcagatgcaacgcatcctgacaattcgacaagccgctcgcgcgcttcttgcaatacacgactacttttcacgtctacgcgccctgagttctctttggctcgctaggccgcgagagtagcatcacccacgttggagtcactccatgggccgatctgtgaatgtggggctgctggctgcaaactcgcaacgcatttgcagatggctggagggtcagttctctttgtacaagttgtattaacatcttctggtctcatattgcgcttcagtgttgtacaagttagggtaaagcttgcatttaacttgtaagttatcatggattcatgattgacatattgtacaattgtattagcaataagaatagaagtacataaatgctggaaggactatccagcgtctatattggttggaaacgagcagcagaagcttgtcatgtcgattttgaatagtcggttgaagtgttctttttggggtctatagagaacaaagaaagcttcaggagaaatgtataggtattcaccagtctaccatagtgtgtgcttcggggagctccttgtgatggtaaaatttgataacgaggatgagttcagtgacatt

SEQ ID NO: 213777 - DNA, 2110 bp, Zea Mays
gaagatacccgttgcaacgcgtcgagcggcaacgctggcacggagctcaagtctccacacaacctccgccgccgggaggaccaacacgtcagtgacggcagctgactgcagaggatctcatcgcccgccgaccgccgcaaccgcgaccgcgagcctcgattttgaactgaactgaaaaacctagaattcttttagggtttccgaggtttctctttctcgcgtttccactgtctggtcttccccgatcgccgcgaaagcagtaaagagtccgcaatctttgccgcccccaccctcatcctctgctctcgtatcgtctcctctccacttcctctttctctcctctacaagggtatccactatccagaatcacctctatcatcaggatgcgggaggcacagttgggctcccacacgattcagacgcacggagtgagactggccagaaagcacacacacgactgggttgttctgattcttctggctgcactggtggttgccgtgcattacgctcccccgttcagtcgatttgtcgggaaggatatgatgactgatattaggtacccggtgaaaccaagcacagtaccagcatgggctgtccctatgatctctatactctgtccctggctcgtcttcatatccatatatgttgccaggagagacgtttatgatctgcatcacgctgcactaggtgttcttttcgctgtgctgataactgcagtttttaccgatgtgataaagactgcagtagggagaccgaggccagacttcttctggcgatgctttcctgatggaaagcagttatacgatcaggtgattggcgatgtgatttgccatggtgataaaaacttcttaaaagatgggcgcaagagctttcctagtggccacacttcgtggtcttttgctggtcttggatttttgtcactctacctgtcaggcaaaattaaggccttcaatcgccaaggtcacgtggccaaactttgcatagtgatccttccgcttcttcttgcttcactcgttggggtttcaagagtagatgattatcgacaccactgggaggatgtgtttgttggcggtcttattggatttatcatggcagtgctatgttacctgcatttctttcctcctccataccatgatcaaggttgttcgatctttctcactaagcaaatttgcttccaatagtactgctttaagtgttcgccctgctatcattgatcctctttcttaaacattttctgttgttcattttgtttcgatagtttaaattttccttttcggatatgacggtcttttccttttcgccttcaggttgtagaccgtatgcatacttccatatgctggaagaacttcaagcggcaaattcaaacaacgcacaaaaccaacagtccacaggtgatcatcgcattggcatgtccgagcagcagcataacaggacatcaagaaacgatttggaatctggaaccgtgtaacatgcctcctgcacttttactgaagtagcagcagcgatgtacattggacacaggtaaaggattcctaaacaggagccgcttgctcaattcacgttccccgcaaaagcgtgctgcaaagcgatgagtacctgcaagatgagattaatctaccagtggctaaacatgaagaagcataagcataacggccgcatgactttggatgatcatcttcaacaagctgacgtggcgggccagcgtaagcatatgcatctggcaaatacgcggcgaaaatcgtctaggctccgtggataaaatttgtggttgttgacaaggtaaaagagagagactgaaaaatagcaaagggaaaagagagcgcgcatcagcatccatttgtttctgagagagcaccaagtacttggacccgcggcaatggcatcctcgtgaagcggtgaaggcgtgtcacgtgaaccactttcattatacagtacaacttcagagttcagatggaatttgcaatcatgatccatgcttggcttgcccaagcaaagcaaccctgctatgcaatctctgtgaacaacctggagtggtgtttgtgcttcactatcgtgaacaatctgtgaacctttcattatttatgtgacagcttgacagtgcagtacgaaa

SEQ ID NO: 213778 - DNA, 1678 bp, Zea Mays
gagtgaacacgtcacccttggtattcttccagcttccaggctctacgccgcttctagcgccccgatacgcggcgccggcgcaggcgtgcagccatggcgatgagctggatccgatcggttgttaggagggccctcatcgctccgaagccgcggggctcccgccagtttactgtcaccgccgccggcggcggcgcgacgcagaccgaaagggtggcggcggagatggtccgctacgccctcggcggcgccgtgcaccggagctcgccagaggaggcgatgcggatactggagcaaggcgcctcgaacctgcagggaggaggcgagggcagtgccgaagctgttgggttgctcatgctcgctatgtccacgctgctttaccggagtggaagacgtcaagacgcagtggaaaagctcaaagcaacccaacaagttgccccttctgcagtttttagagttgcagcgtgggaagcactaatgggattacacatggaggcagggcaggagatgtcatacttgatttccccaaatgattcagttgatctgtcaatcaaatatgatagcaaatggtctgatcaggaccatcttaaatttcgggttaatgctgtcagaggacttgttacacttctgaatggagaaacagaatcagctgcccagctgttcgatggttggtgcagagacttttctagaggcgaaaaccaaacagaaaatgctgccgtttcatacggtgaatatttgcattgtgttggggattttcaaatggcagcacaagtgtatgagaaaattctcgaggcattttgcatggatgatatgtctggaaaccttttagcagctggaaacatggttcccgaggaggcttctcttggggccacttgctcatatggccagcttttatctcactctgggaagtttgctgaggcagaggattatctcacaagagctctacagaaggctgaagaacaatttggtgcaaaccacccaaaggtcggcattatattgacctgtgtagctagaatgtacaaactaaaggcaaaatctgaaggttctacttcaattatggtccaggaggggctgtacaggaaggccctagaagtattgaaagcccctgctattaattctgagggtaaaaacaacgatctcctatcaatgataaggtgagtacgcggagctgttattaattcagtctaataggaaggcggaaggtgaacggatgaagcagtgggcagaagatgcttggaggaaccgtaggctaacgctagcacaagctctagagttttcagaaccttcaaagccgactgtcgttgttgacacccgaatcggcagggtcgtgtagcttcagtcaacaatctcgtgagatgcacaaatgaagcaatccgtggatgcacctcgtgtcgtgtatattttcgaaagtgttgctccttgcgggctgcatccggtttgatccgttcaagtcccagcacactcgcctgcttgtttttcatatcacctttttgaatagggggacattcgaggatcacaaagcttgtgcatgtgatcactttaaacatttaatagcatatgtatatgttattgtacacagaataacaccacttaaagcatctttacattttgattgctatatacatgaagctcttatattttttttatttccactccttttatgcataccatgaggtggagt

SEQ ID NO: 213779 - DNA, 1580 bp, Zea Mays
gagtgaacacgtcacccttggtattcttccagcttccaggctctacgccgcttctagcgccccgatacgcggcgccggcgcaggcgtgcagccatggcgatgagctggatccgatcggttgttaggagggccctcatcgctccgaagccgcggggctcccgccagtttactgtcaccgccgccggcggcggcgcgacgcagaccgaaagggtggcggcggagatggtccgctacgccctcggcggcgccgtgcaccggagctcgccagtggaagacgtcaagacgcagtggaaaagctcaaagcaacccaacaagttgccccttctgcagtttttagagttgcagcgtgggaagcactaatgggattacacatggaggcagggcaggagatgtcatacttgatttccccaaatgattcagttgatctgtcaatcaaatatgatagcaaatggtctgatcaggaccatcttaaatttcgggttaatgctgtcagaggacttgttacacttctgaatggagaaacagaatcagctgcccagctgttcgatggttggtgcagagacttttctagaggcgaaaaccaaacagaaaatgctgccgtttcatacggtgaatatttgcattgtgttggggattttcaaatggcagcacaagtgtatgagaaaattctcgaggcattttgcatggatgatatgtctggaaaccttttagcagctggaaacatggttcccgaggaggcttctcttggggccacttgctcatatggccagcttttatctcactctgggaagtttgctgaggcagaggattatctcacaagagctctacagaaggctgaagaacaatttggtgcaaaccacccaaaggtcggcattatattgacctgtgtagctagaatgtacaaactaaaggcaaaatctgaaggttctacttcaattatggtccaggaggggctgtacaggaaggccctagaagtattgaaagcccctgctattaattctgagggtaccagcaaacaggttgactggagagatatcatctccctcgctagaggtgagtacgcggagctgttattaattcagtctaataggaaggcggaaggtgaacggatgaagcagtgggcagaagatgcttggaggaaccgtaggctaacgctagcacaagctctagagttttcagaaccttcaaagccgactgtcgttgttgacacccgaatcggcagggtcgtgtagcttcagtcaacaatctcgtgagatgcacaaatgaagcaatccgtggatgcacctcgtgtcgtgtatattttcgaaagtgttgctccttgcgggctgcatccggtttgatccgttcaagtcccagcacactcgcctgcttgtttttcatatcacctttttgaatagggggacattcgaggatcacaaagcttgtgcatgtgatcactttaaacatttaatagcatatgtatatgttattgtacacagaataacaccacttaaagcatctttacattttgattgctatatacatgaagctcttatattttttttatttccactccttttatgcataccatgaggtggagt

SEQ ID NO: 213780 - DNA, 1912 bp, Zea Mays
gccagccgctactataaatgcgagctaccctcctcccgccttctcacacagtcgcaccaatcatttctttgcaatctgcagcctctgcaaactgatcgcgttgctggttgctggtaatcatcggaccagtccacagatatcggaagctctcttgctactgatggcgaagcccagcgtggcggtgccggaggttggcgtaccagcggcgcaggcgtcgtgcacctgcccggggacgctgctcgcgtacccgccgccgcgtggcgccggggtcgcggccgccgtgcggcgcaagtgcctgcaggtggagctcggcgcgggggcgggcctgctgggcggcgccggcgcctggggcgtggagtccatgcgggcgtcgtcgcccacgcacgccagggccgcggccgcgctcgccgccggcggcggcgtcgatgtcgacgtcgacgaggagcgcgccgccagctggatggcgcggcacccgtcggcgctgggcaggttcgagcggatcgtggcggcggccgagggcaagcggatcgtcatgttcctggactacgacggcacgctgtcgcccatcgtggacgaccccgacgccgccttcatgagcgagacgatgcggatggccgtgcgtagcgtcgccaagcatttcccgacggcgatcgtgagcggccggtgccgcgacaaggtgttcgagttcgtgaagctggcagagctctactacgccggcagccacggcatggacatcaagggtccggcggccgccaaggcctcctcttcttctcggcacgccgcaaaggcaaaaggagtagtgttccagccggccagcgagttcctgcccatgatagaggaggtgcacgagcgcctggtacagacgacgcgctgcataccgggggccaaggtggagaacaacaggttctgcgtctccgtccacttcagacgcgtcgacgaaaagatgtggggcgagctgtcagagtcggtgaggggcgtgctgcgggggtacccgaagctgcggctgacgcacgggcggatggtgctggaggtgcggcccagcatcaagtgggacaagggcaaggccctggagttcctgctcgagtcgctcggcttcgcggactgcagcagcgtgctgcccgtgtacatcggcgacgaccgcaccgacgaggacgccttcaaggtcctgcggcgccgcggccaggaccagggcgtcggcatcctcgtgtccaagcaccccaaggagacgagcgcctcctactcgctccaaggccccgcagaggtgatggagttcttgctgcggcttgtcgagtggaagcgcctctccagggccaggctcaggctgcaatgagatgagacggcgcaactgccgtacgtggacacgtacgacgatgcaacggattaagctaactgccaagtgccagttaattaagttaagatcctgcctgctacgtggaatcgtgaacggcactgtctctctactgtccccccgtagtgatcagcatgcatgtacatcgttgtctcatacagtactagctagttagtactaagcatgcctgttacatatatatagcttcatgtgaatgtgttgtactgatgtgtgatcttaaaagtatgctgatgaacggtgtgatatttttttaatccacactacttgctgatttggttcaaagccggacctgtcgtcgtcgaagtgatccagctttgcaacgccattggccaccaccacatcgatcgaaagccacaccaataatgagcaaggcgacgatggaatcttggataacgcatgccacacgggagcgcgcacacgatctttaccatttgatgaagataatgatctacctgtggacgtacgccgcgtgatgacgaagcgcggttggactccactcggaagatcgatggagacgcgcgctctctggccattatattcccc

SEQ ID NO: 213781 - DNA, 453 bp, Zea Mays
ctagattcagaatcacttgtaggacaggtgtatgcgcttggggcgttcattgtgttgagatgggcgtgggctaagaggaaggagaaccaggacagaaaggactcacctgatgctggggatgggaatgcaccggacagatcgacttaatctccggttgctgctgcgtggactaggctacccgcgaagatgaatgccgtttcgtgataagccaacgatgatggatcattctagctaatgcatcatataatggtcatcgatgttgctgtggatttatgtattttcctgacaatttgcaagttacattctccccctttttcactctagtgggatcctttttatctgaggtgtggcacctgcctgttcactctactgataaacaatgtctgtcaatgaacatgcgtggaagagaaccatcaggtggctaatttttggcaggcatctggttaatttcac

SEQ ID NO: 213782 - DNA, 2490 bp, Zea Mays
ccgacatcaacggggacaatgatgatctgcggaggtagagactttcagattcaggtaaaacgaccgactctcaaatgatgtggacacaagttcactgtggcgcctacagagagcccagcccaggcaccaccgtcaggttcgcaaaaaaaaaaaaaaaaaaaagatgagagatccccatccaacacaagtactcaacggtacggtggttgcagtttacggcaaaaaggtttaccgatgaagcttcaaatccggtgtctcgttttcgtcgacgaaacgaaggcaacacaacacgcaaggaaggtactcgtccgccactgtcccttttccagcgtgggtgggcggcgcgatcaccaacgggctctgcttgcggacttgggtttgggttccccgaatccaaccactcttctgccaaccaacgcgcgaaacggcgaaagggtttgcagttggaggtccggaactccggattagcacgggcgggcaccgccgcggccaatcatcatcatcattactcgccctcctaaacattccttagtttatgccaacccaaactccaccccctcctccagactccagagcccgagcccatccgatccggaacttcttcttcccctaccaaacggatcgagccctgcgctacgctgccaaccgtactacactcgtcagtcgtcatagcctggctttcgtttgtctctctcgtaacttttgcttccgggagcagaaaaacgtcgccggggccctcccccgtcttgggatatttcatcagttttcaggttcttggctcttgggatcggatcttccatattctttggttctcgagactccagaggagaggagggagagagagagagagagagagagagagagagagagagagagagagagagagaggaggaagcgggggtgatcgttgtttcttgatcgccgccatgagtaacacgctgcttcgggtctgcccgtccgacctgaagatgccattcgaggtcaagaagcacagttcggcatgtctcgagctcgtcaacaggaccgatcggtgggtggctttcaaggtcaagacgacgaaccctaggaagtactcggtgcggcctgcctccggcgtcgtgcagcccaggggatcctgcggcatcacaatcacgatgcaagcgcccaaggaggtgcccccggactaccagtgcaaggacaagtttctcgttcagagcgtcgcggcggcggaggggacgacgcacaagggcattgtccctggcatgttcagcaaagcgccaggtaagttggttgaggagttcaagttgagggtggtctatgtccctgccaaccctccgtcaccagtgcccgaggaaacagaggaagatgacggatctcttgattcagatgtggaccatgaagtggggacaccatcgacgtccaactgtgcagcaggacaagggcatacatgtagatcacaagcttcagatgacgaggtgactctagttagtccctcctaaataccgtctgcctttgcgttctctcaaactcaaatatggatcttgtgttgatcacctgttgcatagcatataatctttaaaagttcgtcggtagttctttcttcttttatgatgctattgattcactgaatagtttcggtttcatgaaattctatcataatatctgcccaaatccttcaacccgaaaacaaaagaagagaacaggaaaaaaaactatcataacaacatactcctgttgaattgtaatgtgaatacctctctaattacaattgtttttgtattataatgattccctatattagttccaccatggttatcggcaccattagcccccaggatgttagaatttcaaaatatttgtatactgtctaccctgaacattcactttatccctgacatcttcagggtgactctacatccaagttaggactggaaagtagatatgcagaggaaaacaagatggttcagaaagacctgatacaggatgcctctatatccgagttagaactggaaagtagatatgcagaggaaaacaagaagatccagaaagagctggatctcctccggaagacacatgcatctcctggggacttctcggcgacgtctgtgctgcttgtcttcttgttatcttcacttgttggatacctgatgttcggaagcaaaacttagcaagttcttagaagcaagataatgacagcacatcattctgcggctccggcacagctctatcgtcttttgtgtattgctccttttagtacaaaatatatatagttaagtagtccacaatacatgacagatactcctcccttgctagtcccgtatgaacagatactcctcccttcttgagtaggtgtttttttctttctaagggctagtttgggagccacaaaaccggagtggattgaattgtctgaaatctccttcttaattaattttaaataaaaagtgaattttaacacctccaaatctccaatcccctctgatattttagcttgaaaactaggcctaaatg

SEQ ID NO: 213783 - DNA, 3588 bp, Zea Mays
gggcccagttatcaaggtgattgtgtgaagtgtagagcgcccacctccgtcagctgggcacacgtagatatagcagtagcagcagcggagctgttcgacgaaatgccgccatggccgccgtgtctccagcctaccctcaccaccgctcgccgcgccaccgtattctccaggacgagatgtctctcttctacccccgcctctcctacctacgagcaggggcagcacgaggaggagccatcgttggtcgttgtggggggcggcgcggcgggcgtgtacgcctccataagggccaagacccttgctccgcacctcaacgtcgcggttgtggagaaaggcaggttcttgtccaaggtcaagatctccggcggtggccgctgcaacgtaaccaatggccatcaccttgagcccatgggactggcgagaaattatccaagggggaacaaggagctccgaggatccttctttaccgctcacggtccgcaggataccatgcgctggttcacagatcacggtgtaaagcttaagacggaggacgatggcagagtcttccctgtcactgacaattcagcttcagttgtagactgtctactgaacgaagcaagaaggcttggggtttctctgcaggccggcaaaactgtgtctagtgcatctgttgctcaagacgggaagtttgttctcaaggtggagaagcgtactgccgatcttgttgattatatcaacgctaattacatcttggttgctacaggtagcagccaacatggctattcaatcgctgcacaactcggtcattccattattgcaccagttcccagcttgttcacatttaaaatcgcagacaagcggctggctgatctcgccggggttacatttccaatagtcaaagcaaaactgaagctagatggtgttcaaaaaagtgttcccgagttaactcaggtgaacatgccatttcttttcagcaattggcgggctcttagagaggtagtcaactggttatacacatcgcttgcaacaagtgacttgtctttacagactgggcctatgttagtaacacactgggggcttagtgggcctgttgtgctgcgattgtcggcatggggagcacgtgagctacatcagtgcaactaccaaggaaatcttatggttgactttgtacctgatattcatatcgaggacgtgaagcgcgtcctattccactacaaagatcagcatgcggtccatttctttctttgtagcttttcctttacccactaaagtttgtgccataaatcttcaaaagaatctaaatctgtcgccggtttaactactcttgatttgccttttctttaatgagctgaaaaaagtgttctcgagtctgcaatagttatgtgtcttactactaattatttggcttgctgagatgatctttgactttgccagcaggaataataattgcagcttcctggtctatcacattcgaatacttttaccaaagttttaaacgcccttcaaaatcatgagagaaatattctaacagttaaatgaataaataatgatgaatttgaactgcagaagcacaaagtgagtaacacgttccccacggagtttggcctggtgaagagattttggagattcctgctagaacaggagagtttaaatggtgatacacactgggcctccatgccaaataatcatctaaacgcagtggccttccggttgaaacaatggacgtttgaggttgttggaaagggccaatttaaagatgaatttgtgactgcaggaggtgttccaattacagagatatcgcttggcactatggaaagcaagaaacagccaaacctgttctttgcaggagaggttcttaatgttgatggggtcacaggcggattcaattttcagaatgcatggaccggtgggtatatagctgggacaagcataggcacattggcatcgactagcaatctcccagagcagcagtcatgtttccagttgtaactgggagtttcagagaaggaaatggattgagttatgaaagagactcctcagatcatctgggaatgattcagggataccaacaagtttgcaatcaagataaggatattccaagatgaccaggatcagggagctacaattgctactgaattgtaacactaacctaagatggggtacatatgacaagaccgcacgattttggttacaatctaggtgtacaaagtgcaatctggaacgataatagttacaatcgagttaaacaagttgtgatttgtacttgaccgatcagagtgtgcatccagctatgattcttctgtctcaattaataatcatcaatttttttcaacaacattacctgtcagcactcagcagcgactgtcactggctaattgagagaaaatttatcttgagagaaaatttatctcaagctaaacgaaaaaatccatctctaaatgttatcacaatcacaataaatagtttccaagcatagactatccggctaccaaactacacctggcctgactaaatcagagcgaactatatatggtgcgcatcttatattcattccaagctgattcttccacaaaactgtgcaagcttacaataaatgcatgcgctcaacataaggattgtgcaaccacttgttgagtggctccccgcagccgacaaagcagccagtatttccacgggtggtgaagaatggggattcaaagaggtttagaagcttttgaatcgattgcctaaccagcgaagatccagttaccctgctcctcctgccccagccagtgacaatgtcaattctttcaggaccagtgcccaatgtcagaacctgcctatggaaccaggcaagcgtcctggacagtgcagtcactgctgtgccctcagacatcagatgaaggttgatgagccaatacgacgagctcttctcccttacagaatctgggtacacgttcttctgtgcagcaacctcccatataaagcctgcttcctccttgagaccggacttgtgcaagaagtctatgacagcatccattagaccccttttactctctctgtcctcactgtgcatcatgtccaagaaataaccagtgtgatccctgacgttctggccaccagcttctgcatcaggcaagtacagcaggaacatgtgagctggatgtccagtgatggccatgagctggcagcacaaacccatctgtgcctgacccacggtgcagcagctgagtagcagggtgtaagtctgcacagatggaacaagcccccgagcaagcatgttctggagcacgatgtaggcatcttgaaatctgttcatcttcaggaaagcactcaagagcgaattgcaggtcggcacgttaggctgcaaaccatcctgaagcatcgcttggtaccatcctagcgctttgtcaacattgccagctttgccccagagatcgaccaaaagtccatataccggctcatcaggagcccaatcacgcctcatctcaataaaaaccgcctcagcctcatccagatggccgcaatgaccaagaacttccataacgatgctaaacatgtgatgaaggtgaacatacactgacgggtgcaagcacaaggtcaagaagcttcttcggaagatcgaag

SEQ ID NO: 213784 - DNA, 522 bp, Zea Mays
cgcgtccacgcgcaaccgccggtgtcacgcatcgcgtagctacataattctgcaccatgcatcgccaccaccgccccgccccgtcctctctccatcggccatctctggcgcatgatcgaaccgcacgaccgaggcagcaagtgactcgcagacagcaccatgcaggcgatgcgtccggccgcggagggggaggcacaggagcaggcggtgagggcggaggcggacgaggtgaagagggaggtggcgaaggcgcacgaggaggaggaggcggtgcctgaggagaaagacgtggcggttgtaggggaagaggcggaggcggaggcggagacggagactgaaggcgaggcggaggcagaggtcgaggtcgaggccgaggtcgaggtggaggcggaggccggtgcatcgtctgcgaagaagaaccgtatccaggtgtccaccaacaagaagccgctctatttctacgtcaatctcgccaagaactacgacgaggttgagctctccgctctggggatggccattggt

SEQ ID NO: 213785 - DNA, 1533 bp, Zea Mays
cgacaccatgccctgttccttaccacggtccacggatgagtactggtttcgcgtttcctttgcaaatttctcttggttctgctctacgtttctggtgcttgtcttgaggacttgaggggctcacatggatactccccgagcgcttcgccaactctgagatcgcaccggaagcagtatatgcactactgggtattgtgagttctgtcaatcagcacataattgatgcgcccactgagaatcactcatttgcctccaaggaacaatctatcccatggggtcttgttgtctctgtactaaaggatgtggaggcggttgttgaggttgctgcccagcactttgttggcgatgatcgcaagtggagctttcttgctgttacagaagcagtgaaagcaggtgtcaggttagctgcttttcgggagagtggatacaagatgctcttacaaggaggggaggtggtaaatgaagaagaggtgaccgttcttgaaaatagttatggagtaaatggtaatggagtaccagccatctatccgatggatggacatgcagaaaatggtcacaaaactatggccaagggtctggatggtaaaaatggatttgtatctaagagtcttgagaaaagagcagtagctgctttgaacaaatttggtgagaacgcaaagatgatgtctgatcctatgtggattcggaggctccaacctactcctgagccaactgtgatggttgccgagaagccaactttggcaagtatttggtctgctaaaggcggtactgggcgcttgtttgttttaggggaggttgttcacatattcaggccacttgtatatgtacttctgatcagaaagtttggaataaaatcgtggaccccgtggctagtgtcgctagctgtggaactcacaagtctaggcgtccattcccatgcaaccgatatgaatcacagattaggaaaagtgcatcagctcagttctgctgagagggatgagttgaaaaggcgaaagatgatgtgggctctttatgtgatgagagatcctttctttgccagttacagcaagcgtcacctcctgaaggctgaacaggttctgaatccggtgccattgattggcttccttacagggaaacttgtagagctactggaggggattcagacgagatacacgtacacatcaggttcatagagatggccaatctgagcctgctgctcgcctctcgatttgccctggcggacatgtgctttgtgcgagttggttgatggttaatggttaatggctaggaactggtgcttaatcctgaaacccgtactgctgtttttcttgccaactgtggcatcgtcgtcttgtggctgcgaagctgcagccacctcgttcgtgtatggcggcagatgagacaattcataatctaagtatatagatataaatagtagtattaccggtttgtttgtatttacgatttatcgtgaactgatggaacataatgtgtatacagcgaaaatttatctgattccaaacatttgttgtttaacagcgaaaattggatgcc

SEQ ID NO: 213786 - DNA, 1210 bp, Zea Mays
gttccttctctcccctgagaccaccaacgccggggccggaaaaaagggaagccagagcacagagccagacctggcggcgctggacatccaaaaacgccgccaaggatccttctctctctctctctctctctcttcgcgtccatcgacctgaccgcggaggcgcgtgcttcttcttcccgctctccactgtcatgaagattgagggaaacttgcatgtttgatatacccagctgctttctgtaacgaaaaactcgtgatcattttgttgaattggtcactgtcagggagggatctacttgtcagtttttggtattaaggctgctggccttcccttgcagggtatctgtagaataaatgggagaagcacactcggatgaattttgccattgccaggggtgtgctggcaagtatgcactactcagagacgaagaaaacccacgattggcaatctttgagaggcggctgccttgctgtggttgtgggataggatggtctacgctctcatcttcacagttctggcaattatcgctctctctgtggcactgataatctgtgtatacaagtagtacccaaagcgaggaaaacgcggtcgctggacctggaattcagaagaaacttgtaatttgagtgatagtagcatgcctttgcagtcatcctacatgcatcagtatcactatagcaagttgttgaattaaatgctgctaccgtcccggttgaccagtcggctgccgttgtttatcaacgaggatgttcattgctctatctcaaactgtgtgctccatgacctgtgatgcttctgaactcctgctgtcttggcgaccttcagaagcaattttctccagtttctcccagaaggagaaaggcaatggcaaagcagcaactagctctagctgggccctctgccatggtgacgcaaaggataacacaagtacgcaacgccgcatgagttggtgtctggctttgtcaagtgtccctctcgcggtgcctgtctcctttcacttgtggagcacggtgagctcgcaaattcgttcactgcaaaagagcctgctgtgacccccctgaaaccaacctctgtcgatgggcgaaacaatcaggcctttagctttcaggaggaaacaagtggcacatttggtatggcttcagcttcggttaccgtccataaaaaaagcgttggccatctaaaaaaacggctcctcgcaaggggcagaga

SEQ ID NO: 213787 - DNA, 1215 bp, Zea Mays
gttccttctctcccctgagaccaccaacgccggggccggaaaaaagggaagccagagcacagagccagacctggcggcgctggacatccaaaaacgccgccaaggatccttctctctctctctctctctctcttcgcgtccatcgacctgaccgcggaggcgcgtgcttcttcttcccgctctccactgcagtgtcatgaagattgagggaaacttgcatgtttgatatacccagctgctttctgtaacgaaaaactcgtgatcattttgttgaattggtcactgtcagggagggatctacttgtcagtttttggtattaaggctgctggccttcccttgcagggtatctgtagaataaatgggagaagcacactcggatgaattttgccattgccaggggtgtgctggcaagtatgcactactcagagacgaagaaaacccacgattggcaatctttgagaggcggctgccttgctgtggttgtgggataggatggtctacgctctcatcttcacagttctggcaattatcgctctctctgtggcactgataatctgtgtatacaagtagtacccaaagcgaggaaaacgcggtcgctggacctggaattcagaagaaacttgtaatttgagtgatagtagcatgcctttgcagtcatcctacatgcatcagtatcactatagcaagttgttgaattaaatgctgctaccgtcccggttgaccagtcggctgccgttgtttatcaacgaggatgttcattgctctatctcaaactgtgtgctccatgacctgtgatgcttctgaactcctgctgtcttggcgaccttcagaagcaattttctccagtttctcccagaaggagaaaggcaatggcaaagcagcaactagctctagctgggccctctgccatggtgacgcaaaggataacacaagtacgcaacgccgcatgagttggtgtctggctttgtcaagtgtccctctcgcggtgcctgtctcctttcacttgtggagcacggtgagctcgcaaattcgttcactgcaaaagagcctgctgtgacccccctgaaaccaacctctgtcgatgggcgaaacaatcaggcctttagctttcaggaggaaacaagtggcacatttggtatggcttcagcttcggttaccgtccataaaaaaagcgttggccatctaaaaaaacggctcctcgcaaggggcagaga

SEQ ID NO: 213788 - DNA, 1284 bp, Zea Mays
gttccttctctcccctgagaccaccaacgccggggccggaaaaaagggaagccagagcacagagccagacctggcggcgctggacatccaaaaacgccgccaaggatccttctctctctctctctctctctcttcgcgtccatcgacctgaccgcggaggcgcgtgcttcttcttcccgctctccactgtcatgaagattgagggaaacttgcatgtttgatatacccagctgctttctgtaacgaaaaactcgtgatcattttgttgaattggtcactgtcagggagggatctacttgtcagtttttggtattaaggctgctggccttcccttgcagggtatctgtagaataaatgggagaagcacactcggatgaattttgccattgccaggggtgtgctggcaagtatgcactactcagagacgaagaaaacccacgattggcaatctttgagaggcggctgccttgctgtggttgtgggataggatggtctacccatactttactgctgcaagtactacaacaaggatcctcgagagcgccctggtctagctgcatcagctgttgcggctctcatcttcacagttctggcaattatcgctctctctgtggcactgataatctgtgtatacaagtagtacccaaagcgaggaaaacgcggtcgctggacctggaattcagaagaaacttgtaatttgagtgatagtagcatgcctttgcagtcatcctacatgcatcagtatcactatagcaagttgttgaattaaatgctgctaccgtcccggttgaccagtcggctgccgttgtttatcaacgaggatgttcattgctctatctcaaactgtgtgctccatgacctgtgatgcttctgaactcctgctgtcttggcgaccttcagaagcaattttctccagtttctcccagaaggagaaaggcaatggcaaagcagcaactagctctagctgggccctctgccatggtgacgcaaaggataacacaagtacgcaacgccgcatgagttggtgtctggctttgtcaagtgtccctctcgcggtgcctgtctcctttcacttgtggagcacggtgagctcgcaaattcgttcactgcaaaagagcctgctgtgacccccctgaaaccaacctctgtcgatgggcgaaacaatcaggcctttagctttcaggaggaaacaagtggcacatttggtatggcttcagcttcggttaccgtccataaaaaaagcgttggccatctaaaaaaacggctcctcgcaaggggcagaga

SEQ ID NO: 213789 - DNA, 1413 bp, Zea Mays
gttccttctctcccctgagaccaccaacgccggggccggaaaaaagggaagccagagcacagagccagacctggcggcgctggacatccaaaaacgccgccaaggatccttctctctctctctctctctctcttcgcgtccatcgacctgaccgcggaggcgcgtgcttcttcttcccgctctccactactgcggcggtcagaattacagctaaatgttgtagacgggcaactgtgcttccaaacttgaaatctgacggcaggacaggcaagtgtcatgaagattgagggaaacttgcatgtttgatatacccagctgctttctgtaacgaaaaactcgtgatcattttgttgaattggtcactgtcagggagggatctacttgtcagtttttggtattaaggctgctggccttcccttgcagggtatctgtagaataaatgggagaagcacactcggatgaattttgccattgccaggggtgtgctggcaagtatgcactactcagagacgaagaaaacccacgattggcaatctttgagaggcggctgccttgctgtggttgtgggataggatggtctacttttcttttaggtttcttgtgtcctttgatttggtactttgcagccatactttactgctgcaagtactacaacaaggatcctcgagagcgccctggtctagctgcatcagctgttgcggctctcatcttcacagttctggcaattatcgctctctctgtggcactgataatctgtgtatacaagtagtacccaaagcgaggaaaacgcggtcgctggacctggaattcagaagaaacttgtaatttgagtgatagtagcatgcctttgcagtcatcctacatgcatcagtatcactatagcaagttgttgaattaaatgctgctaccgtcccggttgaccagtcggctgccgttgtttatcaacgaggatgttcattgctctatctcaaactgtgtgctccatgacctgtgatgcttctgaactcctgctgtcttggcgaccttcagaagcaattttctccagtttctcccagaaggagaaaggcaatggcaaagcagcaactagctctagctgggccctctgccatggtgacgcaaaggataacacaagtacgcaacgccgcatgagttggtgtctggctttgtcaagtgtccctctcgcggtgcctgtctcctttcacttgtggagcacggtgagctcgcaaattcgttcactgcaaaagagcctgctgtgacccccctgaaaccaacctctgtcgatgggcgaaacaatcaggcctttagctttcaggaggaaacaagtggcacatttggtatggcttcagcttcggttaccgtccataaaaaaagcgttggccatctaaaaaaacggctcctcgcaaggggcagaga

SEQ ID NO: 213790 - DNA, 2916 bp, Zea Mays
ccaaggcgcaacggcaacaaaaactagagaggagaaataagaaaaacggcctagccctatcctaccaaaaataatctgaacaaacttccaaatcctccttggaacagtcaacagccaaacccccaagaacacaccgtctcatcccagagtcccggcttccgatctcttcccttccccccgccgccggaaagatcccggctttttgggttccgcggcgagggataggccccaagaaggaggagggggcctcacggcggcggccttgcggtcgatgcgatcggttgacgcggcgggggcggagagctcggatcaccacaacctcaagaagccgcgcctggaacccaggaccaagatgccgctcgcggatgccgttgcggccggtgacagcggcgggggtgtggatgccgcggcggcgggcgccgacttctttggcatgacggtcgaggagatcgtgcagcacccgctgccgggatacggggcgccggcggttctcagcttcagccccgacgaccgccgggtcgcctacctatacagccccgacggcacgcttcaccgtaaggtgttcaccttcgataccgcgcggcgttgccaggagttgctcttcgggccccccgacggtggcgggctcgaggaggggaacctctccgccgaggagcgtctgcggcgcgagcgcgcacgggagcgcggcctcggggtcacccgctacgagtggcgctctcgccattctggtgaatcctcacgcgccggcattgtcgtgccgctcccatccggggtttacttccaggatttatctggctctgaaccagtgctgaaactacgaagttctcccacatctccgataattgacccatttctatctccaaatgggagcatgattgcatacgttagggatgacgaactgcatacgatggggttttccaatggagaaactaggcaattaacttacggtgcaagagaaaataggaaggtccacgggcttgctgagtatattgcacaggaagagatggaaaggaaggtgggattttggtggtctcctgacagcaagcaccttgcatttactgaagtggattcaacagagattccactgtatagaattatgcatcagggcaaaagttctgttggtccagatgctcaagaagaccatgcgtacccttttgcaggagctgctaacgttaaagtgcggcttggtgttgttcattcccatggaggggaagtaacttggatggatctcctttgtggagatccaaatggtccccatagtgatgaagaatatttagctagagtcaactggatgcataatagtgctcttgctgttcaagttctcaacaggtcacatacgaaacttaaattacttaagtttgatattagtacaggtgaaagagaagtcttactagaagagcagcatgatgtatggatcacattgcatgattgcttcactccactagacaaaggagtgaataataaacatccaggtggctttatttgggccagtgaaaaaacaggattcaggcatttatatgttcatggcaatgatggagcatgcttaggacctctcacacaaggtgattggatggttgagcacattgctggtatcaatgagagtaatggacttatatatttcactggaacattggatggaccattggagacaaatctctaccacaccaatctctttccagattggagccttcccttgcaaacccctaaaaggctgactcgtggaactggccggcattcagtaattctcgaccatcagttgctgaagtttattgatgtgtatgacacagcaaaatctccacctgtgatcttgctgtgctctttgcttgatggaagtgtaattatacccctgtttgagcagccactgactattccgccacttaaaaagttccagcagttgtctccagagatagttgaaattacagcgaaggatgggaccaatttatatggcgctctctaccttcctgacgagagaaaatatgggccacctccctacaaaacactggttaatgtttatggtggccccagtgtccagcttgttagtgattcatggatgtgtacagttgacatgagagctcaatatctacggagcaagggtatattagtttggaagatggataatcgaggatcggcaaggcgagggctgcattttgagggacaactgaagtacaacattggtcgtgttgatgctgaagatcaattagaaggggctgagtggttaataaagaagggccttgcaaaacctggccatattggtatctatggctggagctacggaggatttctctcagcaatgtgcctcgcaaggtttccagacacattctgttgtgcggtgtctggtgctccggtaacagcatgggatggttacgacaccttttacacagagaagtacttgggtctgcccgcggagcatccggatgcttacgagtacgggtcaataatgtaccacgccaagaacctgaaagggaagctgctcctcatccatgggatgattgacgagaacgtgcatttcaggcacacggcaaggctcatcaactcgctaatggcagagggcaagccctatgaaatcctccttttccctgacgagaggcacatgccacgacgccttggtgatcggatctacatggaggagaggatctttggttttttcgagaggagcctttgagagggcgtttgtataaatttgttgcccacatctgggctgtgattgggatgtttttggcatatggattcaggtttcagaataagcaaaaacttcatatcattgtggtacctctgatgaagtttattttctccggtaaagtagggaactctatgatatctgtgctctctttaatttatatttgatatcactagcgcagttatcttaatttatatcattgtggtacctacgatgacggtggaatggtaagattagat

SEQ ID NO: 213791 - DNA, 2773 bp, Zea Mays
aacggcctagccctatcctaccaaaaataatctgaacaaacttccaaatcctccttggaacagtcaacagccaaacccccaagaacacaccgtctcatcccagagtcccggcttccgatctcttcccttccccccgccgccggaaagatcccggctttttgggttccgcggcgagggataggccccaagaaggaggagggggcctcacggcggcggccttgcggtcgatgcgatcggttgacgcggcgggggcggagagctcggatcaccacaacctcaagaagccgcgcctggaacccaggaccaagatgccgctcgcggatgccgttgcggccggtgacagcggcgggggtgtggatgccgcggcggcgggcgccgacttctttggcatgacggtcgaggagatcgtgcagcacccgctgccgggatacggggcgccggcggttctcagcttcagccccgacgaccgccgggtcgcctacctatacagccccgacggcacgcttcaccgtaaggtgttcaccttcgataccgcgcggcgttgccaggagttgctcttcgggccccccgacggtggcgggctcgaggaggggaacctctccgccgaggagcgtctgcggcgcgagcgcgcacgggagcgcggcctcggggtcacccgctacgagtggcgctctcgccattctggtgaatcctcacgcgccggcattgtcgtgccgctcccatccggggtccacgggcttgctgagtatattgcacaggaagagatggaaaggaaggtgggattttggtggtctcctgacagcaagcaccttgcatttactgaagtggattcaacagagattccactgtatagaattatgcatcagggcaaaagttctgttggtccagatgctcaagaagaccatgcgtacccttttgcaggagctgctaacgttaaagtgcggcttggtgttgttcattcccatggaggggaagtaacttggatggatctcctttgtggagatccaaatggtccccatagtgatgaagaatatttagctagagtcaactggatgcataatagtgctcttgctgttcaagttctcaacaggtcacatacgaaacttaaattacttaagtttgatattagtacaggtgaaagagaagtcttactagaagagcagcatgatgtatggatcacattgcatgattgcttcactccactagacaaaggagtgaataataaacatccaggtggctttatttgggccagtgaaaaaacaggattcaggcatttatatgttcatggcaatgatggagcatgcttaggacctctcacacaaggtgattggatggttgagcacattgctggtatcaatgagagtaatggacttatatatttcactggaacattggatggaccattggagacaaatctctaccacaccaatctctttccagattggagccttcccttgcaaacccctaaaaggctgactcgtggaactggccggcattcagtaattctcgaccatcagttgctgaagtttattgatgtgtatgacacagcaaaatctccacctgtgatcttgctgtgctctttgcttgatggaagtgtaattatacccctgtttgagcagccactgactattccgccacttaaaaagttccagcagttgtctccagagatagttgaaattacagcgaaggatgggaccaatttatatggcgctctctaccttcctgacgagagaaaatatgggccacctccctacaaaacactggttaatgtttatggtggccccagtgtccagcttgttagtgattcatggatgtgtacagttgacatgagagctcaatatctacggagcaagggtatattagtttggaagatggataatcgaggatcggcaaggcgagggctgcattttgagggacaactgaagtacaacattggtcgtgttgatgctgaagatcaattagaaggggctgagtggttaataaagaagggccttgcaaaacctggccatattggtatctatggctggagctacggaggatttctctcagcaatgtgcctcgcaaggtttccagacacattctgttgtgcggtgtctggtgctccggtaacagcatgggatggttacgacaccttttacacagagaagtacttgggtctgcccgcggagcatccggatgcttacgagtacgggtcaataatgtaccacgccaagaacctgaaagggaagctgctcctcatccatgggatgattgacgagaacgtgcatttcaggcacacggcaaggctcatcaactcgctaatggcagagggcaagccctatgaaatcctccttttccctgacgagaggcacatgccacgacgccttggtgatcggatctacatggaggagaggatctttggttttttcgagaggagcctttgagagggcgtttgtataaatttgttgcccacatctgggctgtgattgggatgtttttggcatatggattcaggttttctcattcacacctgtatttatcactagcgcagttatctttgattcttttgccagtcttggatggttatcagctgtttggctgcgtttacaggtttcagaataagcaaaaacttcatatcattgtggtacctctgatgaagtttattttctccggtaaagtagggaactctatgatatctgtgctctctttaatttatatttgatatcactagcgcagttatcttaatttatatcattgtggtacctacgatgacggtggaatggtaagattagat

SEQ ID NO: 213792 - DNA, 930 bp, Zea Mays
tatagtcacttttatctttcatctcgagatggataatcgaggatcggcaaggcgagggctgcattttgagggacaactgaagtacaacattggtcgtgttgatgctgaagatcaattagaaggggctgagtggttaataaagaagggccttgcaaaacctggccatattggtatctatggctggagctacggaggatttctctcagcaatgtgcctcgcaaggtttccagacacattctgttgtgcggtgtctggtgctccggtaacagcatgggatggttacgacaccttttacacagagaagtacttgggtctgcccgcggagcatccggatgcttacgagtacgggtcaataatgtaccacgccaagaacctgaaagggaagctgctcctcatccatgggatgattgacgagaacgtgcatttcaggcacacggcaaggctcatcaactcgctaatggcagagggcaagccctatgaaatcctccttttccctgacgagaggcacatgccacgacgccttggtgatcggatctacatggaggagaggatctttggttttttcgagaggagcctttgagagggcgtttgtataaatttgttgcccacatctgggctgtgattgggatgtttttggcatatggattcaggttttctcattcacacctgtatttatcactagcgcagttatctttgattcttttgccagtcttggatggttatcagctgtttggctgcgtttacaggtttcagaataagcaaaaacttcatatcattgtggtacctctgatgaagtttattttctccggtaaagtagggaactctatgatatctgtgctctctttaatttatatttgatatcactagcgcagttatcttaatttatatcattgtggtacctacgatgacggtggaatggtaagattagat

SEQ ID NO: 213793 - DNA, 3165 bp, Zea Mays
gcttcctgagaagaagagcttttcaattgattatttcaggtgaattctcgccaaatcccgttcatctggtcactatctgcttgcgtcgtgtctagggagggatggctaagtttgcagacgtcctctgtgcagttacactacttgtgttgctcccctgctcggatgttgcattggggcagactactgacccttccgaggtcaatgggctcagggctatcaagggacgattagttgatcctatgcaaaaccttatgaattggaataggggagatccgtgcaggtcaaattggacaggagtcttctgccacaaagtgaatgatgatacatttcttcatgtgacagaattgcagttatttaagaggaatctctcaggaactctggcaccagaggtcagccttttatctcatctgaaaacactggattttatgtggaacaacttaactggtagcatcccaaaggaaataggcaacatcactacgctcaaacttatacttttgaatggcaatcaactctctggtattttaccttatgagatcggtaaccttcaaagtttaaacagattacaggttgaccaaaaccaattgtccggccccatacctaaatcattttccaatttaagaagtgtgaaacgtcttcatatgaacaataattcgttaagtggggccatcccgtctgaactttccacattgcctcttcttcttcacctgcttgttgacaataacaacctatctggacctctccctccagaatttgctgaagcgcctgccatgaaaatatttcaggctgataacaataacttcagtggaagttccatccctactacatataacaacatatccacactactaaagctgagtcttagaaattgcagcttgcaaggagatattccagatttgagtagcatacctcaacttggctatttggatattagctggaaccagttgacaggatctataccaactaataagctcgcttccaatatcactacaattgatttgtcgcacaacatgctcaatggaactatcccacagaacttctcagggctccccaagcttcagatattgtcacttgaggataattatctaaatggttctgttccctcgacaatctggaatggcatcgagcttactggaaatagaagccttattctagacttccaaaacaattctctcaagacaattccggacacatttgatcctcccccaaataccactgtaatgctatatggaaaccctgtgtgtgggggtacgaatggatctctgataaccaacctgtgccaacccatgtcagtaaacatgcaaacatcgcaaaatgaacatggctctagttgtcaaccttgtcctgcggataaaaattatgagtacaatccatcatcaccactaacttgcttttgtgcggtgccacttggagtcggacttcgtctgaagagtccaggaatcacagattttcgtccctatgaagatgactttgagatcaacttaacctctttattgcaactgtttcggtatcagttaagtattgaacgctacatatgggaggttggtccaaggctaaatatgcacatgaagttatttccaagtaattcaagtctattcagtatatctgagattgtgcaactcagacatgtacttgctgcctgggaaattaccctttcagatgtatttggtccatatgagcttctcaacttcacactaggttcttatgcagatgaatttccaaatgcagtgtcaacaggtttaagtaaggctgcactgggcagtatctttgctagcacaattgctggcgctattttactttctgtggtagctaccacccttatagtgagaaggcgttcaagacacagagctgtctcaaaacgttcattgtcaaggttttctgtcaaagttgatggcgttagatgtttcacatttgaagaaatggctatagcaacaaataattttgatctatcagcccaagttggccaaggaggttacggcaaagtctacaagggaattctaggcgatggagcacttgtagcaatcaaacgagcacaccaggattcccttcaaggttcaagggagttctgcacggagatagagctactatcaagattgcatcatcgcaatttggtttcattggttggctattgcgatgaagaggatgagcagatgctggtttatgaattcatgtcaaatggcactttacgtgatcatctttctgccaagtccaagagacctctaagttttggtttgaggttgaaaatcgcattgggtgctgcaaagggaattttgtatctacatactgaagcagatccacctatattccaccgtgatgttaaggccagcaacattctgttggactccaaattcgttgcaaaggtagccgattttggtctctcgaggcttgctccagtgccagatgtcgaagggacattgccagctcacgtatccactgttgtcaagggcaccccaggctatcttgatccggaatacttcctaactcacaaactgaccgacaagagtgatgtttacagcctgggtgtcgtgttccttgaaatgttaactggtatgaaaccaattgagcatggtaaaaacatagtgagagaggtaaactcagcttgccagtcgggcgcagtttctggaataatcgatggccggatgggcttataccccccagaatgcatcaagaggttcttatcactagcaaccaagtgttgccagcatgaaactgatgacaggccttccatgtgggagattgtcagagaacttgagctcatcttgaggatgatgcctgaagaggacctgattctgctggaaacctcagagacagactcgaccgatgtcagtaagtcgttgtcatcttcagcgaccgggaccctcttcgtctcgtcacaggcctctgggagtcttgatgcgagcagcggcatgatctccggaagagtaactccccggtaggcatggtgtaatacttgtgaatatgcaagtttgttctgtaacattataggcttaccactcctaggacctgtcttttatgaattattcatattcagccgaacgtacagtagataatagcttatgatacacaggaacatagctggcattgcattctttacctttctaatatgttaatctgctttctgtaaggtagcgtttggttccagacccagtttgggatggaacagctcca

SEQ ID NO: 213794 - DNA, 812 bp, Zea Mays
caggatgttgcaccggtggcctggctgtagttgtcagtattgatcctcgacgggtatatgtcaaaagtcaagaagatgtgccatttaaaactgtaaaggtgtccactaaaggtccatcgggagaagaatatgcatggtaccagtgcacagtgaatggtggacgtgatagccgagctataggagcatatgaactagcgaaagctgtggaagaattgggcgcaggagaaatacttcttaactgcattgattgtgatggccaaggttgtggatttgacatagatttggttaaaatggtttctgatgctgtgacaatccctgtcattgcgagcagtggtgctggagctgttcaacatttttctgaaatttttgagaaaacaaatgcttctgctgcccttgctgctggcattttccaccggaaagaggttcctatactagcagtgaaagagcatctggtcaatgctggtgtggaggtcagggtgtaacagggagatccttcggtttattgaaatattcttgtttgatgtcacaactgctatcagttctgtttctctgatgtcgcaactgctatcagatctgttggtggcagctggcagtgcataggcccctgtcgagaactgcagtttggtaataaattaataatgtgatgcttaacagattaagcatccgcttcttttgcttgtgtttctatttcccggtgtggattgaccgcctccgacctgtcttgcgtcatattcgtcagctttgtagcatgttaatgttggaggccacgttgctcattcagatagaacaaactaactagcgatgaaaacgag

SEQ ID NO: 213795 - DNA, 5099 bp, Zea Mays
gggagactggagcggaggcgggaggaggaggagggagaggggatcgagaggaacgcgcgcgaacagaagagaggaaggaagaggaggtggcaggctcggttccgcgcgcgccgacgtgagattccgggccgcacgtgcccgcagtgtgatagatatcatcttgaggtcttcataagtcagcaacctagagcagaaaatgtcagctccggaattcaggacttcttaccagcaatcccctgagaatgtcggtcaactcaaggtctgccaatgtgggtcgggcgactccaattttcagatcacaaataaatccgacggtggcgaaaattcaccaacaacttgtccaaactgtcaggtccttaagagtggaaatttactgctttcatctaaagggattggctggacagtatggaaaaagcgttggtttattcttacaaggacatcattagtgttcttcaggagcgatcctaatgttccccctcccagaggaagtgaaccaattgttacacttggtggaattgacttgaataacactgcaagtatgatagtcaaagaagaaaggaaacttataacagtcgtgtttcctgatggccgtgacggacgcactttcacccttaaggcagaaactacagaagacctaaatgagtggagaagtgcattggagaatgctctggctcaggcacccagtgttgtgaatacagcgggacaacttccagtagtcagcactgacataacagaacctgttgaagctgctgttgaacaatcagagaataagtctgtaattggcagaccagcagaatttgcacttgtcgatgctgatggcactacagcattcctgcagaaggccttaaagttcatcgaagattatggtgttaaggtcgaaggaattcttcgtcagtctgctgatgttgaagaagtcaaacgcagggttcaggattacgaaaagggaaagaatgagttctccccagaagaggatgcacatgttatcggtgactgtattaagtgcattcttcgagagatgccatcttctccaattccggcaccatgttgcactgccctggttagagcttaccgaactgacaagacaaaaagactcgatgctatgaatagagtgatatatgaagtattcccagaaccaaatcgtcaattgttgcagaggattctcaaaatgatgcagattgttggatcacacaaagctgtaaataggatgtcttcatctgctttggcagcttgcatggcaccgcttcttctccgtcctcttcttcttggtgaatgtgaaattgatagtgaattcagtatggctggggatggttcattccagttgcttcaagctgctgctgctgccaaccatgcccaagctattgttattattatgcttgaggaatatgatcagatatttgatgtacctgcttttccctggacgtgcttttctttgcaagcttgttctatttgaacccatactgtattgttatggattttaatccaacaattacctgtttaggatattgaagacggttcgtactcttcagatgcttataccgagtctgacattgacaaggaatattctacagacaatgacatccctgaagattatgatggctcctctggttctggtgaagatgttgaagaagatttgaatgatgatactgaacactcttatggcatgaaggtcgaatgtgatagtaacattaggattgataatgcaaatgataaggcaagaaaaggcttgccaacagaggaggatggctgttccagtgataacgacaaggctcatattacgaagcttgaaaacaagaagactcatctccaatctaaacttacggaggaggagaaagaaaatacagtcctccaggcaaatttagaaaaacgaaaagaagcattacacaagcgccgtgtagcacttgaaaaagaagtggaaaatttacgagaccagctactgaaggagagaagtttgagggcttctctggagtctgggctaatgaatatgcgaagaggacaagtgtccttcccctcaacgatagacaccaagactaaggctgatcttgaggaagttgctgccgttgaagctgatattatgaacttgaagcaaaaggtttctgatcttcggggacaactcaacaaccaagttcagttgagttccacctcgttatgtgaatcatgcaacaacaagcgatccataaatgcagacaagcttgtcgaaggtgaacaaaacgctgccctttctccacagattgcctcagtcgaagcaccacctattgtagggtcttattctgtacctgacatgttctgggctacaaaccaaatggttcagaagatgttgtattcaaagggtgagattgcgaaggatggccaagacggatcacttacatcaagatggaactttgcacagagaccacactcaaatagtccagtcatgagcagggttcaaggttccgatgcctattcaagtactaaaaccgaggaatctggaggcgcaccttcctctgcattagcgaagctgactacccgactcaactttttgaaagaaagaagggccttgcttgccagtgagatgcaaaacttagatctgggccgctcccaggcccagaggcatacagctcctccgaaagctgagactccaactgagaagtagaatcgttttactgcatcgttgttaggccacaagctcaggcattcatgtcttcaccctgatgattcatatgtcaagttttttagcgacaccgacgaacaacctgattcttctttctgctggaaatcattactccggctaggccattgaggcccaacgtctatttattccgttatctaaaagcggcctaccgggcccgcaagaaaaggcccgctagggcgccgagacagcggaacgttctctgagtttgagcacgatctccccgggccccggcgccgccgtacgtcccccttcggcgtcgccagccgcctcctggctccggctccttcatcgcctgctccagcgtgcctgcgtgacataagcgtcgattgattggcgagaaaggggacgaatgcagccgccgttgcaggcgcagggagcaatggctaacgtcgccgctatcctcaccgtcccctgctccgcgggccgccgcccgaagcggagcagccagccccgcggatgcggctccgtctccgtctccgtctccgtccgtgcgtcctccggcgcaaacacggtgactctgctggactacggcgcggggaacgtacgcagcgtgcgcaacgcaattcgctacctcggcttcgacatccgcgacgtgcagagcccggaggacatcgtcgccgcggaacggctcgtctttcccggtgtcggcgccttcggctccgccatggacgtcctcaacaggacgggcatggccaacgcactccgtgagtacatccaaagggaccgccccttcctaggcatctgcctcggtctccagctgctcttcgattccagcgaggagaacggcccggtgagcggcctcggtgtgataccaggcgtggtcaggcgattcgactcctcaaatggcctcatagttccacatattggctggaacgctctccagatcaccaaggacacaccactgttgcagggagctgatggccagcatgtgtactttgttcactcctaccgcgtactgccttcagatgctaatagaaactggatttcctccatatgcaactatggtgacagctttatatcctccatctcaatgggcaacattcaggcagttcaatttcacccagaaaagagtggagctaccggactttctattctaaaagaatttctcagacctaactctcttgggaccaaggtcccagcacgtaggaaagcatcaaaacttgcgaagagagtgatagcatgccttgatgttcgttcaaatgataaaggagatcttgtggtaacaaaaggcgatcaatatgatgtaagagatcatactagcagcaaagaggtaagaaaccttggcaagccagtcgatttagcaagccagtactacatagacggtgctgatgaggtcagcttcttgaatataactggtttccgtgactttccattgggtgatttgccaatgctagaggtactgcgttgtgcctctgaaaaggtttttgtgccacttacagttggtgggggcatacgagacttcacagatgcaaatggaagatactactcaagtttggaggtagcatcagaatatttcaggtccggtgctgacaaaatttcaattggaagtgatgctgtttatgctgctgaagcctttttacagactggtgtaaagacagggaaaagcagcttggagcaaatctctagagtatatggcaatcaggctgtagttgtcagtattgatcctcgacgggtatatgtcaaaagtcaagaagatgtgccatttaaaactgtaaaggtgtccactaaaggtccatcgggagaagaatatgcatggtaccagtgcacagtgaatggtggacgtgatagccgagctataggagcatatgaactagcgaaagctgtggaagaattgggcgcaggagaaatacttcttaactgcattgattgtgatggccaaggttgtggatttgacatagatttggttaaaatggtttctgatgctgtgacaatccctgtcattgcgagcagtggtgctggagctgttcaacatttttctgaaatttttgagaaaacaaatgcttctgctgcccttgctgctggcattttccaccggaaagaggttcctatactagcagtgaaagagcatctggtcaatgctggtgtggaggtcagggtgtaacagggagatccttcggtttattgaaatattcttgtttgatgtcacaactgctatcagttctgtttctctgatgtcgcaactgctatcagatctgttggtggcagctggcagtgcataggcccctgtcgagaactgcagtttggtaataaattaataatgtgatgcttaacagattaagcatccgcttcttttgcttgtgtttctatttcccggtgtggattgaccgcctccgacctgtcttgcgtcatattcgtcagctttgtagcatgttaatgttggaggccacgttgctcattcagatagaacaaactaactagcgatgaaaacgag

SEQ ID NO: 213796 - DNA, 2446 bp, Zea Mays
aaaactggctctcttcacaaggcacatccctcttcactctctcctccgtcgtcccgtcactcgtcagtcctcgctctcttcactcgctgaaaggcaggctggtggagtggaagcgcttcactccccttcgtgccaccccagcccatcgccttccactggactcatctgcttggcactcctcgccccgtgcttggattcttgcacttggtgcttcccttctcctacctcacatcacccgcccagatccaatccacacgagatttgcgacgctccggcctcccggcacgaagcctttctagggatcgccactcgccacacgccggccggggcgaaaaaagctcttcttggagcccttctgcttggcctctccctctcttctctcccggcgtcattgtcgccgctgcctgcgagcaacaacaattatggccgccgcgacgtcgcgcgggccagcgtcggtcgccatctgtgcgctcgccgtgctccacgcaatggctgcgctgtgcgactccgccaccgcggcggcggcgacgtgcgcgggcctggccccggccaagcaccggccggaggtgatatccatcgccgacttcggcggcgtgggcgacgggcggacgctgaacacgtgggcgttccgcaaggccgtgtaccgcatccagcaccagcggcggcgcggcggcacgacactgcacgtgccggccggcacctggctcgccggcagcttcaacctcaccagccacatgacgctcttcctcgccagaggcgccgtgctcaaggccacgcaggacacgaggggatggccgctggtggagccgctgccgtcgtacggccggggcagggagctgccgggaccacggtacgccagcttcatccacggcgacggcctccgcgacgtcgtcattacaggtgagctgagcctcgccttcccttgctcggctaggcttcctcctctgcctactgctctgtcaatatgttgcttactactgtgtgcccgtgagtatcctctatctatctgggaggacaaaaaggctgacatgcacaaggtctccttcctcgtcggagaagactgaatcctgcacaaacatatatttgccatactactgccatagtgcgtaccacgcgtccactccaaaaggttcacaaggcagcacgggactttgtataaattacttactactggatcacaatcacaacacacttttgtcagtgctttgcttaaactaaattctgaggcccataccatactcctagctagatactagctggtgacaggggagtcatcgacgggcagggtgaggtgtggtggaacatgtggaggaggcggacccttgagcacaccaggccaaaccttgtggagttcatgcattccaccggcattcacatctccaacatcgtcctcaagaactcacccttctggaacatccatcctgtttactgcgacaacgtggtcgtaaccaacatgatgatcttggcaccacgtgactccccaaacacagacggagtcgatccagactccagctccaacgtgtgcatcgaggactcgtacatatccaccggcgacgacctggtggccatcaagagcgggtgggacgagtacgggatcgcgtacgggcggccgagcgccggcgtcacggtccggcgcgtgaggggctcgtcccccttcagcggcatcgccatcggcagcgaggcctccggcggggtgcgcgacgtcctggtggaggactgcgccatcttcgacagcggctacggcatccacatcaagaccaacgtcggccggggcggctacatccgcaacgtcaccgtcgacggcgtgcgcctgaccggcgtgcgcagcggcgtccgcatcgccggcgacgtcggcgaccaccccgacgcgcacttcagccagctcgccgtgcccacggtcgacgccgtgcgcatcagcaacgtgtggggcgtcaacgtccagcagcccgggtcactggaggggatccgggcctcgcccttcacccgcatatgcctctccaacgtcaagctcttcgggtggcggagcgacgccgcctggaagtgcagggacgtgcgcggcgctgcgctcggggtgcagccgtcgccctgcgccgagctcgccaccagcttcgcgtccgcacggtcctcatgcagctagttagtgtagtgatgcctagctaattaatttctgaattctgatgatgggtgtgcttttaagtttgggctttgttttacttattctatggcaccgatgtctgtctgtctgtctttgcttgctcaatcacttactttaggcttccactgctaaagtgctaatcgttcagaaaaccttaccactgcaaataattttgtactccctacattctaaattataaaatatcttagtatttatagatacattaatgtagctataaatttaaaacaactaagatgttttataaattgaaacgaaggaactaatactctt

SEQ ID NO: 213797 - DNA, 1097 bp, Zea Mays
ctctctatactaatacggagtacttcggtagaaaagaattctaaaatccacacacaccattcgctctctcgctccactctctctctcgccgagtgagggaaggagggagagagaggaggcagggaagtggggagagcggcgaggacatggcggcgaaagcgagcagagcagccgcctccggcgcggcctacgaggagcagcgcaagaagcgggtcctcgagaacctcaagcatctggaggatttgggtatagcggagatgtctaagagcctgctccaggcggcgcgcctgcagaaactgaacaaggtgctggtcgcacgtacaccgcttgcacctcgcgcgcgcgcaatacgggctagtgtggtgatgctgtgttgagctgttgtgattctggttgcaggccggcgtgcgcgcgggccccaaggagaggaagaagttcgacgccaccgaggtgcggcgttcttcgagggcgaagaccacggtttcctacaaggacgatttcggtgaactagatgcttttctgcgtggcacaaggcgcagtggtggtaggaatacagaacatggaagagaatacactggaagaattccatcttatgaacagcaacaacgtgctttcagaaaagctgagaaacttcaagacagtctggaccctaataacccatcttttgttaagaccatggttcgatcacatgtgtcaagttgcttttggcttggtcttcctataagcttctgcaaaaataatctgccttccaaagaatttaggatggtgttggaggacgaagagggtcttgaatttgacgctgtctatattggaaaccgaactggtctaagtggtggatggaggggctttgcaatgcaccacaacctggaggaaggggattcattggtctttgaattggctgagcatgacaaatttaagatttatataataaaagctattgatgatgatgtgaaagaggctgagcctgatgacaagaatgacaatggtgttaccaaggaagagcctgaccaggaagaatcacctgttgctgagcctccaaaaggtgccaaaaggagaaaactccgaggacggcgtgggataaatacaaacccatcgca

SEQ ID NO: 213798 - DNA, 1317 bp, Zea Mays
gagaaaagatcgtaaccctaatcggacaaaatcgggctatcttcttcctatatatcccgtcgccgctgcctcggccgtttcatgtccaggtaaaaggaaaaatcgccccatcccctgactatcactggctcactgcccttccacctacaggttccaggttaagtttaagattgataaagattgccgtcctctccctgagagtagtctcaagcaagccatcaaggaaaattacaatgcaaagagcaaatttgatccagagctcaccacaaaacaagtccaaaggttacttttgctgtttaagcctgttagtgcacctcaatctgtttcaaataatcaccttggagaaaggcgccactatgaaaaacgaaggaagccacgccattttgaagaaaggcggcctattgaagcagcgcgtcggccacgatttgatgaggaaaggcgccctgcggttagacatgttccttttgaggatccatacagggcaccacgctatgctccagttcctgttgactctcagcatggccattctttggctagtgatcaccacagatattatcaaccagcacttacacctgagcctcggcagcttcctcttgttctagagcctcgatatgttccgccggccctagatcatcatcatgtgccagagcttcgacatgccccacctgcatattatcgcactttggctccatctggtgattcatactatcggtctgttgagaatctggtgcctgagcgatatgcagacagaaccatggctgacttgaccactagagatccaattattagggatcacacagcactaccaggggaggcacttgctcgagcagaccgcttggatgatctctaccgttctgatcgtgtggaggaactctaccgttctgatcgacttgttaaccgtgctgtggaccgccctcatccagcctattttacagctgcttatgagaccaaccctgcttatgctgaaacgagcattaggcctgtctctgcaagggtcaatggacccagtgcggcagtttcgtcactctattccttcagtggtggcccagtatatcggtaatgaatgatcatggctctgttgaaagccttagccagactaagaagacagggtattcgtctctttaactgcaactgttgtttgccttagcttctattcggtattttcttaaatatccttccctggatgaatgacattcgttatcaagacttgatggtctaaactgtcgaaattatgtactgtacttggcgtgctttgaagctcacttcgttctgtgaatggatcgatgcacgtattggtagcatttgcttgttctgccc

SEQ ID NO: 213799 - DNA, 2028 bp, Zea Mays
gagaaaagatcgtaaccctaatcggacaaaatcgggctatcttcttcctatatatcccgtcgccgctgcctcggccgtttcatgtccagcggccatggtgaagaagcccaacggtgtcgccaaggccacggcgacctctgctgacgcggcagcccagccatccaaggagaatccgtccacccctgggttggtcaaggcctcgaagtttaagaagagaaaggtcaaggccaaccgtgcgaagcaggcagtcgctgcagcagctattgacgaggtcgcccctgtaggtgcaggcactggtgatggcgatgcatctgcatcagcggctttaccgcaaccatccgatgttgccgaggcattacttgtggtgcaaacgccaaagtcaaccacttttgctgaggcatcacctgtggcacagacgcagaagccagccactgatgctgaaggattggtgcctgcaccaataccaaccactgctgtagcatcagcttcgtcgccaaagccaaaaccagctcaagctaatgctgatgctgcagctgcaatttctgccagcaagggcaatggtgtgggtgctgataatagtaggggtgatggtgagatgaagaacaagaaagagagggaagaaaggggtgaccgtaaggttgcagggtttatattcatgtgcaatgcaaagactaagaaggagtgctaccagagtcgcttgtttgggatgcctagtgggaagattgaaatggtcaagaagattaggccaggggtcaagctgttcctgtatgattttgacttgaagcttctgtatggcgtgtacaaggcagcatcacatggtgggctgaaccttgtccatgaagcatttaatgggaagttccctgcacaggttaagtttaagattgataaagattgccgtcctctccctgagagtagtctcaagcaagccatcaaggaaaattacaatgcaaagagcaaatttgatccagagctcaccacaaaacaagtccaaaggttacttttgctgtttaagcctgttagtgcacctcaatctgtttcaaataatcaccttggagaaaggcgccactatgaaaaacgaaggaagccacgccattttgaagaaaggcggcctattgaagcagcgcgtcggccacgatttgatgaggaaaggcgccctgcggttagacatgttccttttgaggatccatacagggcaccacgctatgctccagttcctgttgactctcagcatggccattctttggctagtgatcaccacagatattatcaaccagcacttacacctgagcctcggcagcttcctcttgttctagagcctcgatatgttccgccggccctagatcatcatcatgtgccagagcttcgacatgccccacctgcatattatcgcactttggctccatctggtgattcatactatcggtctgttgagaatctggtgcctgagcgatatgcagacagaaccatggctgacttgaccactagagatccaattattagggatcacacagcactaccaggggaggcacttgctcgagcagaccgcttggatgatctctaccgttctgatcgtgtggaggaactctaccgttctgatcgacttgttaaccgtgctgtggaccgccctcatccagcctattttacagctgcttatgagaccaaccctgcttatgctgaaacgagcattaggcctgtctctgcaagggtcaatggacccagtgcggcagtttcgtcactctattccttcagtggtggcccagtatatcggtaatgaatgatcatggctctgttgaaagccttagccagactaagaagacagggtattcgtctctttaactgcaactgttgtttgccttagcttctattcggtattttcttaaatatccttccctggatgaatgacattcgttatcaagacttgatggtctaaactgtcgaaattatgtactgtacttggcgtgctttgaagctcacttcgttctgtgaatggatcgatgcacgtattggtagcatttgcttgttctgccc

SEQ ID NO: 213800 - DNA, 2067 bp, Zea Mays
gagaaaagatcgtaaccctaatcggacaaaatcgggctatcttcttcctatatatcccgtcgccgctgcctcggccgtttcatgtccagcggccatggtgaagaagcccaacggtgtcgccaaggccacggcgacctctgctgacgcggcagcccagccatccaaggagaatccgtccacccctgggttggtcaaggcctcgaagtttaagaagagaaaggtcaaggccaaccgtgcgaagcaggcagtcgctgcagcagctattgacgaggtcgcccctgtaggtgcaggcactggtgatggcgatgcatctgcatcagcggctttaccgcaaccatccgatgttgccgaggcattacttgtggtgcaaacgccaaagtcaaccacttttgctgaggcatcacctgtggcacagacgcagaagccagccactgatgctgaaggattggtgcctgcaccaataccaaccactgctgtagcatcagcttcgtcgccaaagccaaaaccagctcaagctaatgctgatgctgcagctgcaatttctgccagcaagggcaatggtgtgggtgctgataatagtaggggtgatggtgagatgaagaacaagaaagagagggccatgagtgacaaggggaaggaggctgtggtcaagaaggaagaaaggggtgaccgtaaggttgcagggtttatattcatgtgcaatgcaaagactaagaaggagtgctaccagagtcgcttgtttgggatgcctagtgggaagattgaaatggtcaagaagattaggccaggggtcaagctgttcctgtatgattttgacttgaagcttctgtatggcgtgtacaaggcagcatcacatggtgggctgaaccttgtccatgaagcatttaatgggaagttccctgcacaggttaagtttaagattgataaagattgccgtcctctccctgagagtagtctcaagcaagccatcaaggaaaattacaatgcaaagagcaaatttgatccagagctcaccacaaaacaagtccaaaggttacttttgctgtttaagcctgttagtgcacctcaatctgtttcaaataatcaccttggagaaaggcgccactatgaaaaacgaaggaagccacgccattttgaagaaaggcggcctattgaagcagcgcgtcggccacgatttgatgaggaaaggcgccctgcggttagacatgttccttttgaggatccatacagggcaccacgctatgctccagttcctgttgactctcagcatggccattctttggctagtgatcaccacagatattatcaaccagcacttacacctgagcctcggcagcttcctcttgttctagagcctcgatatgttccgccggccctagatcatcatcatgtgccagagcttcgacatgccccacctgcatattatcgcactttggctccatctggtgattcatactatcggtctgttgagaatctggtgcctgagcgatatgcagacagaaccatggctgacttgaccactagagatccaattattagggatcacacagcactaccaggggaggcacttgctcgagcagaccgcttggatgatctctaccgttctgatcgtgtggaggaactctaccgttctgatcgacttgttaaccgtgctgtggaccgccctcatccagcctattttacagctgcttatgagaccaaccctgcttatgctgaaacgagcattaggcctgtctctgcaagggtcaatggacccagtgcggcagtttcgtcactctattccttcagtggtggcccagtatatcggtaatgaatgatcatggctctgttgaaagccttagccagactaagaagacagggtattcgtctctttaactgcaactgttgtttgccttagcttctattcggtattttcttaaatatccttccctggatgaatgacattcgttatcaagacttgatggtctaaactgtcgaaattatgtactgtacttggcgtgctttgaagctcacttcgttctgtgaatggatcgatgcacgtattggtagcatttgcttgttctgccc

SEQ ID NO: 213801 - DNA, 1424 bp, Zea Mays
gagaaaagatcgtaaccctaatcggacaaaatcgggctatcttcttcctatatatcccgtcgccgctgcctcggccgtttcatgtccagcggccatggtgaagaagcccaacggtgtcgccaaggccacggcgacctctgctgacgcggcagcccagccatccaaggagaatccgtccacccctgggttggtcaaggcctcgaagtttaagaagagaaaggtcaaggccaaccgtgcgaagcaggcagtcgctgcagcagctattgacgaggtcgcccctgtaggtgcaggcactggtgatggcgatgcatctgcatcagcggctttaccgcaaccatccgatgttgccgaggcattacttgtggtgcaaacgccaaagtcaaccacttttgctgaggcatcacctgtggcacagacgcagaagccagccactgatgctgaaggattggtgcctgcaccaataccaaccactgctgtagcatcagcttcgtcgccaaagccaaaaccagctcaagctaatgctgatgctgcagctgcaatttctgccagcaagggcaatggtgtgggtgctgataatagtaggggtgatggtgagatgaagaacaagaaagagagggccatgagtgacaaggggaaggaggttatggaggaaggaggaagtaagggaaagggtaagggtaaggggaagaaggctgtggtcaagaaggaagaaaggggtgaccgtaaggttgcagggtttatattcatgtgccagagcttcgacatgccccacctgcatattatcgcactttggctccatctggtgattcatactatcggtctgttgagaatctggtgcctgagcgatatgcagacagaaccatggctgacttgaccactagagatccaattattagggatcacacagcactaccaggggaggcacttgctcgagcagaccgcttggatgatctctaccgttctgatcgtgtggaggaactctaccgttctgatcgacttgttaaccgtgctgtggaccgccctcatccagcctattttacagctgcttatgagaccaaccctgcttatgctgaaacgagcattaggcctgtctctgcaagggtcaatggacccagtgcggcagtttcgtcactctattccttcagtggtggcccagtatatcggtaatgaatgatcatggctctgttgaaagccttagccagactaagaagacagggtattcgtctctttaactgcaactgttgtttgccttagcttctattcggtattttcttaaatatccttccctggatgaatgacattcgttatcaagacttgatggtctaaactgtcgaaattatgtactgtacttggcgtgctttgaagctcacttcgttctgtgaatggatcgatgcacgtattggtagcatttgcttgttctgccc

SEQ ID NO: 213802 - DNA, 1249 bp, Zea Mays
gagaaaagatcgtaaccctaatcggacaaaatcgggctatcttcttcctatatatcccgtcgccgctgcctcggccgtttcatgtccaggttaagtttaagattgataaagattgccgtcctctccctgagagtagtctcaagcaagccatcaaggaaaattacaatgcaaagagcaaatttgatccagagctcaccacaaaacaagtccaaaggttacttttgctgtttaagcctgttagtgcacctcaatctgtttcaaataatcaccttggagaaaggcgccactatgaaaaacgaaggaagccacgccattttgaagaaaggcggcctattgaagcagcgcgtcggccacgatttgatgaggaaaggcgccctgcggttagacatgttccttttgaggatccatacagggcaccacgctatgctccagttcctgttgactctcagcatggccattctttggctagtgatcaccacagatattatcaaccagcacttacacctgagcctcggcagcttcctcttgttctagagcctcgatatgttccgccggccctagatcatcatcatgtgccagagcttcgacatgccccacctgcatattatcgcactttggctccatctggtgattcatactatcggtctgttgagaatctggtgcctgagcgatatgcagacagaaccatggctgacttgaccactagagatccaattattagggatcacacagcactaccaggggaggcacttgctcgagcagaccgcttggatgatctctaccgttctgatcgtgtggaggaactctaccgttctgatcgacttgttaaccgtgctgtggaccgccctcatccagcctattttacagctgcttatgagaccaaccctgcttatgctgaaacgagcattaggcctgtctctgcaagggtcaatggacccagtgcggcagtttcgtcactctattccttcagtggtggcccagtatatcggtaatgaatgatcatggctctgttgaaagccttagccagactaagaagacagggtattcgtctctttaactgcaactgttgtttgccttagcttctattcggtattttcttaaatatccttccctggatgaatgacattcgttatcaagacttgatggtctaaactgtcgaaattatgtactgtacttggcgtgctttgaagctcacttcgttctgtgaatggatcgatgcacgtattggtagcatttgcttgttctgccc

SEQ ID NO: 213803 - DNA, 1564 bp, Zea Mays
ctcgtgtctctcctcaagaatagccttgccgcgcgcggaacgcccagagggcgcatcctcccaatcccactccgcatgttcggccgtccctgagggatcgcccaccgcaacaactacacgccgcggcgcaccgccgccgcgccggctggggaacgacggcgacgcatatatcatccatccgagatggagctgttcgagcgcgcgaggacggtgcggctgcggagccaccacgacaagtacctgtacgccgacgaggacgaggtgcacgtgatccaggaccggaacgcggcgtccccgaacgcgcggtgggtggtggagcccgtgccgcactcccccggcgtgctccgcctccgcggccgctacggccgctacctctcggcctccaacgagcccttcctcctgggcggcacggggcgcaaggtgctgcagacgctgccccaccgcctcgactcctccgtcgagtgggtgcccgtgcgcgacgacgccggcagcaacgcgcacgcccgcgccgtgcgcctccggacgcgatacggcaacttcctccgcgccaacgcggggctcccgccgtggcggaactccgtcacccacgacgtcccgcaccggcacacagggtgggtggtctgggacgtcgagatcttccaggcgctcccgccgccaacggggcccgattcctcatcgtcctccgccgccgcggaaaccgacgccgacgccttcgcgtcctctccggctccgtcgtcgtcgtataacaacaaagcgccgcactcttcggctccgttaccaacgtcggcgctgaggccgccgccccctcccgcgcaccaccgcgaagagaacttggttccgttcaaggggcagcccgcgccgccgccgccgggctacatcgcaccacccgctccgggattttacaggctcgagtcgacggattccttctccgtgccgctgcacaaggtggaggggcgagcggtccactaccacatcggggacagcgacggggaggtgaggccggacgaggagccgcactacttaacgttcaacggaactagcctggaggagctgctggagaggctcaaggaggagacggggctgcacgacgtcatcatgtgctcgcgcagccccatcaacgggaagctcctgccgctccgtctgcagctgccgcccaacaacgccgccgtgcatatcgtgcttgtgcaggagtcatcaaatgtggcaaaaacttttgcttgaccagttgaccatcccgttcacaaaatcatctgatcgaagatggtggaagcaacagcttgtgtatcaaatgcagaattgttcaacaattgtgtatgcattaactttttgatcaaaccggttccagtgtggcggctaacacaagcaagtgtccttctgcctcttgctgttctcattcatcatctcgtatttgctttgtctgtagatatgtgccatctaattctcaagattcatagtgatctgtatagataataaggacccttgaaattttctgtgttgttaatttttttttcatttcttgaaaggattcttgaaagttaatatacatgttgtgtgttgcccttgt

SEQ ID NO: 213804 - DNA, 1728 bp, Zea Mays
gattggaatctctgggcgactcgacctgaacaaccccgcccgccgtcctgcccttgtgctctagtcctcccgcgaccgttccaaattcttcctcgcgttcgtattccacgcggcgacgtcgccatcgccatcgcggccgccgctccgcccctcttccttcgcatatacgtaggctgcttggttatgaaggccttgaagttattaaccccgatggaggcacagatgatgctgaagaagaagctttgaaggggagatggaagcaggaggaccgtgatagctactggaagatgatgcacaaatacataggatcagatgttacatcacttgtgacacttccagtcataatttttgagccaatgacaatgcttcagaaaatggccgagttgatggaatactgtgaattgttagacaaagcagatgaatgtgaggatccatacatgtgtatggtttatgcttctacatgggctgtttctgtgtactttgcatatcaacgcacatggaagccttttaatccgatccttggagagacttatgagatggttaaccaccagggcattacatttcttgctgagcaggtaagccatcatcccccaatgggtgttgctcactgcgagaatgaacattttacttacgatatcacgtctaagttgaagaccaagtttttgggaaattcagtggaaatttacccagttggaaggactcgagtgacactaaaaaaatctggtgtcgtgttggatttggtgccaccactaacaaaggttaacaacctgatatttgggcgcacttgggttgattctcctggagagatggtcatgacgaacctgacaactggagacaaagttgtgctatatttccagccatgcggctggtttggggctggccgttacgaggtggatgggtatgtgtacagtgcagcggaagaacccaaaatcatgattacagggaagtggaacaagtccctgagttgccaaccatgtgaccaagaaggcgatcctcttccaggcacggagctgaaggagatctggagagttgctcctgccccacagggcgacaagtatcagtacacacacttcgcacacaaaataaacagcttcgacacggcacctaagaagctgttggcatctgattcacggctgaggcctgatagatatgccctcgagaagggtgacatgtctaagtccggggcagagaagagcaggctcgaggaacaacagagagctgagaaacgaactcgagaggccaagggcgagcaatttactcctagatggttcaacctgacagatgtggtctcccctacaccgtggggtgacctggaaatttatgaatacaacggcaaatacacagagcaccgggctgccatagaccgctccgatgtcaccgacgagacagatgtcacttcagtcaagttcagcccatggcaatatggtagctcatcttcccaatgattctccgtggccagaagccgccatgcctacgcgcattgtgtaaaacacttccaggcctggctttgctggtttgttgtgccatcagcggtttccttgcccttgtagtattgtggccttcccccttttttcccttaaatgctacagttattcaggaagtggtgtagtccgtgtactgtcgcaagtctagcgagattgcagagttttgttgaaccgttgtgctgttgtatttatgcgagataactgataaccgaaggtaacgaacgacacagatacggatggaatc

SEQ ID NO: 213805 - DNA, 1509 bp, Zea Mays
tagtcctgtgacgtttgcaggcttgcttgttggtcatgaagtagcgagaccgtgatagctactggaagatgatgcacaaatacataggatcagatgttacatcacttgtgacacttccagtcataatttttgagccaatgacaatgcttcagaaaatggccgagttgatggaatactgtgaattgttagacaaagcagatgaatgtgaggatccatacatgtgtatggtttatgcttctacatgggctgtttctgtgtactttgcatatcaacgcacatggaagccttttaatccgatccttggagagacttatgagatggttaaccaccagggcattacatttcttgctgagcaggtaagccatcatcccccaatgggtgttgctcactgcgagaatgaacattttacttacgatatcacgtctaagttgaagaccaagtttttgggaaattcagtggaaatttacccagttggaaggactcgagtgacactaaaaaaatctggtgtcgtgttggatttggtgccaccactaacaaaggttaacaacctgatatttgggcgcacttgggttgattctcctggagagatggtcatgacgaacctgacaactggagacaaagttgtgctatatttccagccatgcggctggtttggggctggccgttacgaggtggatgggtatgtgtacagtgcagcggaagaacccaaaatcatgattacagggaagtggaacaagtccctgagttgccaaccatgtgaccaagaaggcgatcctcttccaggcacggagctgaaggagatctggagagttgctcctgccccacagggcgacaagtatcagtacacacacttcgcacacaaaataaacagcttcgacacggcacctaagaagctgttggcatctgattcacggctgaggcctgatagatatgccctcgagaagggtgacatgtctaagtccggggcagagaagagcaggctcgaggaacaacagagagctgagaaacgaactcgagaggccaagggcgagcaatttactcctagatggttcaacctgacagatgtggtctcccctacaccgtggggtgacctggaaatttatgaatacaacggcaaatacacagagcaccgggctgccatagaccgctccgatgtcaccgacgagacagatgtcacttcagtcaagttcagcccatggcaatatggtagctcatcttcccaatgattctccgtggccagaagccgccatgcctacgcgcattgtgtaaaacacttccaggcctggctttgctggtttgttgtgccatcagcggtttccttgcccttgtagtattgtggccttcccccttttttcccttaaatgctacagttattcaggaagtggtgtagtccgtgtactgtcgcaagtctagcgagattgcagagttttgttgaaccgttgtgctgttgtatttatgcgagataactgataaccgaaggtaacgaacgacacagatacggatggaatc

SEQ ID NO: 213806 - DNA, 2726 bp, Zea Mays
gcctccccccccccaaaaggcagcagcaaaacccccattaaatccctctcctccccgatcgcaggccgatcgacggcggcgatggggcagagaatcgatatcaattggactgaggtgtttggcaagtcatcctcccccgaccgcgaggccgacgtctgcttcgcctccccctcgtcggcgtcggcagcaccgcggacgcgggcgcgggcgttgggcgccgcgaaggtgttaccgggcgacgagcggcggcgggggtccccagacagacaccaacggaagaggctcgggaagctgcgcatcgacgatgactggtccgtcggcgggcagcgccacaccgccgtgcatggggatgacggggcgcgccgaccacggacccgcggggccgccaaggctgcagatggtcgggtacaggatgctcattccgtttctaaggatgtgtatgatttcaaagatgagcaggcggaacgtgtgggcaacagattctgttcgaggttaactcccattcaggaaaataaatactgccagttacctttgaataatctcaaaaggcaagggtgtgcggaaaaaaggaaacctatatcggtggacaagatgtactcagagtctgaccgaccaagttccacatcttcatctgcgaagaggactcatgccattgatccagaggtgtcagatcatgaaaaatgtcacaagactgaaagttcccatcccagtagattctctaagaggaggaaggaacaacttcagaattcatcttctgtgtaccctcgaaaggttcaagatgtggttctattggatgacgaagatatgcagcctgaggaagaagtaaactgtgacatgtctgacggacagaatggaccaaagatctactacccatcgagagataatcgggaatctgttgagctcagcagatctgatattaaatgtcttgatcctggagtatatttgtcatcaccagtgataaacttctacatccagtacattaaaaggaacagactgtctagtgaagattttagagacaaattttacatatttaacacatatttttatggaaagcttgaagaagcattgtgtcggcaggatgagttctcaaagttgagaagatggtggaaaggtgtcaatatattaaataaagcatacataatcttgccgatccatgggatggcgcactggagcttggtaatcatttgcattcctgcaaaagagagtatttcaggaccaatcatacttcatctggactccctagcgatgcatcccagtactaagatcttgaacacagttgagagataccttgaaaaagaatggtgccaattatcatcatgggaggattttaaaaataatatacataagcaaagcgttgaggttccacgacagaataatgagtatgactgtggcatcttcatgctttattatattgaacggtttataaaagaggctccagaaagattcacaattgataaacttgatatgtttaatcggagttggttcaaacctgaagaagcatctggtctaaggcggagaataagagagcttctgctggaagaatttgaaagtgccaagctggatgatgctttaccaggagcggatgcatctgagcgtgatgacagcataaatgatggagaattgaaaccagatgcatcttctgacagttcagaaatggtcgtagaggtggtaggagggttgggaggcactgacaagagcaatgaaggcatcaaggttgtagcatcagaagaggcaagtggagagtcaggagatgctggtaagagtaccgaaggtactgttgcagcatcagaagaaaagagtattgaaggcatcaatgttgcagaaccagaagatgcttgtgagagtataggaggcatctatgttgcagaatcagatgaagcaagtggggagtttggagagattggtaagaccaacaaaggcaccaaagttgcagtgtcagaaggagcaagtgtgtctggatacactgataagaatatggaagacatctctgactctgaggttgcagtattagacaaagctcccactagcagctacagacgtggagagaagaccacagcctgtgttctatcagaagcagcttcactttccgatagcgtcaaagatgaacaaggtatggtgaaaccagattctggcagctcaaaagctgagagagaaggagatttgattgtaattgcatcgccggaaagatcggaagggaatgatgagatcattggtagcatgccaattacagatgtagtttgtgacagctgcgacagcgacaccgagaccaaggtgaggatcgtaaaaattcacagaagaaaatttgtcccatcgtgtggttgcagcaattgacacaaggggccatgcaccgtgcaaaccttctggttgcgttctcacgaagatgcgaaattgtgacagattttggtaatgatattttgaggttcctgtggccgtataccaagcacatagatgaccaggccaggcggtgatctcagtaaaccgaataggtagcgggtcgatgcatggcctgcttccccctgatctcgggcactaggctcctggaaagcagttttgggtaggcagttcattggcttgggcccgggacttgtaaagtgtacaggcgattggacgttattacgtatgttatggtgtttacattagaagatctgtgactgtgaacacctgccacaatttgagataatatgcgcgtaaggtcttgcgttttcctttttgttctgccccagagc

SEQ ID NO: 213807 - DNA, 2674 bp, Zea Mays
gcctccccccccccaaaaggcagcagcaaaacccccattaaatccctctcctccccgatcgcaggccgatcgacggcggcgatggggcagagaatcgatatcaattggactgaggtgtttggcaagtcatcctcccccgaccgcgaggccgacgtctgcttcgcctccccctcgtcggcgtcggcagcaccgcggacgcgggcgcgggcgttgggcgccgcgaaggtgttaccgggcgacgagcggcggcgggggtccccagacagacaccaacggaagaggctcgggaagctgcgcatcgacgatgactggtccgtcggcgggcagcgccacaccgccgtgcatggggatgacggggcgcgccgaccacggacccgcggggccgccaaggtccagaagatgagcaggcggaacgtgtgggcaacagattctgttcgaggttaactcccattcaggaaaataaatactgccagttacctttgaataatctcaaaaggcaagggtgtgcggaaaaaaggaaacctatatcggtggacaagatgtactcagagtctgaccgaccaagttccacatcttcatctgcgaagaggactcatgccattgatccagaggtgtcagatcatgaaaaatgtcacaagactgaaagttcccatcccagtagattctctaagaggaggaaggaacaacttcagaattcatcttctgtgtaccctcgaaaggttcaagatgtggttctattggatgacgaagatatgcagcctgaggaagaagtaaactgtgacatgtctgacggacagaatggaccaaagatctactacccatcgagagataatcgggaatctgttgagctcagcagatctgatattaaatgtcttgatcctggagtatatttgtcatcaccagtgataaacttctacatccagtacattaaaaggaacagactgtctagtgaagattttagagacaaattttacatatttaacacatatttttatggaaagcttgaagaagcattgtgtcggcaggatgagttctcaaagttgagaagatggtggaaaggtgtcaatatattaaataaagcatacataatcttgccgatccatgggatggcgcactggagcttggtaatcatttgcattcctgcaaaagagagtatttcaggaccaatcatacttcatctggactccctagcgatgcatcccagtactaagatcttgaacacagttgagagataccttgaaaaagaatggtgccaattatcatcatgggaggattttaaaaataatatacataagcaaagcgttgaggttccacgacagaataatgagtatgactgtggcatcttcatgctttattatattgaacggtttataaaagaggctccagaaagattcacaattgataaacttgatatgtttaatcggagttggttcaaacctgaagaagcatctggtctaaggcggagaataagagagcttctgctggaagaatttgaaagtgccaagctggatgatgctttaccaggagcggatgcatctgagcgtgatgacagcataaatgatggagaattgaaaccagatgcatcttctgacagttcagaaatggtcgtagaggtggtaggagggttgggaggcactgacaagagcaatgaaggcatcaaggttgtagcatcagaagaggcaagtggagagtcaggagatgctggtaagagtaccgaaggtactgttgcagcatcagaagaaaagagtattgaaggcatcaatgttgcagaaccagaagatgcttgtgagagtataggaggcatctatgttgcagaatcagatgaagcaagtggggagtttggagagattggtaagaccaacaaaggcaccaaagttgcagtgtcagaaggagcaagtgtgtctggatacactgataagaatatggaagacatctctgactctgaggttgcagtattagacaaagctcccactagcagctacagacgtggagagaagaccacagcctgtgttctatcagaagcagcttcactttccgatagcgtcaaagatgaacaaggtatggtgaaaccagattctggcagctcaaaagctgagagagaaggagatttgattgtaattgcatcgccggaaagatcggaagggaatgatgagatcattggtagcatgccaattacagatgtagtttgtgacagctgcgacagcgacaccgagaccaaggtgaggatcgtaaaaattcacagaagaaaatttgtcccatcgtgtggttgcagcaattgacacaaggggccatgcaccgtgcaaaccttctggttgcgttctcacgaagatgcgaaattgtgacagattttggtaatgatattttgaggttcctgtggccgtataccaagcacatagatgaccaggccaggcggtgatctcagtaaaccgaataggtagcgggtcgatgcatggcctgcttccccctgatctcgggcactaggctcctggaaagcagttttgggtaggcagttcattggcttgggcccgggacttgtaaagtgtacaggcgattggacgttattacgtatgttatggtgtttacattagaagatctgtgactgtgaacacctgccacaatttgagataatatgcgcgtaaggtcttgcgttttcctttttgttctgccccagagc

SEQ ID NO: 213808 - DNA, 2746 bp, Zea Mays
ttaagcggcaacctccgctccgcctccccccccccaaaaggcagcagcaaaacccccattaaatccctctcctccccgatcgcaggccgatcgacggcggcgatggggcagagaatcgatatcaattggactgaggtgtttggcaagtcatcctcccccgaccgcgaggccgacgtctgcttcgcctccccctcgtcggcgtcggcagcaccgcggacgcgggcgcgggcgttgggcgccgcgaaggtgttaccgggcgacgagcggcggcgggggtccccagacagacaccaacggaagaggctcgggaagctgcgcatcgacgatgactggtccgtcggcgggcagcgccacaccgccgtgcatggggatgacggggcgcgccgaccacggacccgcggggccgccaaggctgcagatggtcgggtacaggatgctcattccgtttctaaggatgtgtatgatttcagtccagaagatgagcaggcggaacgtgtgggcaacagattctgttcgaggttaactcccattcaggaaaataaatactgccagttacctttgaataatctcaaaaggcaagggtgtgcggaaaaaaggaaacctatatcggtggacaagatgtactcagagtctgaccgaccaagttccacatcttcatctgcgaagaggactcatgccattgatccagaggtgtcagatcatgaaaaatgtcacaagactgaaagttcccatcccagtagattctctaagaggaggaaggaacaacttcagaattcatcttctgtgtaccctcgaaagatgtggttctattggatgacgaagatatgcagcctgaggaagaagtaaactgtgacatgtctgacggacagaatggaccaaagatctactacccatcgagagataatcgggaatctgttgagctcagcagatctgatattaaatgtcttgatcctggagtatatttgtcatcaccagtgataaacttctacatccagtacattaaaaggaacagactgtctagtgaagattttagagacaaattttacatatttaacacatatttttatggaaagcttgaagaagcattgtgtcggcaggatgagttctcaaagttgagaagatggtggaaaggtgtcaatatattaaataaagcatacataatcttgccgatccatgggatggcgcactggagcttggtaatcatttgcattcctgcaaaagagagtatttcaggaccaatcatacttcatctggactccctagcgatgcatcccagtactaagatcttgaacacagttgagagataccttgaaaaagaatggtgccaattatcatcatgggaggattttaaaaataatatacataagcaaagcgttgaggttccacgacagaataatgagtatgactgtggcatcttcatgctttattatattgaacggtttataaaagaggctccagaaagattcacaattgataaacttgatatgtttaatcggagttggttcaaacctgaagaagcatctggtctaaggcggagaataagagagcttctgctggaagaatttgaaagtgccaagctggatgatgctttaccaggagcggatgcatctgagcgtgatgacagcataaatgatggagaattgaaaccagatgcatcttctgacagttcagaaatggtcgtagaggtggtaggagggttgggaggcactgacaagagcaatgaaggcatcaaggttgtagcatcagaagaggcaagtggagagtcaggagatgctggtaagagtaccgaaggtactgttgcagcatcagaagaaaagagtattgaaggcatcaatgttgcagaaccagaagatgcttgtgagagtataggaggcatctatgttgcagaatcagatgaagcaagtggggagtttggagagattggtaagaccaacaaaggcaccaaagttgcagtgtcagaaggagcaagtgtgtctggatacactgataagaatatggaagacatctctgactctgaggttgcagtattagacaaagctcccactagcagctacagacgtggagagaagaccacagcctgtgttctatcagaagcagcttcactttccgatagcgtcaaagatgaacaaggtatggtgaaaccagattctggcagctcaaaagctgagagagaaggagatttgattgtaattgcatcgccggaaagatcggaagggaatgatgagatcattggtagcatgccaattacagatgtagtttgtgacagctgcgacagcgacaccgagaccaaggtgaggatcgtaaaaattcacagaagaaaatttgtcccatcgtgtggttgcagcaattgacacaaggggccatgcaccgtgcaaaccttctggttgcgttctcacgaagatgcgaaattgtgacagattttggtaatgatattttgaggttcctgtggccgtataccaagcacatagatgaccaggccaggcggtgatctcagtaaaccgaataggtagcgggtcgatgcatggcctgcttccccctgatctcgggcactaggctcctggaaagcagttttgggtaggcagttcattggcttgggcccgggacttgtaaagtgtacaggcgattggacgttattacgtatgttatggtgtttacattagaagatctgtgactgtgaacacctgccacaatttgagataatatgcgcgtaaggtcttgcgttttcctttttgttctgccccagagc

SEQ ID NO: 213809 - DNA, 2569 bp, Zea Mays
ttaagcggcaacctccgctccgcctccccccccccaaaaggcagcagcaaaacccccattaaatccctctcctccccgatcgcaggccgatcgacggcggcgatggggcagagaatcgatatcaattggactgaggtgtttggcaagtcatcctcccccgaccgcgaggccgacgtctgcttcgcctccccctcgtcggcgtcggcagcaccgcggacgcgggcgcgggcgttgggcgccgcgaaggtgttaccgggcgacgagcggcggcgggggtccccagacagacaccaacggaagaggctcgggaagctgcgcatcgacgatgactggtccgtcggcgggcagcgccacaccgccgtgcatggggatgacggggcgcgccgaccacggacccgcggggccgccaaggctgcagatggtcgggtacaggatgctcattccgtttctaaggatgtgtatgatttcagtccagaagatgagcaggcggaacgtgtgggcaacagattctgttcgaggttaactcccattcaggaaaataaatactgccagttacctttgaataatctcaaaaggcaagggtgtgcggaaaaaaggaaacctatatcggtggacaagatgtactcagagtctgaccgaccaagttccacatcttcatctgcgaagaggactcatgccattgatccagaggtgtcagatcatgaaaaatgtcacaagactgaaagttcccatcccagtagattctctaagaggaggaaggaacaacttcagaattcatcttctgtgtaccctcgaaaggttcaagatgtggttctattggatgacgaagatatgcagcctgaggaagaagtaaactgtgacatgtctgacggacagaatggaccaaagatctactacccatcgagagataatcgggaatctgttgagctcagcagatctgatattaaatgtcttgatcctggagtatatttgtcatcaccagtgataaacttctacatccagtacattaaaaggaacagactgtctagtgaagattttagagacaaattttacatatttaacacatatttttatggaaagcttgaagaagcattgtgtcggcaggatgagttctcaaagttgagaagatggtggaaaggtgtcaatatattaaataaagcatacataatcttgccgatccatgggatggcgcactggagcttggtaatcatttgcattcctgcaaaagagagtatttcaggaccaatcatacttcatctggactccctagcgatgcatcccagtactaagatcttgaacacagttgagagtttaatcggagttggttcaaacctgaagaagcatctggtctaaggcggagaataagagagcttctgctggaagaatttgaaagtgccaagctggatgatgctttaccaggagcggatgcatctgagcgtgatgacagcataaatgatggagaattgaaaccagatgcatcttctgacagttcagaaatggtcgtagaggtggtaggagggttgggaggcactgacaagagcaatgaaggcatcaaggttgtagcatcagaagaggcaagtggagagtcaggagatgctggtaagagtaccgaaggtactgttgcagcatcagaagaaaagagtattgaaggcatcaatgttgcagaaccagaagatgcttgtgagagtataggaggcatctatgttgcagaatcagatgaagcaagtggggagtttggagagattggtaagaccaacaaaggcaccaaagttgcagtgtcagaaggagcaagtgtgtctggatacactgataagaatatggaagacatctctgactctgaggttgcagtattagacaaagctcccactagcagctacagacgtggagagaagaccacagcctgtgttctatcagaagcagcttcactttccgatagcgtcaaagatgaacaaggtatggtgaaaccagattctggcagctcaaaagctgagagagaaggagatttgattgtaattgcatcgccggaaagatcggaagggaatgatgagatcattggtagcatgccaattacagatgtagtttgtgacagctgcgacagcgacaccgagaccaaggtgaggatcgtaaaaattcacagaagaaaatttgtcccatcgtgtggttgcagcaattgacacaaggggccatgcaccgtgcaaaccttctggttgcgttctcacgaagatgcgaaattgtgacagattttggtaatgatattttgaggttcctgtggccgtataccaagcacatagatgaccaggccaggcggtgatctcagtaaaccgaataggtagcgggtcgatgcatggcctgcttccccctgatctcgggcactaggctcctggaaagcagttttgggtaggcagttcattggcttgggcccgggacttgtaaagtgtacaggcgattggacgttattacgtatgttatggtgtttacattagaagatctgtgactgtgaacacctgccacaatttgagataatatgcgcgtaaggtcttgcgttttcctttttgttctgccccagagc

SEQ ID NO: 213810 - DNA, 2655 bp, Zea Mays
gatgatttcgccgcgcaaccttcccatattaagcggcaacctccgctccgcctccccccccccaaaaggcagcagcaaaacccccattaaatccctctcctccccgatcgcaggccgatcgacggcggcgatggggcagagaatcgatatcaattggactgaggtgtttggcaagtcatcctcccccgaccgcgaggccgacgtctgcttcgcctccccctcgtcggcgtcggcagcaccgcggacgcgggcgcgggcgttgggcgccgcgaaggtgttaccgggcgacgagcggcggcgggggtccccagacagacaccaacggaagaggctcgggaagctgcgcatcgacgatgactggtccgtcggcgggcagcgccacaccgccgtgcatggggatgacggggcgcgccgaccacggacccgcggggccgccaaggctgcagatggtcgggtacaggatgctcattccgtttctaaggatgtgtatgatttcagtccagaagatgagcaggcggaacgtgtgggcaacagattctgttcgaggttaactcccattcaggaaaataaatactgccagttacctttgaataatctcaaaaggcaagggtgtgcggaaaaaaggaaacctatatcggtggacaagatgtactcagagtctgaccgaccaagttccacatcttcatctgcgaagaggactcatgccattgatccagaggtgtcagatcatgaaaaatgtcacaagactgaaagttcccatcccagtagattctctaagaggaggaaggaacaacttcagaattcatcttctgtgtaccctcgaaaggttcaagatgtggttctattggatgacgaagatatgcagcctgaggaagaagtaaactgtgacatgtctgacggacagaatggaccaaagatctactacccatcgagagataatcgggaatctgttgagctcagcagatctgatattaaatgtcttgatcctggagtatatttgtcatcaccagtgataaacttctacatccagtacattaaaaggaacagactgtctagtgaagattttagagacaaattttacatatttaacacatatttttatggaaagcttgaagaagcattgtgtcggcaggatgagttctcaaagttgagaagatggtggaaaggtgtcaatatattaaataaagcatacataatcttgccgatccatgggatggcgcactggagcttggtaatcatttgcattcctgcaaaagagagtatttcaggaccaatcatacttcatctggactccctagcgatgcatcccagtactaagatcttgaacacagttgagagataccttgaaaaagaatggtgccaattatcatcatgggaggattttaaaaataatatacataagcaaagcgttgaggttccacgacagaataatgagtatgactgtggcatcttcatgctttattatattgaacggtttataaaagaggctccagaaagattcacaattgataaacttgatatgtttaatcggagttggttcaaacctgaagaagcatctggtctaaggcggagaataagagagcttctgctggaagaatttgaaagtgccaagctggatgatgctttaccaggagcggatgcatctgagcgtgatgacagcataaatgatggagaattgaaaccagatgcatcttctgacagttcagaaatggtcgtagaggtggtaggagggttgggaggcactgacaagagcaatgaaggcatcaaggttgtagcatcagaagaggcaagtggagagtcaggagatgctggtaagagtaccgaaggtactgttgcagcatcagaagaaaagagtattgaaggcatcaatgttgcagaaccagaagatgcttgtgagagtataggaggcatctatgttgcagaatcagatgaagcaagtggggagtttggagagattggtaagaccaacaaaggcaccaaagttgcagtgtcagaaggagcaagtgtgtctggatacactgataagaatatggaagacatctctgactctgaggttgcagtattagacaaagctcccactagcagctacagacgtggagagaagaccacagcctgtgttctatcagaagcagcttcactttccgatagcgtcaaagatgaacaaggtatggtgaaaccagattctggcagctcaaaagctgagagagaaggagatttgattgtaattgcatcgccggaaagatcggaagggaatgatgagatcattggtagcatgccaattacagatgtagtttgtgacagctgcgacagcgacaccgagaccaagattttggtaatgatattttgaggttcctgtggccgtataccaagcacatagatgaccaggccaggcggtgatctcagtaaaccgaataggtagcgggtcgatgcatggcctgcttccccctgatctcgggcactaggctcctggaaagcagttttgggtaggcagttcattggcttgggcccgggacttgtaaagtgtacaggcgattggacgttattacgtatgttatggtgtttacattagaagatctgtgactgtgaacacctgccacaatttgagataatatgcgcgtaaggtcttgcgttttcctttttgttctgccccagagc

SEQ ID NO: 213811 - DNA, 2284 bp, Zea Mays
tgcgtcgcggacatctacatcagctacgaggtccagaagatgagcaggcggaacgtgtgggcaacagattctgttcgaggttaactcccattcaggaaaataaatactgccagttacctttgaataatctcaaaaggcaagggtgtgcggaaaaaaggaaacctatatcggtggacaagatgtactcagagtctgaccgaccaagttccacatcttcatctgcgaagaggactcatgccattgatccagaggtgtcagatcatgaaaaatgtcacaagactgaaagttcccatcccagtagattctctaagaggaggaaggaacaacttcagaattcatcttctgtgtaccctcgaaaggttcaagatgtggttctattggatgacgaagatatgcagcctgaggaagaagtaaactgtgacatgtctgacggacagaatggaccaaagatctactacccatcgagatctgatattaaatgtcttgatcctggagtatatttgtcatcaccagtgataaacttctacatccagtacattaaaaggaacagactgtctagtgaagattttagagacaaattttacatatttaacacatatttttatggaaagcttgaagaagcattgtgtcggcaggatgagttctcaaagttgagaagatggtggaaaggtgtcaatatattaaataaagcatacataatcttgccgatccatgggatggcgcactggagcttggtaatcatttgcattcctgcaaaagagagtatttcaggaccaatcatacttcatctggactccctagcgatgcatcccagtactaagatcttgaacacagttgagagataccttgaaaaagaatggtgccaattatcatcatgggaggattttaaaaataatatacataagcaaagcgttgaggttccacgacagaataatgagtatgactgtggcatcttcatgctttattatattgaacggtttataaaagaggctccagaaagattcacaattgataaacttgatatgtttaatcggagttggttcaaacctgaagaagcatctggtctaaggcggagaataagagagcttctgctggaagaatttgaaagtgccaagctggatgatgctttaccaggagcggatgcatctgagcgtgatgacagcataaatgatggagaattgaaaccagatgcatcttctgacagttcagaaatggtcgtagaggtggtaggagggttgggaggcactgacaagagcaatgaaggcatcaaggttgtagcatcagaagaggcaagtggagagtcaggagatgctggtaagagtaccgaaggtactgttgcagcatcagaagaaaagagtattgaaggcatcaatgttgcagaaccagaagatgcttgtgagagtataggaggcatctatgttgcagaatcagatgaagcaagtggggagtttggagagattggtaagaccaacaaaggcaccaaagttgcagtgtcagaaggagcaagtgtgtctggatacactgataagaatatggaagacatctctgactctgaggttgcagtattagacaaagctcccactagcagctacagacgtggagagaagaccacagcctgtgttctatcagaagcagcttcactttccgatagcgtcaaagatgaacaaggtatggtgaaaccagattctggcagctcaaaagctgagagagaaggagatttgattgtaattgcatcgccggaaagatcggaagggaatgatgagatcattggtagcatgccaattacagatgtagtttgtgacagctgcgacagcgacaccgagaccaaggtgaggatcgtaaaaattcacagaagaaaatttgtcccatcgtgtggttgcagcaattgacacaaggggccatgcaccgtgcaaaccttctggttgcgttctcacgaagatgcgaaattgtgacagattttggtaatgatattttgaggttcctgtggccgtataccaagcacatagatgaccaggccaggcggtgatctcagtaaaccgaataggtagcgggtcgatgcatggcctgcttccccctgatctcgggcactaggctcctggaaagcagttttgggtaggcagttcattggcttgggcccgggacttgtaaagtgtacaggcgattggacgttattacgtatgttatggtgtttacattagaagatctgtgactgtgaacacctgccacaatttgagataatatgcgcgtaaggtcttgcgttttcctttttgttctgccccagagc

SEQ ID NO: 213812 - DNA, 1459 bp, Zea Mays
cgtcattcattacagatgaataattctgtcaaatagttaggaaatcagaagctaaaaaatgtcattgaagaagacatcacaaaatttcacatccgttcccattttcttcctttcatgaaggagaaatacggtgccaccaaaaaacttgcaaagtttctactttgcaggttgcatcaaacttaccattcaatgtcagcaccgaagttgtcaaactactactcccaatgggggatgttttctctgtcgtggtgcttatgcttcaggatgaaacagcagtacgccttgcagatgcttcaatacaaagtccagagtaccgatctatcaatgtgtttgtggatttttactcggaacctgaatacaagttcagagtagacagagagaattttttccctcggcctaaggttgatggtgctgttatcagcttcaaactaaagaatgcggaggagtatccgccagttagttccccaaaaagcttcttttcaatggtgaattccgctttcatggggaagcgcaagatgcttaggaaatctcttcagcacatatgctcttcttctgagattgaggctgctcttgacaacattggccttccagttacagctagaccttctgatttgattttggatgatttcgtgagattgcacaatcatttagcgaaagtatgactaagaagtgcctttcaaaatgcctaaggaattgcttgttggcatggtgttcaacagttggagtaacttacgcctgaccgctgagagttgctatgcagctacaggtgcattcagctcagctccggggcgaagccaggaattacatgtagggaggccggccgaaagagccatcttgtaaaaaaatgatcgcgggttcaactggtttggttactcgcacttagcgtctgtctgagttaatacttgacaaaaaaaaaaaaacaagcacagctcaactggttaggtttctcgtagtggtggtggtcgtttgggttaattcatcgacttgacacggttgctcctatttttttttctatatgtattctagatagtgagggtttattgtattttgatcgtagacgctaatcagaaactctactgaatggatgccttcgttctctctgagtacaaaggccccattgaaatatgtatgagaaataaagcaaatttagaggaccggtagcatttccttctgcttatttgcctcctttttcaccacgtgagcatctaaccaatacaagactgtttagcagatctgtaaggccttgttcgtttacgtcggattgcatccgaaatcgttccagttaatcaaagtttatataaattagagaagcaatccggttatgaatcgttccgatccaccaatccggtacaaacgaacaaggcctaaacaacattgtttaccaagtgaagtttaaaataggatgtgagatagaaaataagataagagagctacatgagatagccttagcgtgtcttag

SEQ ID NO: 213813 - DNA, 3136 bp, Zea Mays
aagggcgagcaaaactggaagcctacgaaaatggtggagctcacctccttatccccagggccaccacgtccttctcggctgactcctcgccgccggccgccgccgccgacacctcatgttcatacctcctcgcgtcgtcgcgggaggatcctcggcgccgcgaccgccacgcctggcgccgacgactaccactccaccatccgctccctcaactcccgcggccgccacgtcccccgaaaatccctcgggcagaactacacgctcaactccaaggtgaacgaggagctggtggcggcggcgggggtggaggagggtgacgtcgtgctcgagatcggcccaggcaccggctcgctcacttccgcgctgctccaggccggcgctaccgtctttgccgtcgagaaggacaagcatatggctactctcgttaaagataggtttggatctacagaacagttgaaggtcattgaagaagacatcacaaaatttcacatccgttcccattttcttcctttcatgaaggagaaatacggtgccaccaaaaaacttgcaaaggttgcatcaaacttaccattcaatgtcagcaccgaagttgtcaaactactactcccaatgggggatgttttctctgtcgtggtgcttatgcttcaggatgaaacagcagtacgccttgcagatgcttcaatacaaagtccagagtaccgatctatcaatgtgtttgtggatttttactcggaacctgaatacaagttcagagtagacagagagaattttttccctcggcctaaggttgatggtgctgttatcagcttcaaactaaagaatgcggaggagtatccgccagttagttccccaaaaagcttcttttcaatggtgagtagtgggtcatggggtcatggtgtgcagaaacttgtcccaaatctgaattgctttctgtggttgagggagaaaggacgtgaatggaagcaattgtttatctttggatatcgttacaaggccgctcattcttggtggtcttggagtccctaatctgtatttccaaagctgggcactgtaagctaaatggttgtggctggagaaaacagacactaacagaccttggcatgggttaaaactgcatgtactaaagcaagtaaggaagttctttcaatcttcggttgttactgtggttggaaatgagaacaagactttattctagtcggacagatggttagacggcggctgcatcaaggaatttgctcctgctgttgttgctaaagtcggtaaaagtgttgtttccactagaactgcggcccaagctattggaaactggcaatggatcagtgaaatcatgacacccctttcctgggttgggttacaacagttcttgcttttatgggatgctgtaagaagagtggtgttaacacatgaagctgataaacatatatggctgcatacttcctctggccagttctcctcctaagtcatgttacaaggcatttttcatgggatccattacttttgagccttggaggaggctgtggaagtcttggactcctccaaaatgcaaatttttccagtggctggctatacggaataaatgttggacatcagatagattggaaattggaaaggagaggtttggatcacccaaaatcttgtttattatgtgatcaaacacaagaaaccatccaatatctattgtgtacgtgcgtctttgcaagacagttttggcataccatcttttcgcccttggggtttgttaatctctctccgtctggagatgagatcttctttgccgattggtggcgaaaggtatgtaagaagatacatagaagcaagagaaagggtatgaacatcaccattattttgggggcctggtatttatggattcaccgcaacaaggcagtcttcaatggagagaacccttctctgggcacaatctgatgtgtttttgtagatgagttggtgtgttggattaaggctggagctaaacatcttgagaacttaggcctagaggtcgcacttaatatgaacatgacataatttttgtgggtgtggagtcccccttagtcccgccatggccttcctctgttctggtggaggctgtagtttggctgcaggatagtatgtgtttaccttgcctgttaggctctgtaccttggtccattttggatcttttcttctctaattaaatgatgcacaactctcctgctctttcgaaaaaattaatttctttgtaactaccatcaaaggttggcccatatccttgatttacaggtgaattccgctttcatggggaagcgcaagatgcttaggaaatctcttcagcacatatgctcttcttctgagattgaggctgctcttgacaacattggccttccagttacagaattgcttgttggcatggtgttcaacagttggagtaacttacgcctgaccgctgagagttgctatgcagctacaggtgcattcagctcagctccggggcgaagccaggaattacatgtagggaggccggccgaaagagccatcttgtaaaaaaatgatcgcgggttcaactggtttggttactcgcacttagcgtctgtctgagttaatacttgacaaaaaaaaaaaaacaagcacagctcaactggttaggtttctcgtagtggtggtggtcgtttgggttaattcatcgacttgacacggttgctcctatttttttttctatatgtattctagatagtgagggtttattgtattttgatcgtagacgctaatcagaaactctactgaatggatgccttcgttctctctgagtacaaaggccccattgaaatatgtatgagaaataaagcaaatttagaggaccggtagcatttccttctgcttatttgcctcctttttcaccacgtgagcatctaaccaatacaagactgtttagcagatctgtaaggccttgttcgtttacgtcggattgcatccgaaatcgttccagttaatcaaagtttatataaattagagaagcaatccggttatgaatcgttccgatccaccaatccggtacaaacgaacaaggcctaaacaacattgtttaccaagtgaagtttaaaataggatgtgagatagaaaataagataagagagctacatgagatagccttagcgtgtcttag

SEQ ID NO: 213814 - DNA, 3225 bp, Zea Mays
aagggcgagcaaaactggaagcctacgaaaatggtggagctcacctccttatccccagggccaccacgtccttctcggctgactcctcgccgccggccgccgccgccgacacctcatgttcatacctcctcgcgtcgtcgcgggaggatcctcggcgccgcgaccgccacgcctggcgccgacgactaccactccaccatccgctccctcaactcccgcggccgccacgtcccccgaaaatccctcgggcagaactacacgctcaactccaaggtgaacgaggagctggtggcggcggcgggggtggaggagggtgacgtcgtgctcgagatcggcccaggcaccggctcgctcacttccgcgctgctccaggccggcgctaccgtctttgccgtcgagaaggacaagcatatggctactctcgttaaagataggtttggatctacagaacagttgaaggtcattgaagaagacatcacaaaatttcacatccgttcccattttcttcctttcatgaaggagaaatacggtgccaccaaaaaacttgcaaaggttgcatcaaacttaccattcaatgtcagcaccgaagttgtcaaactactactcccaatgggggatgttttctctgtcgtggtgcttatgcttcaggatgaaacagcagtacgccttgcagatgcttcaatacaaagtccagagtaccgatctatcaatgtgtttgtggatttttactcggaacctgaatacaagttcagagtagacagagagaattttttccctcggcctaaggttgatggtgctgttatcagcttcaaactaaagaatgcggaggagtatccgccagttagttccccaaaaagcttcttttcaatggtgagtagtgggtcatggggtcatggtgtgcagaaacttgtcccaaatctgaattgctttctgtggttgagggagaaaggacgtgaatggaagcaattgtttatctttggatatcgttacaaggccgctcattcttggtggtcttggagtccctaatctgtatttccaaagctgggcactgtaagctaaatggttgtggctggagaaaacagacactaacagaccttggcatgggttaaaactgcatgtactaaagcaagtaaggaagttctttcaatcttcggttgttactgtggttggaaatgagaacaagactttattctagtcggacagatggttagacggcggctgcatcaaggaatttgctcctgctgttgttgctaaagtcggtaaaagtgttgtttccactagaactgcggcccaagctattggaaactggcaatggatcagtgaaatcatgacacccctttcctgggttgggttacaacagttcttgcttttatgggatgctgtaagaagagtggtgttaacacatgaagctgataaacatatatggctgcatacttcctctggccagttctcctcctaagtcatgttacaaggcatttttcatgggatccattacttttgagccttggaggaggctgtggaagtcttggactcctccaaaatgcaaatttttccagtggctggctatacggaataaatgttggacatcagatagattggaaattggaaaggagaggtttggatcacccaaaatcttgtttattatgtgatcaaacacaagaaaccatccaatatctattgtgtacgtgcgtctttgcaagacagttttggcataccatcttttcgcccttggggtttgttaatctctctccgtctggagatgagatcttctttgccgattggtggcgaaaggtatgtaagaagatacatagaagcaagagaaagggtatgaacatcaccattattttgggggcctggtatttatggattcaccgcaacaaggcagtcttcaatggagagaacccttctctgggcacaatctgatgtgtttttgtagatgagttggtgtgttggattaaggctggagctaaacatcttgagaacttaggcctagaggtcgcacttaatatgaacatgacataatttttgtgggtgtggagtcccccttagtcccgccatggccttcctctgttctggtggaggctgtagtttggctgcaggatagtatgtgtttaccttgcctgttaggctctgtaccttggtccattttggatcttttcttctctaattaaatgatgcacaactctcctgctctttcgaaaaaattaatttctttgtaactaccatcaaaggttggcccatatccttgatttacaggtgaattccgctttcatggggaagcgcaagatgcttaggaaatctcttcagcacatatgctcttcttctgagattgaggctgctcttgacaacattggccttccagttacaaccttctgatttgattttggatgatttcgtgagattgcacaatcatttagcgaaagtatgactaagaagtgcctttcaaaatgcctaaggaattgcttgttggcatggtgttcaacagttggagtaacttacgcctgaccgctgagagttgctatgcagctacaggtgcattcagctcagctccggggcgaagccaggaattacatgtagggaggccggccgaaagagccatcttgtaaaaaaatgatcgcgggttcaactggtttggttactcgcacttagcgtctgtctgagttaatacttgacaaaaaaaaaaaaacaagcacagctcaactggttaggtttctcgtagtggtggtggtcgtttgggttaattcatcgacttgacacggttgctcctatttttttttctatatgtattctagatagtgagggtttattgtattttgatcgtagacgctaatcagaaactctactgaatggatgccttcgttctctctgagtacaaaggccccattgaaatatgtatgagaaataaagcaaatttagaggaccggtagcatttccttctgcttatttgcctcctttttcaccacgtgagcatctaaccaatacaagactgtttagcagatctgtaaggccttgttcgtttacgtcggattgcatccgaaatcgttccagttaatcaaagtttatataaattagagaagcaatccggttatgaatcgttccgatccaccaatccggtacaaacgaacaaggcctaaacaacattgtttaccaagtgaagtttaaaataggatgtgagatagaaaataagataagagagctacatgagatagccttagcgtgtcttag

SEQ ID NO: 213815 - DNA, 3346 bp, Zea Mays
ggggaatcggggatcgggtccccattgccatctctacactgtagaactccatccaaaagtcttacaccctttattcttacgaaactatatgaggaaaagcgaaaggggaggaaaataagggcgagcaaaactggaagcctacgaaaatggtggagctcacctccttatccccagggccaccacgtccttctcggctgactcctcgccgccggccgccgccgccgacacctcatgttcatacctcctcgcgtcgtcgcgggaggatcctcggcgccgcgaccgccacgcctggcgccgacgactaccactccaccatccgctccctcaactcccgcggccgccacgtcccccgaaaatccctcgggcagaactacacgctcaactccaaggtgaacgaggagctggtggcggcggcgggggtggaggagggtgacgtcgtgctcgagatcggcccaggcaccggctcgctcacttccgcgctgctccaggccggcgctaccgtctttgccgtcgagaaggacaagcatatggctactctcgttaaagataggtttggatctacagaacagttgaaggtcattgaagaagacatcacaaaatttcacatccgttcccattttcttcctttcatgaaggagaaatacggtgccaccaaaaaacttgcaaaggttgcatcaaacttaccattcaatgtcagcaccgaagttgtcaaactactactcccaatgggggatgttttctctgtcgtggtgcttatgcttcaggatgaaacagcagtacgccttgcagatgcttcaatacaaagtccagagtaccgatctatcaatgtgtttgtggatttttactcggaacctgaatacaagttcagagtagacagagagaattttttccctcggcctaaggttgatggtgctgttatcagcttcaaactaaagaatgcggaggagtatccgccagttagttccccaaaaagcttcttttcaatggtgagtagtgggtcatggggtcatggtgtgcagaaacttgtcccaaatctgaattgctttctgtggttgagggagaaaggacgtgaatggaagcaattgtttatctttggatatcgttacaaggccgctcattcttggtggtcttggagtccctaatctgtatttccaaagctgggcactgtaagctaaatggttgtggctggagaaaacagacactaacagaccttggcatgggttaaaactgcatgtactaaagcaagtaaggaagttctttcaatcttcggttgttactgtggttggaaatgagaacaagactttattctagtcggacagatggttagacggcggctgcatcaaggaatttgctcctgctgttgttgctaaagtcggtaaaagtgttgtttccactagaactgcggcccaagctattggaaactggcaatggatcagtgaaatcatgacacccctttcctgggttgggttacaacagttcttgcttttatgggatgctgtaagaagagtggtgttaacacatgaagctgataaacatatatggctgcatacttcctctggccagttctcctcctaagtcatgttacaaggcatttttcatgggatccattacttttgagccttggaggaggctgtggaagtcttggactcctccaaaatgcaaatttttccagtggctggctatacggaataaatgttggacatcagatagattggaaattggaaaggagaggtttggatcacccaaaatcttgtttattatgtgatcaaacacaagaaaccatccaatatctattgtgtacgtgcgtctttgcaagacagttttggcataccatcttttcgcccttggggtttgttaatctctctccgtctggagatgagatcttctttgccgattggtggcgaaaggtatgtaagaagatacatagaagcaagagaaagggtatgaacatcaccattattttgggggcctggtatttatggattcaccgcaacaaggcagtcttcaatggagagaacccttctctgggcacaatctgatgtgtttttgtagatgagttggtgtgttggattaaggctggagctaaacatcttgagaacttaggcctagaggtcgcacttaatatgaacatgacataatttttgtgggtgtggagtcccccttagtcccgccatggccttcctctgttctggtggaggctgtagtttggctgcaggatagtatgtgtttaccttgcctgttaggctctgtaccttggtccattttggatcttttcttctctaattaaatgatgcacaactctcctgctctttcgaaaaaattaatttctttgtaactaccatcaaaggttggcccatatccttgatttacaggtgaattccgctttcatggggaagcgcaagatgcttaggaaatctcttcagcacatatgctcttcttctgagattgaggctgctcttgacaacattggccttccagttacagctagaccttctgatttgattttggatgatttcgtgagattgcacaatcatttagcgaaagtatgactaagaagtgcctttcaaaatgcctaaggaattgcttgttggcatggtgttcaacagttggagtaacttacgcctgaccgctgagagttgctatgcagctacaggtgcattcagctcagctccggggcgaagccaggaattacatgtagggaggccggccgaaagagccatcttgtaaaaaaatgatcgcgggttcaactggtttggttactcgcacttagcgtctgtctgagttaatacttgacaaaaaaaaaaaaacaagcacagctcaactggttaggtttctcgtagtggtggtggtcgtttgggttaattcatcgacttgacacggttgctcctatttttttttctatatgtattctagatagtgagggtttattgtattttgatcgtagacgctaatcagaaactctactgaatggatgccttcgttctctctgagtacaaaggccccattgaaatatgtatgagaaataaagcaaatttagaggaccggtagcatttccttctgcttatttgcctcctttttcaccacgtgagcatctaaccaatacaagactgtttagcagatctgtaaggccttgttcgtttacgtcggattgcatccgaaatcgttccagttaatcaaagtttatataaattagagaagcaatccggttatgaatcgttccgatccaccaatccggtacaaacgaacaaggcctaaacaacattgtttaccaagtgaagtttaaaataggatgtgagatagaaaataagataagagagctacatgagatagccttagcgtgtcttag

SEQ ID NO: 213816 - DNA, 1428 bp, Zea Mays
tccgagtatcggccaaacggacagtgcagagattcgaagaagacacaaataaaatctcgccaaattcatgaactctctagtctctactctcttctcctggcaacgatttccaaacgcacgcaaacgctgtcacagtttgtcacggcagcggcaagtcggcaacgctgccgcggcacgtctcctccctctcttttccggttcgggtagtcgggtgtaccgccattcgtgatcgaaccagactcgagagggagaggaggagggagtccgaggggagagacccaattagctgcagggattggtcgggttcggctccgccttcggagagtcccaagagatgggtggcgcggcggcgggtaccaagtggatccaccacatccagcgcctcagcgcggccaaggtgtcggcggaggcggtggagcggggccagagccgcgtcatcgacgcctccctcaccctaattcgcgagcgcgcaaagctcaaggcagagttgctgcgtgctctgggtggcgtgaaagcttcagcgtcgctcttaggggtccctcttggtcacaactcatcctttttacaaggccctgcatttgctcctccacgcatacgggaggccatttggtgtggaagcacaaactctagcacagaggaaggcaaagaattgaatgatcctcgggtgctaactgatgttggagatgtccccattcacgagatccgtgactgtggtgtcgaagatgacagattaatgcatgtaattagtgagtctgtcaaaacagtgatggaggaggagcctcttcgaccgttggtgttaggaggcgatcattcaatatcttatccagtgaataatggaaggtggttatgccaggagactgctacaggttggattgagatcaatcaccaaagaagggcgtgaacaagggaagagatttggtgtggaacagtatgagatgcgaaccttctcaaaggaccgagagaagcttgagaatctgaaacttggggaaggcgtaaagggtgtgtatgtctcagttgatgtggactgccttgacccagcgtttgctcctggggtctctcacatcgaacctggaggcctctccttccgcaatgtcctcaacatcctccagaatttgcagggtgacgttgtcgccgctgatgtggtggagttcaacccacagcgtgacacggtagatgggatgacagccatggtcgccgcgaagctggttcgggagctcactgctaagatctccaagtgaaacggtcaggattgcaccactcttcttgaagcaaagcgaaagggtgggttttgatgtcccggtggttattggtcatggtttctatgtatcgagcaccaaattgttcgacatgtgacaggtttatatgttaattaggttgcaataacaccataatggtttatttaaaaaaattctaaaaaaatacaaaaaa

SEQ ID NO: 213817 - DNA, 2104 bp, Zea Mays
ctctccctctgcggcacactcgcacccttccgctagccttccttcttgaatcttgagcacagagtaggctcgctcacaggacagtcacttgcctgggaagccagatattattgcagcctcatacaccgcccttccctactgcttcctgagatttgagagctcgggcgccagatctgaaacctcttgtgttgtgcctttggtagttcggtgtagcattgagctagcagaggtgctgttctagttccaggatgagcaaggaggatgtcctcaaggtgcagacattgatgctgagagtgaacatacactgtgacgggtgcgagaagaaggtcaagaagaccctccacaagatcgacggtgtctaccagagcagcatcgacgcggaacagggcaaggtgacggtgtccggtttgctggatccggacaccatcatcaggaagctcaacaaggccggcaagccggctcagctgtggggttccaagcccggcatccctcagaacgcctaccatggcggcggcaaggcccagaagggcggtgcgggtggcggcggtcacaagggccctggcggtggcggtggcggaggcggtggcgtgggcaatcctaagatggtgatgccgcagccgacgccgcagcagctccagcagctgcagcagcagctgcagatgaaggggctgaagcttccgccgcacctgttgggcggcaatatgccggcgttccccgcggctgcgccgatgaaggaccccgagtccgtcaagtttgccctccccgaggacgactttcgacgactacggccgcgtagttcgacgatgacttcgacgacggcttcgacgacgacgaggacgactacgacgacgacggcctggacgacgacgtctacggcgaccccaagatgatgatgaaagcccatggctgtgccgccgccggcccggcgggggcgacaagaagggcggtggcggcaagaagggtggtggtggggggaacgagatcccggtgcagatcaagggaaacaaccacggcggtgccggtgggcagccgcacaatgcaaagggaggcgccccgggaggcggggcccacctgggccaggggaagaagggcggcggcagcgccgccgccgtcggtgtcggtggcccgatgggcggaatgctgcctcaacaaggcatgatgaggcctcctaacattcttggtggtgctggtgccggcttccccagcacggcccagatgggcggcggacctatgggcatgccggttggccacccgcacatgggtattatgcagcagagcggcggtggcggttgcggagctggcggcatgccgggcctggggttccacccgggattgggcggcggaatgcattctggggcggatatgcttcaggccgccgcggcatccgggaaccccgtggcgcagcagcagtacatggccttgatgcagcagcagcagcagcagatgatgatgatgcagcagcagcaacagcagcacgggaacggcggtgcaggatacccggcggcaatgggctacggctatggccggccaccgatgcattacccaatgggctacccagtgctgcccccgcactcgcatgctgagccttacaacatcttcagcgacgagaacgccaacagctgctcactgatgtgatcagcaattccgcatggaatggccctgttccaagtaaaccatctcaaggagctcaatgtcaccgctgatcaccgacagacatcgccatggttgaagcgccgtgaatcaatcaacaatcagtatgcttggggatgagtcctagctagaaccctgtccctttcctgctccttccccccctttctctagcttattttcgccttgcttttaaaaaaaaaggaacttccttgaatgcgaagttaggtatagtaattatgaggtttccataagggaggggaggagagaggagacgatagggacttcgtacggggtcgttcgcttgtgggttcttcttccctcctggcttcataaaggtggactaatggtagaacaatgttgtcaatctcagtcgtaaatcagtgtgaatatgtcgtgatttctcttctaatctaactaactatatatatggtaataagttctgtttatcggagtc

SEQ ID NO: 213818 - DNA, 2012 bp, Zea Mays
cctacatctataccgtcggctgcagatccaacgtcaggactgccgcgcgactcggctctcgcttcccctatcgatagcgagcggcccgcccgtgcagacgcagagacacgaatgcctcctcgagcgggagccatggcggcggcggcggcgagggcaagggcggcgctgctgccctcctccccctccccatcgccgctgttccgcctcccgcgccgcttcctttcactcaccgcgactcgctaccctctctactacgacctcatcgtgcatcgccccgcggaccccaatccccccaaatcctccgccgccggggccgaccggcagccgcagccagcccccgaagagcagacgctcgaccgcgcaaagcgccggtacctccgcaagcgccgcagccgcctactccccgaccctgacgccaccaccaccactaagccctcctccttgtcgtcggagttcgtcgagctcaggccggaggtggtggacttcccgcgcctgcacgcgcgcgaggaggcgctctacttccacgacaccttcgcaatgccgtgggagaaggacaagcactaccgcatgctctaccgcctcgagaagaagtacttcccccaccagtcgctcgacaacgcgttcgtctccgccgacgccgccccggcctccgacgccgacagggggctcgtattctttgacgacgagaagaaggaaaacgagggagaggagcgggcggtcagtgacaagggcgccaacaaaggggaggtgctggagaggaaggtggaggatttcttcaggtctctcaagaagggtcccggccaagtcgacaccaaagccaagagaccgggaacggagccgcagcagcaggtgaagcgcgaagtgcggagggaggaggagcggccgcagccgtacctcgtcactaggaccacggagctgccgccgaggtgggacggccctgctgggaccgtcgtgctcatcgacaagcccaaaggatggacttcgtttactgtctgtggaaagttacggcgcttggtgaaagttggacatgctggaactctggacccaatggcaactggattgttgattgtttgtgtaggaaaagcaaccaaaatagttgacagctaccaaggaatggttaagggctatagcggtgttttccgacttggagaagccacatcaacctgggatgcagattcaccaattatccagagggaaccatgggaacacatcaaagatgaaaatattagaaaggcagcagcatcattcatgggtgagatatggcaagttcctccaatgttttctgccattaaggttggcggtgaaaagatgtatgacaaagcaaggaagggtgaaacagtagagctttcaccaagacgtatatcgatataccaatttgatattgagcgcagtttggaagacagacagaatttgatatttcgagttacttgctcaaaaggaacatacattcggtccctatgtgcggacttgggtaaagcacttggaagctgtgctcatttaactgccttgcggagagactcgataggtgaatactcggtcaatgatgcttggaacttcgatgagcttgaagaacaaatcaccaaggggtatttatgagcatgccagtgagccgagctaggttatatgcggcttgcaaccagtggcatccatgctgccatgtcagtcccaaagctgtcaacgtgggcttcagcgaagagttgcaaatccagttcagttcatcctcaaccttttgtcatatagaggaacacgaagctccgttagttgtatgtgtgttgtgggtttcaattgatctcagtattgaatcgattttggcagtattgatgtataccattgttggtcaggtcttttgattgccttgccatgtaattttgctgggagcatattaaatttataatctaaagactgtgttaaaagtagcgaaatttataatctaatgacgaacacaagctggcgttaagtccacccctttttcttctctagaccctcgacgctcctcagagcatgaacagtgc

SEQ ID NO: 213819 - DNA, 2066 bp, Zea Mays
cctacatctataccgtcggctgcagatccaacgtcaggactgccgcgcgactcggctctcgcttcccctatcgatagcgagcggcccgcccgtgcagacgcagagacacgaatgcctcctcgagcgggagccatggcggcggcggcggcgagggcaagggcggcgctgctgccctcctccccctccccatcgccgctgttccgcctcccgcgccgcttcctttcactcaccgcgactcgctaccctctctactacgacctcatcgtgcatcgccccgcggaccccaatccccccaaatcctccgccgccggggccgaccggcagccgcagccagcccccgaagagcagacgctcgaccgcgcaaagcgccggtacctccgcaagcgccgcagccgcctactccccgaccctgacgccaccaccaccactaagccctcctccttgtcgtcggagttcgtcgagctcaggccggaggtggtggacttcccgcgcctgcacgcgcgcgaggaggcgctctacttccacgacaccttcgcaatgccgtgggagaaggacaagcactaccgcatgctctaccgcctcgagaagaagtacttcccccaccagtcgctcgacaacgcgttcgtctccgccgacgccgccccggcctccgacgccgacagggggctcgtattctttgacgacgagaagaaggaaaacgagggagaggagcgggcggtcagtgacaagggcgccaacaaaggggaggtgctggagaggaaggtggaggatttcttcaggtctctcaagaagggtcccggccaagtcgacaccaaagccaagagaccgggaacggagccgcagcagcaggtgaagcgcgaagtgcggagggaggaggagcggccgcagccgtacctcgtcactaggaccacggagctgccgccgaggtgggacggccctgctgggaccgtcgtgctcatcgacaagcccaaaggatggacttcgtttactgtctgtggaaagttacggcgcttggtgaaagtacaaaagcccttagcattaagtacatgttttgcaatatttgtgtggtctcaggttggacatgctggaactctggacccaatggcaactggattgttgattgtttgtgtaggaaaagcaaccaaaatagttgacagctaccaaggaatggttaagggctatagcggtgttttccgacttggagaagccacatcaacctgggatgcagattcaccaattatccagagggaaccatgggaacacatcaaagatgaaaatattagaaaggcagcagcatcattcatgggtgagatatggcaagttcctccaatgttttctgccattaaggttggcggtgaaaagatgtatgacaaagcaaggaagggtgaaacagtagagctttcaccaagacgtatatcgatataccaatttgatattgagcgcagtttggaagacagacagaatttgatatttcgagttacttgctcaaaaggaacatacattcggtccctatgtgcggacttgggtaaagcacttggaagctgtgctcatttaactgccttgcggagagactcgataggtgaatactcggtcaatgatgcttggaacttcgatgagcttgaagaacaaatcaccaaggggtatttatgagcatgccagtgagccgagctaggttatatgcggcttgcaaccagtggcatccatgctgccatgtcagtcccaaagctgtcaacgtgggcttcagcgaagagttgcaaatccagttcagttcatcctcaaccttttgtcatatagaggaacacgaagctccgttagttgtatgtgtgttgtgggtttcaattgatctcagtattgaatcgattttggcagtattgatgtataccattgttggtcaggtcttttgattgccttgccatgtaattttgctgggagcatattaaatttataatctaaagactgtgttaaaagtagcgaaatttataatctaatgacgaacacaagctggcgttaagtccacccctttttcttctctagaccctcgacgctcctcagagcatgaacagtgc

SEQ ID NO: 213820 - DNA, 2452 bp, Zea Mays
gttcgtttttctctctgcttgcgtagttgcgtctccccctccgccccgcccctctccatttggcagcagccagagccacgcgcgcgcgccggcctccctcctcgcgacctcctggcccgctgatctctggccggccgtcgtcggtgtaaccatggcggcggcggcggctttcgtcgtcgtcgttgtccaactccaagcatcatcaggagtttcgttcgccctgcagtctccgttccgtgatgagctgctcgccgtttgaagctggtcgcggaaactaaaccggccgcgcgcgggttcagagacacatggacaagagcggcggcagcagcaggaagacgaggaggaagaagaagtctctcttcccaaaactccacggagcagaagatgatgttgggaataatgatgcctcgccgagacgtctcgccgcagttgctggcttgaaggagtcccctgaacggtggtcagtggcagcagtggcttccccgtcagcgtcagcgtcgtcctcatccttcttcaaaagcctttcggagagcaggagtctaaagtttggcggcggtttcggttcgcctgcaccagccagcgccgctgctcatacggaagctttcagggtgtttgcagccacatggaacgtagccgggaaggccccggacaagggtctaagtctcaacgatttcctgccttctgatgactactcggacatttatgtgctagggttccaggaagtggtcccgctgaacgccggcaacgtgctggtgatcgaggacaacgagccggcgtcgagatggctggcgctcatcaaccaggcgctgaaccggccgtcgccgccttccgacgcctccgcggcatcggaagctccagcgaccagctgctcgttcagccggtcgtccctggacacggcggcggcggcggtggctgtgcagacgccggcgacgccgagcgccagccgctggacccatcccggttccacaaggcctccaacagggagatccggcgcgccgccatcacccgcgggcggcggctcaaggcgtgcacgtgcccgtcgccggaccaccagcaccgtcgccgccgccgccggcgcctgccgctgagggcgccctgcctgatgggctgcggcggcaggggcgcgagcgccgcagccgtcgagggcgacgacacgacgacgacgtccgacgaggaggacgaggaggtcagggccagcagcttcgcggcgtccgacgtgaccaagagccccgccgccgctgccgcctgggcggctgcgggtgcgggggcgccgggccggcgcgagaggtactgcctggtggcgtgcaagcagatggtggggctgttcgcgacggtgtgggtgaggcgcgggctggtgccccacgtcggccacgtccgcttctcctgcgtcggccgcggcatcatgggctacctcggcaacaaggggtgcatctcggtgagcatgtcgctgcaccagacgagcctgtgcttcgtgtgcagccacctggcgtcgggggagaaggagggggacgagctgaggcggaactcggacgtggtggagatcctcaggaacacgcagttccgccgcctctgcaagcgctccggccgccggatacccgagcggatcctcgaccacgatcgtgtgatctggctaggcgacctcaactaccggatcgctctgagctacacggaggccaagaagctcgtccaggccaacgactgggccgctctcttcgagaaggatcagctcaagactgaaagggagagcggggtgttcagagggtggaacgagggcaagatcctcttcgccccgacgtacaagtactcgtggaactccgacacctacgccggcgaggacgtgtcgtccaagaagaagaggaggacgccggcatggtgcgaccgcatcctctggcacggcgaagggatagtgcagctgtcctacatccgcggcgagtccaagttctccgaccaccgccctgtctgcggcgtgttcatcgtcgaggccgcggtcgtccccgacagcagccgcctcgtcaagttcgcctcgggccccaacatgaaagtcggcgcggaggagctcctgctcgcctcctccaagtatgatctatagcagcgcatggcaatccaaagcagcggccctactagagagactcaggaaggctaaccgaaaaaatgatcaaggaccacaccacacgccgttctgttcattgctattacttcaagaaccaagactgctcgctcccatccacagagtaccatcagtacagactacagagtacagcactgatacagcatcttcattctatatatgggccgtgattcatttgattttattaacttaaagttgatgtttttttcttctccatttcaagagggaaacaaaaatgcagtcttgtgcatgtttatgcaatgcccatacacgtctgactggcaaatgaaatagttgcataaatatatggagtatggtattgtg

SEQ ID NO: 213821 - DNA, 1762 bp, Zea Mays
aattttcagcacatttttttaagttccaggaagtggtcccgctgaacgccggcaacgtgctggtgatcgaggacaacgagccggcgtcgagatggctggcgctcatcaaccaggcgctgaaccggccgtcgccgccttccgacgcctccgcggcatcggaagctccagcgaccagctgctcgttcagccggtcgtccctggacacggcggcggcggcggtggctgtgcagacgccggcgacgccgagcgccagccgctggacccatcccggttccacaaggcctccaacagggagatccggcgcgccgccatcacccgcgggcggcggctcaaggcgtgcacgtgcccgtcgccggaccaccagcaccgtcgccgccgccgccggcgcctgccgctgagggcgccctgcctgatgggctgcggcggcaggggcgcgagcgccgcagccgtcgagggcgacgacacgacgacgacgtccgacgaggaggacgaggaggtcagggccagcagcttcgcggcgtccgacgtgaccaagagccccgccgccgctgccgcctgggcggctgcgggtgcgggggcgccgggccggcgcgagaggtactgcctggtggcgtgcaagcagatggtggggctgttcgcgacggtgtgggtgaggcgcgggctggtgccccacgtcggccacgtccgcttctcctgcgtcggccgcggcatcatgggctacctcggcaacaaggggtgcatctcggtgagcatgtcgctgcaccagacgagcctgtgcttcgtgtgcagccacctggcgtcgggggagaaggagggggacgagctgaggcggaactcggacgtggtggagatcctcaggaacacgcagttccgccgcctctgcaagcgctccggccgccggatacccgagcggatcctcgaccacgatcgtgtgatctggctaggcgacctcaactaccggatcgctctgagctacacggaggccaagaagctcgtccaggccaacgactgggccgctctcttcgagaaggatcagctcaagactgaaagggagagcggggtgttcagagggtggaacgagggcaagatcctcttcgccccgacgtacaagtactcgtggaactccgacacctacgccggcgaggacgtgtcgtccaagaagaagaggaggacgccggcatggtgcgaccgcatcctctggcacggcgaagggatagtgcagctgtcctacatccgcggcgagtccaagttctccgaccaccgccctgtctgcggcgtgttcatcgtcgaggccgcggtcgtccccgacagcagccgcctcgtcaagttcgcctcgggccccaacatgaaagtcggcgcggaggagctcctgctcgcctcctccaagtatgatctatagcagcgcatggcaatccaaagcagcggccctactagagagactcaggaaggctaaccgaaaaaatgatcaaggaccacaccacacgccgttctgttcattgctattacttcaagaaccaagactgctcgctcccatccacagagtaccatcagtacagactacagagtacagcactgatacagcatcttcattctatatatgggccgtgattcatttgattttattaacttaaagttgatgtttttttcttctccatttcaagagggaaacaaaaatgcagtcttgtgcatgtttatgcaatgcccatacacgtctgactggcaaatgaaatagttgcataaatatatggagtatggtattgtg

SEQ ID NO: 213822 - DNA, 954 bp, Zea Mays
tctgcgattgagatcttcaatggtgtgttcctcaaagtcaacaaggcgactattaacatgctacgcagggttgagccatatgttgcatatgggtacccaaacttgaagagtgtcagggagttgatctacaagaggggctatggaaagctgaacaagcagaggatccctctgtccaacaaccaagtcatcgaggagggcttgggcaagcacaacatcatctgcgtcgaggatcttgttcacgagatcatgactgttggcccacacttcaaggaggcaaacaacttcctgtgcagggcggtgatgccgggcggtgatcaagtggaaggaaacaaactccaaataggtggtgtggcagagcacgaagaagacgctggtgaaggagccccacaggccacggtgttgcagaacacaggagccttccagaactctgaaagaattggacggtcgcatcgacgccaggttccagcagaggagtttttgaagatcatccatttactcaacaacagcttccagcttgcaagactatacttgcgactcagacagtcattcttgtacttctgtttatggtggaaccagcacggcctaggcggtgacaacgtgttcggtagctgccgtcctctccataacgggctcgtcagcctcatgcactggtctgggaagggcaagccatgggaccgtctcgacgccgacaagccttgcgcactggaccacacctggaaggtgtacgacctctacattggcgagaatgattcatcatcagcatcaacttcatcgggcgtggtcttgctgtatcgctcgcaaggcaaggtgatgaactgcggtggcggcggaagttgtggcacttgcatcgtcgagataatcgatggaaaggagctcctgaatgagaggacgagcaccgagaatcgatacctgaagaaggttgtcgtccaacggctgccccagtggaagagatga

SEQ ID NO: 213823 - DNA, 1643 bp, Zea Mays
ggggtgttagtacaaatatgttgcgagacacgttctttggcttcgacgagggaggcgagcactgcacgaggacccacctgccagttgctagcacgattccatttcgacctcgccgcgaacgccagctaccggttcgcgctcgcgccacagcgccgaacgcatggcgctcctcctcctcctcgtcctgctccgctccgccgccagcgctggcgcgggcgctgaaccgcatcgctccccggccactgccctcttcgtcctgggcgactccacggtcggctgcgccgcggcgacggcgagcagcattctgtcgctcaacctgaccaccaccaccaccacgctgccgtcctcgctctccggcgagccgtgcctcttcttccacgaggcgcggctccgcgtcccggacctcctcgcggccaagatgggcctcccttcgccgcccccgatctccgcgctcaacggcacagcgtccgccgccgcgcgcggcgtcaacttcggcggcggcggcgggcagctgctgttctacggaggcggaggcggggtgcgcgggccggcgtccgtcttcctcacgggcgccgtcgggcagcaggtccgcctcgcctccgagacgctgcagctgctgcggctcgaggccgccgcgccgggggagccgtcgtcctcgcccgccgcagtgttcgtcctgtccttcggcgccgacgcctacgcgcgcctgctcgcgcgcgggcccgccgaggccgccgccgccgcgcccaagcacggccgccgcgggctcgcccgcctcctcgccgaccgcgtcgcgcgcgcagtctcggagctgtacgaggccggcgcgaggagggtggcggtgatgggggtgccgccgctggggtgcgcgccgcgcgtcgtgtgggagcggtcgtcccccgtccgcgacggcggcgcaggatgcgtcgaggaggcgaacgagctgatccaagggtacaacggcaggctcgcggcgaggctggacgagctgcggctggcgctggccggcgccgacgttgtgttctgcgacgtgtacaaggggatgatggagatcatctccaacccgaccacgtatgggttcgaggagacgagggaggcatgctgcgggctggggcccatgagggccacggtgggctgcgtcagcaaggagatggcgtgcggcgcgccggagcgccacgtgtggtgggacatctacagccccacggaggccgcggatgccctcgtgaccaactggtcctggtcgtcggacggctccggcgccaccagcatctgcggccccatctctctgcagcagctggctgcagtgtcgccgtcgccgccgggggcgtaggaacaaaccactcgttgtatttagttcactcgtattacccgccggagaccactcttatttaggaatctcttggcctatgactacgggcggtgcgttaagagaaccgtcaatggatatattgtttttcaatggcctttagcactgatggctccgaaaaaaagctagtaagtaggtttccaatcgtcaatgtatggtttctctgtacttgtggactctaagtcgtctgagcgatgcggttctattgcccggagaacagtaggtaaaaggagacacggacgttatttgaacaacagtgggtattagcgaaagtaag

SEQ ID NO: 213824 - DNA, 3145 bp, Zea Mays
ggtttgtgctagcacacttgtttcaattttcaaagtgtgaccaccggcaccaggtcaccacatgtgacacggctgcagggagacgacacgacggtcaagtaaaagtaaaaaaaaaaaacctgaggctggctggctacgctgagcaaaccctgtgccgcccccaaatggagaaggcgccggcaccagcaccagcaccgggcacccaacgggcgttcgtgtccgcctatcggatctggtcgctttgacgaaggaaccagcgaatgatcactgctactagctagctaggttgttgcgcggccgcgataagagtaacatgacacttgttttgcttttgtttttactaggcttgctgagtgaggtgctgctgatggatcatggatgtggtgcggtgctgccttttataaccgcgcgcgcgcaccacacaacacaacagacaccaccacggccccgcgcgcgcgcgcctccctctccctcctagtcctaggcacacacaacacaacgcaatcctccaccggctccgctacccgcgggcgggcgggcgcttttcgcctcctctgctccgagctctcctaggttggaagagtctttgccaaggggataacaaaagagaaaagtacttgcataccccaacaaggcagcagcggctgcttttggcctcctttttctcgcacctcgctcctctattctcttctcttgttcgttcatcacccgagttggagtgcgaggcaagaaggagatcgagcctgaggagggagggagccagggagggaactggacgtccggaccaccaccaccaccaccacacacacaccagcctcgtacgaagtaaggaaggaaggaagcccagcgcctagcagccatgtgggaccttaacgactcgccggccgccgaggccgccccgccttccccgtccgccgacgactccggcgcgtcctcctcgtcggcggccgcgctggtcgagatacccgacgacgcggacgacgactcggccgccgccgccgcggaagccgtcgtcacgcgccagttcttcccggccccggccgccgtcggcgcggcgcccgggcccggctcgtcgagcgcgcgcgcgggctggcttcgcctggccgccgcggctccaccgcccgcggcgggcggcagtaacggcgtcgcgcaaaccggtggccccgcggcggcggcggcggcggctggcaagaagagccggcgcgggccgcggtcgcgcagctcgcagtaccgcggcgtcacgttctaccgccggacggggcggtgggagtcgcacatatgggattgcggcaagcaggtctatttgggcgggtttgacaccgctcatgcggcggctcgggcgtacgatcgggcggcgatcaagttccgcggcgtggaggccgacatcaatttcagtctggaggattaccaggacgacatgaagcagatgggccacctgagcaaggaggagttcgttcacgtgctccggcggcagagcacggggttcccccggggcagctccaagtacagaggcgtgacgctccacaagtgcgggaggtgggaggcgcgcatgggccagttcctcggcaagaagtacgtctacttgggcctgttcgacaccgaggaggaagccgccagggcgtacgaccgcgcggccatcaagtgcaacggcaaggacgcggtgacaaacttcgatcccagcatttacgccgaggagctcgagccggcggcgtcgacgggcggcggtggcgatgaccacaatcacaacctggacctgtcgctggggagctcggcggggaacaaaaggggcagccttgacgacggcggcggcggaggaggcggcggcgacgacgagacctcggaccagcgcgtccccatggcgttcgacgtcgactggcagacggccgcgccccggagcacgaaagcaaagctggacgcgagctccaagcaaccccagacccagatgctgcctcctccgcctcctgctgtcttgcgagtcgcccaccagctgccgttgccgttcggtcccaggcatccgcaattcctgagcaacggcggcgatccggggacctcgggaggcctgtccctcgcgatcggcggcgcgggcggcgggcactggcctccccagctgcagcacctgcagcagcagaggctgcacggcgcctgggccaacggcggcggcacgagctggccgcctccgccgcacccgcacccgcacccgcacccgccgccaccgagcaccgccgcgaccgcagctgcagcatcatcacgattccctccctacgttgttactacgacgcaaggcccggcaggctgggctcagaagaatgggttccattcgctggccaggccaacctagtatgccaagaaccacgactggccggagcgttcattcgtcgtcgatcgtcgacccagggcaaacgacacctccaaccactgcacgacgacgttttaatttaccggatgccattctctctctcccctccccccttcccttctcccttctcccttctcccttctctgtgttcttgattgggtgagacatggatccgaggatggatggacggcctgtacctgaggagttcccgggaagaagacgagtgagtgagtgagtgattggtagggtaggcgactaggcgtcgcgtcaggcagtacgtccttttggcgccttttttcttctttcactcaccattggcgaccaccaatgaatgatgacactgactggggtgtcaacatcgcagctggttttgtttggtctcatgttgcatcactcgctgctccacgatgccttgctatggttggggggagatttgctccatccaccccacgccggtcaggcgacagagcctccgctgcgtcgtctcatccgtctggtgagttgccactgtcttagaatctgagtggtacggtacgtgtggatctcgcgcgcgtgtaaacctagtattatgtactacaaactgtcatcatcggagatcactcgaataagatatcgatcttgagattacgggcggcggctcctgtcatgtgcttactacagcaaagctgataaactgtccgagtctgaacagctcatgtaatggaacgccgcatagatatttccttcttgttaggggtactttggaaccccaattttttaagagatttttatttttccaaacaaaattag

SEQ ID NO: 213825 - DNA, 3154 bp, Zea Mays
ggtttgtgctagcacacttgtttcaattttcaaagtgtgaccaccggcaccaggtcaccacatgtgacacggctgcagggagacgacacgacggtcaagtaaaagtaaaaaaaaaaaacctgaggctggctggctacgctgagcaaaccctgtgccgcccccaaatggagaaggcgccggcaccagcaccagcaccgggcacccaacgggcgttcgtgtccgcctatcggatctggtcgctttgacgaaggaaccagcgaatgatcactgctactagctagctaggttgttgcgcggccgcgataagagtaacatgacacttgttttgcttttgtttttactaggcttgctgagtgaggtgctgctgatggatcatggatgtggtgcggtgctgccttttataaccgcgcgcgcgcaccacacaacacaacagacaccaccacggccccgcgcgcgcgcgcctccctctccctcctagtcctaggcacacacaacacaacgcaatcctccaccggctccgctacccgcgggcgggcgggcgcttttcgcctcctctgctccgagctctcctaggttggaagagtctttgccaaggggataacaaaagagaaaagtacttgcataccccaacaaggcagcagcggctgcttttggcctcctttttctcgcacctcgctcctctattctcttctcttgttcgttcatcacccgagttggagtgcgaggcaagaaggagatcgagcctgaggagggagggagccagggagggaactggacgtccggaccaccaccaccaccaccacacacacaccagcctcgtacgaagtaaggaaggaaggaagcccagcgcctagcagccatgtgggaccttaacgactcgccggccgccgaggccgccccgccttccccgtccgccgacgactccggcgcgtcctcctcgtcggcggccgcgctggtcgagatacccgacgacgcggacgacgactcggccgccgccgccgcggaagccgtcgtcacgcgccagttcttcccggccccggccgccgtcggcgcggcgcccgggcccggctcgtcgagcgcgcgcgcgggctggcttcgcctggccgccgcggctccaccgcccgcggcgggcggcagtaacggcgtcgcgcaaaccggtggccccgcggcggcggcggcggcggctggcaagaagagccggcgcgggccgcggtcgcgcagctcgcagtaccgcggcgtcacgttctaccgccggacggggcggtgggagtcgcacatatgggattgcggcaagcaggtctatttgggcgggtttgacaccgctcatgcggcggctcgggcgtacgatcgggcggcgatcaagttccgcggcgtggaggccgacatcaatttcagtctggaggattaccaggacgacatgaagcagcagatgggccacctgagcaaggaggagttcgttcacgtgctccggcggcagagcacggggttcccccggggcagctccaagtacagaggcgtgacgctccacaagtgcgggaggtgggaggcgcgcatgggccagttcctcggcaagaagtacgtctacttgggcctgttcgacaccgaggaggaagccgccagggcgtacgaccgcgcggccatcaagtgcaacggcaaggacgcggtgacaaacttcgatcccagcatttacgccgaggagctcgagccggcggcgtcgacgggcggcggtggcgatgaccacaatcacaacctggacctgtcgctggggagctcggcggggaacaaaaggggcagccttgacgacggcggcggcggaggaggcggcggcgacgacgagacctcggaccagcgcgtccccatggcgttcgacgtcgactggcagacggccgcgccccggagcacgaaagcaaagctggacgcgagctccaagcaaccccagacccagatgctgcctcctccgcctcctgctgtcttgcgagtcgcccaccagctgccgttgccgttcggtcccaggcatccgcaatcgcagttcctgagcaacggcggcgatccggggacctcgggaggcctgtccctcgcgatcggcggcgcgggcggcgggcactggcctccccagctgcagcacctgcagcagcagaggctgcacggcgcctgggccaacggcggcggcacgagctggccgcctccgccgcacccgcacccgcacccgcacccgccgccaccgagcaccgccgcgaccgcagctgcagcatcatcacgattccctccctacgttgttactacgacgcaaggcccggcaggctgggctcagaagaatgggttccattcgctggccaggccaacctagtatgccaagaaccacgactggccggagcgttcattcgtcgtcgatcgtcgacccagggcaaacgacacctccaaccactgcacgacgacgttttaatttaccggatgccattctctctctcccctccccccttcccttctcccttctcccttctcccttctctgtgttcttgattgggtgagacatggatccgaggatggatggacggcctgtacctgaggagttcccgggaagaagacgagtgagtgagtgagtgattggtagggtaggcgactaggcgtcgcgtcaggcagtacgtccttttggcgccttttttcttctttcactcaccattggcgaccaccaatgaatgatgacactgactggggtgtcaacatcgcagctggttttgtttggtctcatgttgcatcactcgctgctccacgatgccttgctatggttggggggagatttgctccatccaccccacgccggtcaggcgacagagcctccgctgcgtcgtctcatccgtctggtgagttgccactgtcttagaatctgagtggtacggtacgtgtggatctcgcgcgcgtgtaaacctagtattatgtactacaaactgtcatcatcggagatcactcgaataagatatcgatcttgagattacgggcggcggctcctgtcatgtgcttactacagcaaagctgataaactgtccgagtctgaacagctcatgtaatggaacgccgcatagatatttccttcttgttaggggtactttggaaccccaattttttaagagatttttatttttccaaacaaaattag

SEQ ID NO: 213826 - DNA, 2771 bp, Zea Mays
tgaaacccaattgctcggttgctcccgttgtcctctccgcggggtgcggcctggcttttcccttctcggcttctgccgttcgcgtgcggccgtgcgtcctctctttctttctcggcgcctctgtttctggcggccgcgactggcccagcgccaccgccgacctagccaggtgaccaggtcttcgtcaggaccatagccagcgaagaacacccaagtacccaacagatgagttcgaagaaggttccgtaccacaagcatagggaggctgaggaggcgaggaagaagagggaggaagatgaagcagcacgtgtatatgcggaatttgttgagtccttcaaaggtgatagttcatctggggctaagtttatccgaggtggtgtgattgaccccaatgcaaagctgaagactgactcggaaggtatgttccatccttcttgccaccatcatttgcaaaagagcctgagaaaaagaaggaaggggagaggccaaaggaaaaggaaaaggaaaagggaaagccacgagtaatagatagattcttggaggaaatcaagcttgaacaagagcagcgagagaagcgccatcaggatcgagatcaccgccgtgaaggtcgccatggcgatagctccatgtcctcgagccggtttgatgaactaccagatgaatttgatccgactgggagatttccaggatcatttgatgatggtgatcctcaaaccaccaacttatatgttggcaatctatctcccaagattatgtggcctagaacagaagaggaacgcagaaggcaaagaaattgtggttttgttgccttcatgaatagaacagatggacaagcagcaaaggatgaaatgcaaggtgttattgtgtatgactatgaactgaagattgggtggggtaaatctgttgctcttccgtcacaggctttgcctgctcctcctccaggacacatggcaatcagaaataaggagggtggtacagctacagtcatactttctggtcctggcggccctgctgttgcatctattaaaccacaaacctcagagctggtccttacaccaaatgttcctgatattgtggttgctccacctgatgatgggcatcttcggcatgtgattgacacaatggctctgcacgtacttgatggtggatgtgcttttgaacaagctgtaatggagagagggcgaggaaatcctttatttgatttcttgttcaatcttaaatctaaagagcacacatattatgtttggaggctatactcatttgcccagggtgatactctacaacgatggagaacagaaccctacatcatgatcacaggaagtggaagatgggtcccacctcccttgtcgtccaacagaagccctgaacgtgaaaaggaatctacatttgctgctggtagaagcaggcgtgttgaagtggagcgtacattgactgactcacagcgtgatgaatttgaggacatgctgcgagctttgacattagagaggagccaaataaaagacgccatgggatttgccttggataatgctgatgcagctggcgagattgttgaggttcttacagaatccttgacactcaaggagacgtctattccaacaaaggttgctcggcttatgctagtgtctgacatccttcataacagtagcgctcctgtgaagaacgcatctgcattccgaacgaagtttgaagcttctttgccagatgttatggagagctttaatgacttgtatcgcagtatcactggaaggattactgctgaagctctgaaggagagggttatgaaagttctacaagtttgggcagactggttcctgttttctgatgcatttcttaatgggctgagggctacttttcttagatcaggcaactctggtgttgttccgtttcactcgttatgtggtgatgcacccgaaattgaaaagaaaggtagctctgaggacggaaatgatggatttaagcttaatgaagacggtgccttggctactggaaaggcagcagcgacaaaggagctattagggctcccgctagctgaacttgagcgccgctgtagacataatggcctctctctgtgcggtggtaaagaaatgatggtcgccaggctgcttaacttggaagaggctgagaaggaacgaatttacgagaaggatgttgacgtgaaatatgtgcagggtgaacagcatgtggttggaagagaggacagtggtgtgaatgctcatagtacttcaaggtttggtgaaggttctaatggtgatgaattagatgtctctcggaacagtatgagagctggtaaaggacgttctggaggatctgcttctgccgaacttgaatcatttccaagcaagaagccgaaatacgatcctgttttgccagcttctaaatggagtcgagaggatgacatcagtgacgatgaagataggaaaggtggccgaggcttgggattaagctattcgtccggaagcgatattgctgatggtctcggaaaggtcgatacaacagaagctagtactgaccacacaagtcatcatcatgatacgattgttgatgaagagcacaggtgcttgtccgttttcaatatttttttaccattgccatgctagtttttgtaagtgtctgccacagtgttattaaaactacgtttaaacgatgtttaaactacgtttaaacgtcaaaactctaattagagattgaaaccgcgttttagcgttttggcgttctaaactgtaaaacgtagtgctttatccattttagaccataagctacttttgggctca

SEQ ID NO: 213827 - DNA, 1478 bp, Zea Mays
actaacacccctgaagtagaagaaaaatgccgtgagcgcagcagatgtcgtgcggtgcagtgcagtgcaggtgcgggatctctgaatcgctgacgcccagcctcctctgtcatctccctcctcggacctcgccacctcacgcggaaggaggggaagaggaagcgcggagactggaaatcgggccccaaatccgcttcggtctctcgatcggcgaggcatgattcatacaaccggctaggatggcctcaaaagctataaaaagaaggcctatcagcgctgagactgatacaacaggggaaaaacaaatggatacagcactgtcagatcctgtaacagaacctcttctaggaaacactcctcaggaagagaaatccaagacatatgagcctattacacggtcaggtttctgggatgggacggcacaggagtgtcttcgttggacacatcttttagcagcttttgttgctcaatctgcaagaaacatagtaaatgttctttctgaatttggatatttgctagcaagactctttggttgctcttctgcttccaaaagttcacaaaatggacagacacttccagttaacctcagtccattacaggaagaaaggttaagattgttgagacaaaggatagatgtgccatatgactgctcctctgtcaagcatcaggatgccctgaaagaactttggaagttggcttaccctaacagacaacttcctcctctgaagtcagatctctggaaggagatgggctggcagaactccgatccatccacagattttagagcagctgggttcatgtccttggagaatctaatatattttgccagaaattacccattgattttacatgcaggattcctttcacaggctactgcataaagcagatggtaagagagctgaatgggagtatccttttgcagtaggcggcgtaaacatatcctatatgttagttcaaatgctggatttacagtcaggaaaaatgagaacaaaagctggtgttcactttgttcaactactcgatgatgacggtgtggctttcgataaccttttctgtgtagcatttcaggtgcttgattctcaatggcttgcaaggcgagcgagttatatggaattcaatgaggttctgaagtctacacggggtcagttagagcaagagcttactatcggaggtatttctcgcattcaagacatgccatcattcagaatgctgagaaggtagcgctgtttgtacttcacaggaaaagagatacattttagattccaatatattgtttaaatttgttgtccgttctttcactggattttgaagacgtgacattgtgtatgttattgagtatattgtttgtaatgtcgcagcttaaagctacagatcataatatatgatatgatatcttgaaaagaaaaactacgacttccagacatttttattccctggacaatacgtgacaaattatttctaagtgtctcagagtaaat

SEQ ID NO: 213828 - DNA, 1451 bp, Zea Mays
actaacacccctgaagtagaagaaaaatgccgtgagcgcagcagatgtcgtgcggtgcagtgcagtgcaggtgcgggatctctgaatcgctgacgcccagcctcctctgtcatctccctcctcggacctcgccacctcacgcggaaggaggggaagaggaagcgcggagactggaaatcgggccccaaatccgcttcggtctctcgatcggcgaggcatgattcatacaaccggctaggatggcctcaaaagctataaaaagaaggcctatcagcgctgagactgatacaacaggggaaaaacaaatggatacagcactgtcagatcctgtaacagaacctcttctaggaaacactcctcaggaagagaaatccaagacatatgagcctattacacggtcaggtttctgggatgggacggcacaggagtgtcttcgttggacacatcttttagcagcttttgttgctcaatctgcaagaaacatagtaaatgttctttctgaatttggatatttgctagcaagactctttggttgctcttctgcttccaaaagttcacaaaatggacagacacttccagttaacctcagtccattacaggaagaaaggttaagattgttgagacaaaggatagatgtgccatatgactgctcctctgtcaagcatcaggatgccctgaaagaactttggaagttggcttaccctaacagacaacttcctcctctgaagtcagatctctggaaggagatgggctggcagaactccgatccatccacagattttagagcagctgggttcatgtccttggagaatctaatatattttgccagaaattacccagtatgttctattcatcctggattcctgggtgactcaattgtgtttaatgctgtgcagttgattttacatgcaggattcctttcacaggctactgcataaagcagatggtaagagagctgaatgggagtatccttttgcagtaggcggcgtaaacatatcctatatgttagttcaaatgctggatttacagtcagcatttcaggtgcttgattctcaatggcttgcaaggcgagcgagttatatggaattcaatgaggttctgaagtctacacggggtcagttagagcaagagcttactatcggaggtatttctcgcattcaagacatgccatcattcagaatgctgagaaggtagcgctgtttgtacttcacaggaaaagagatacattttagattccaatatattgtttaaatttgttgtccgttctttcactggattttgaagacgtgacattgtgtatgttattgagtatattgtttgtaatgtcgcagcttaaagctacagatcataatatatgatatgatatcttgaaaagaaaaactacgacttccagacatttttattccctggacaatacgtgacaaattatttctaagtgtctcagagtaaat

SEQ ID NO: 213829 - DNA, 1457 bp, Zea Mays
actaacacccctgaagtagaagaaaaatgccgtgagcgcagcagatgtcgtgcggtgcagtgcagtgcaggtgcgggatctctgaatcgctgacgcccagcctcctctgtcatctccctcctcggacctcgccacctcacgcggaaggaggggaagaggaagcgcggagactggaaatcgggccccaaatccgcttcggtctctcgatcggcgaggcatgattcatacaaccggctaggatggcctcaaaagctataaaaagaaggcctatcagcgctgagactgatacaacaggggaaaaacaaatggatacagcactgtcagatcctgtaacagaacctcttctaggaaacactcctcaggaagagaaatccaagacatatgagcctattacacggtcaggtttctgggatgggacggcacaggagtgtcttcgttggacacatcttttagcagcttttgttgctcaatctgcaagaaacatagtaaatgttctttctgaatttggatatttgctagcaagactctttggttgctcttctgcttccaaaagttcacaaaatggacagacacttccagttaacctcagtccattacaggaagaaaggttaagattgttgagacaaaggatagatgtgccatatgactgctcctctgtcaagcatcaggatgccctgaaagaactttggaagttggcttaccctaacagacaacttcctcctctgaagtcagatctctggaaggagatgggctggcagaactccgatccatccacagattttagctgggttcatgtccttggagaatctaatatattttgccagaaattacccagattcctttcacaggctactgcataaagcagatggtaagagagctgaatgggagtatccttttgcagtaggcggcgtaaacatatcctatatgttagttcaaatgctggatttacagtcaggaaaaatgagaacaaaagctggtgttcactttgttcaactactcgatgatgacggtgtggctttcgataaccttttctgtgtagcatttcaggtgcttgattctcaatggcttgcaaggcgagcgagttatatggaattcaatgaggttctgaagtctacacggggtcagttagagcaagagcttactatcggaggtatttctcgcattcaagacatgccatcattcagaatgctgagaaggtagcgctgtttgtacttcacaggaaaagagatacattttagattccaatatattgtttaaatttgttgtccgttctttcactggattttgaagacgtgacattgtgtatgttattgagtatattgtttgtaatgtcgcagcttaaagctacagatcataatatatgatatgatatcttgaaaagaaaaactacgacttccagacatttttattccctggacaatacgtgacaaattatttctaagtgtctcagagtaaat

SEQ ID NO: 213830 - DNA, 1375 bp, Zea Mays
actaacacccctgaagtagaagaaaaatgccgtgagcgcagcagatgtcgtgcggtgcagtgcagtgcaggtgcgggatctctgaatcgctgacgcccagcctcctctgtcatctccctcctcggacctcgccacctcacgcggaaggaggggaagaggaagcgcggagactggaaatcgggccccaaatccgcttcggtctctcgatcggcgaggcatgattcatacaaccggctaggatggcctcaaaagctataaaaagaaggcctatcagcgctgagactgatacaacaggggaaaaacaaatggatacagcactgtcagatcctgtaacagaacctcttctaggaaacactcctcaggaagagaaatccaagacatatgagcctattacacggtcaggtttctgggatgggacggcacaggagtgtcttcgttggacacatcttttagcagcttttgttgctcaatctgcaagaaacatagtaaatgttctttctgaatttggatatttgctagcaagactctttggttgctcttctgcttccaaaagttcacaaaatggacagacacttccagttaacctcagtccattacaggaagaaaggttaagattgttgagacaaaggatagatgtgccatatgactgctcctctgtcaagcatcaggatgccctgaaagaactttggaagttggcttaccctaacagacaacttcctcctctgaagtcagatctctggaaggagatgggctggcagaactccgatccatccacagattttagagcagctgggttcatgtccttggagaatctaatatattttgccagaaattacccagattcctttcacaggctactgcataaagcagatggaaaaatgagaacaaaagctggtgttcactttgttcaactactcgatgatgacggtgtggctttcgataaccttttctgtgtagcatttcaggtgcttgattctcaatggcttgcaaggcgagcgagttatatggaattcaatgaggttctgaagtctacacggggtcagttagagcaagagcttactatcggaggtatttctcgcattcaagacatgccatcattcagaatgctgagaaggtagcgctgtttgtacttcacaggaaaagagatacattttagattccaatatattgtttaaatttgttgtccgttctttcactggattttgaagacgtgacattgtgtatgttattgagtatattgtttgtaatgtcgcagcttaaagctacagatcataatatatgatatgatatcttgaaaagaaaaactacgacttccagacatttttattccctggacaatacgtgacaaattatttctaagtgtctcagagtaaat

SEQ ID NO: 213831 - DNA, 3304 bp, Zea Mays
attgacccttccaaaaaaaaaaacagaaacccgttacccgactcgactcgtctcttcccctccagtctccaccgagccaagccagcctgctccagcggcagacccgctaccgatctcctctgccgcggcccgcggcggcggcgatttcccctccgcgaatgccccttcaccgctgcagttgatacgccacccaagtggttcgttccacccttccttccctcgccggtctctccatcgccgcagcccgcagggcgccaccttgtcggaaggcgcgatccatggaccgctcgatcaacttccgcggcatcgccgggagcgccggaaacatcatgcagggaatggggaaattcgttttcggcaacgaggggatcgagtcaaaggaagatagctacgtcgagagatatctttatcggataagcaatggcacgatacctgatgaccggaggtctgcaatgactgagctgcagtctctagtggcagaaagccgctcggcacagatgtcgtttggagcgatgggttttcctatcctcctcaatattttgaaagaagaccgtgaggatgtagagcttgtgagaggtgccctggagacctttgtgagtgcattgactcctattgagacgtcacaagggccaaatactgaggttcaaccagcgtcagtgaactctgatctgctatctcaagaaaccgagaatatttctcttcttttgagcttattggtgattactcatcttttgccttaacaacatgtaacctgcatcgcctgcttcatgtgtactgagtcctggcttattgctcctgtctggtttgaagtcagaggaagacttttatgtgagatactacacaatccaacttctaacagctctacttacaaactcgctgaaaaggtgcccagttacaagaagcaattctattgattcctcgtggtataacagttctcatggacatgcttatggaccgtgaggtcataaggaatgaagcactgttacttcttacttatttgactcgggatgcagaggaaattcaaaaaattgttgtatttgagggtgtgtttgagaagatatttagcattattagagaggagggctattccgatggaggtgtagttgttcaggattgccttgaactgttaaataatttaattcgacacaatgcgtcaaatcagatgcttttgaaagagacaatgggctttgacccattgatatcaatactaaagattaggagaggcagtgcatttaattttacccaacagaaggtaaagacgctaacaagaatgcaaatcaaactgcattggctcaggcactgcgatgtattggcaatttggtattaagaaatcctcagaatcttgattctcttgcaagaaaacaagttggagaagagcctcatgttcaacctgcactgaatgccatcttctctataatcttgcggacctctgtagcgcaggaatttgttgctgctgattatgtattcaagtgtttctgcgagagaaatcctaatggccaggcattattagcatcaactattgttccacatccgaaccaaggaaatatgcatgaacctgctatcgacatgccttttggaagtgtacttctgcaagcactggtttcaagtgatgtcaatggagatatggaggcatgttgcagagcatctagcgttctttctcacattgtcaaggacaacatgcaaagcaaggatcgtgtattgcaaattcagcttgagacacttacaccgtccttggggcgcactgagccagtattgcatcgtattgtcacatgtttgtccatcgcagcctcaacagagggagaaaacaaccaaaacaaccaaccagaagaaccgtacattcaacctgttattcttcggctactcatcatatggcttgttgattgttcaaatgctgttaactgcctgttggaatcagcagtgcatctgaactacataatagagcttgcttcaagcaaacgttacactgcttgtgttcgtggactggctgctgttgttctaggtgcttgcatcctgtacaatgctagccatgagaagggccgtgatgcttttgctgttgcagatgctataagtcaaaagattggcctcacaacgtacttcttgaggtttgacgaattgaggagaagcttggcacatcctttgccagagcagcatcatcgcaaggagctttcccgatcaagtgcgaatagcatgtcagatttccaagaaattgaagaggatgaaacaaataaagatgatcaacaccctgtcctctcagaaatatttgattcacagtttgttaattttcttagtaagctcgaggctgatattagagaaaacataatggatatatttagtcggacaaaaactgcaactgcactccttcctactgaattggagcagaagaacggggaggttgatggagagtatatcaaacgactaaagtcgtttgtagagaaacagtgcaatgagatgcaggacttgctggctcgaaacgcaatgttagcagaagagttagtgagaactggtggtggtaccaccacagatacttcacagagaccgaacaacgggcgagaaagggtccagatcgaagccctgagacaagaactggagggagcgagacgacagatagaggcactcgaaactgacaagtcccagatcgaagccgaagctaacaaccaacgaaaccttgcagtaaaactggagtccgatctcaagagcttgtcagaagcttacaacagcatagagcaggccaactaccgcctggatgccgaggtaaaaaccttgcggcagggaggcagtgtgccgtatcctgacgtggaggcaataaaggcgcaagccaaggaagaggctgagaaggacagtgaggcggagctgaacgatctgcttgtctgcctcggtcaggaacaaactaaggttgagaagctgagcacaaggctggcagagctcggcgaagatgtggatgcccttctgcaaggtattggtgacgacactgccattccggacgatgatgacgacgacgatgaagatagtgaagagtgatatgtttatgtaaccctgtaggtctgttggtgcacacaacctcacgttgggtcatgatattgtaatggcaattggcattgtacagtggataatgtgtagacaaaggcaccgttccaatttaagttatttgtggagaaactagttgaaaactaagtggcggaccgtccggtcccggacggtccacacctcgcgatcagattaactcgaacgattatccttatctcgtgtgtggttatctatctaattatgtgagatttgttagctatcgtctaggaacgagtccaga

SEQ ID NO: 213832 - DNA, 2382 bp, Zea Mays
attctaatcattttatgctggtcataaggaatgaagcactgttacttcttacttatttgactcgggatgcagaggaaattcaaaaaattgttgtatttgagggtgtgtttgagaagatatttagcattattagagaggagggctattccgatggaggtgtagttgttcagatgcttttgaaagagacaatgggctttgacccattgatatcaatactaaagattaggagaggcagtgcatttaattttacccaacagaagacagtaaatcttcttggtgctttaaatactgtggaattgcttttgatggggggcccatctggtgaagcaggtaaagacgctaacaagaatgcaaatcaaactgcattggctcaggcactgcgatgtattggcaatttggtattaagaaatcctcagaatcttgattctcttgcaagaaaacaagttggagaagagcctcatgttcaacctgcactgaatgccatcttctctataatcttgcggacctctgtagcgcaggaatttgttgctgctgattatgtattcaagtgtttctgcgagagaaatcctaatggccaggcattattagcatcaactattgttccacatccgaaccaaggaaatatgcatgaacctgctatcgacatgccttttggaagtgtacttctgcaagcactggtttcaagtgatgtcaatggagatatggaggcatgttgcagagcatctagcgttctttctcacattgtcaaggacaacatgcaaagcaaggatcgtgtattgcaaattcagcttgagacacttacaccgtccttggggcgcactgagccagtattgcatcgtattgtcacatgtttgtccatcgcagcctcaacagagggagaaaacaaccaaaacaaccaaccagaagaaccgtacattcaacctgttattcttcggctactcatcatatggcttgttgattgttcaaatgctgttaactgcctgttggaatcagcagtgcatctgaactacataatagagcttgcttcaagcaaacgttacactgcttgtgttcgtggactggctgctgttgttctaggtgcttgcatcctgtacaatgctagccatgagaagggccgtgatgcttttgctgttgcagatgctataagtcaaaagattggcctcacaacgtacttcttgaggtttgacgaattgaggagaagcttggcacatcctttgccagagcagcatcatcgcaaggagctttcccgatcaagtgcgaatagcatgtcagatttccaagaaattgaagaggatgaaacaaataaagatgatcaacaccctgtcctctcagaaatatttgattcacagtttgttaattttcttagtaagctcgaggctgatattagagaaaacataatggatatatttagtcggacaaaaactgcaactgcactccttcctactgaattggagcagaagaacggggaggttgatggagagtatatcaaacgactaaagtcgtttgtagagaaacagtgcaatgagatgcaggacttgctggctcgaaacgcaatgttagcagaagagttagtgagaactggtggtggtaccaccacagatacttcacagagaccgaacaacgggcgagaaagggtccagatcgaagccctgagacaagaactggagggagcgagacgacagatagaggcactcgaaactgacaagtcccagatcgaagccgaagctaacaaccaacgaaaccttgcagtaaaactggagtccgatctcaagagcttgtcagaagcttacaacagcatagagcaggccaactaccgcctggatgccgaggtaaaaaccttgcggcagggaggcagtgtgccgtatcctgacgtggaggcaataaaggcgcaagccaaggaagaggctgagaaggacagtgaggcggagctgaacgatctgcttgtctgcctcggtcaggaacaaactaaggttgagaagctgagcacaaggctggcagagctcggcgaagatgtggatgcccttctgcaaggtattggtgacgacactgccattccggacgatgatgacgacgacgatgaagatagtgaagagtgatatgtttatgtaaccctgtaggtctgttggtgcacacaacctcacgttgggtcatgatattgtaatggcaattggcattgtacagtggataatgtgtagacaaaggcaccgttccaatttaagttatttgtggagaaactagttgaaaactaagtggcggaccgtccggtcccggacggtccacacctcgcgatcagattaactcgaacgattatccttatctcgtgtgtggttatctatctaattatgtgagatttgttagctatcgtctaggaacgagtccaga

SEQ ID NO: 213833 - DNA, 2804 bp, Zea Mays
cccgggccgaagccgaagaggacgaaaaggcagcctgctgccgccgccgccgctgttgcagttgcagatcacacacactaccctttccgcgacccttctttctgcatccatccaccctccccctttgtcctgtctctctccctcccacgcacacagacacatcacacagctggagagcaggtgcttctctcacacacacctcggcccacgccgccgttgccagccaagagcagtcgcggggcagcgctgaatcctgattaggtgaaaaagagggtggcgaccatcgttttcgctgctgattctggctgcggctcatctgccccagtgctgtgctcctgcaccgtaccgcaaacccagcccaagactgcaagaggtggcataggctcatgtcctgcccagcggttcgcttcaaatttctgagctgaacgcagctggagagaccgcgcagtcctgaatatgtttggtttctcgcggcgccgggtgaaacttggaaggtcgaagggtgacccaagtgatcctttgaacagctccaggagttctgttggtcccagtaaacacctcagtctgcccaatgggaatgacgcgactatgacgtcagtaagtggccacgcagatgatctttcctaccgttgctcgtccgatacgtttgatccccaaggacgcactttcgatatttcagaaaattggactgtgctgtccacagagggagacaaacctattcctcgtttctatcatgcagcagccattgtaagtagcaagatggtagtgtttggtggtgattctggtaatcgcttattagatgacacaaagatattgaatctagagaagcttacttgggattctgcgcctcctaaagtttgcccatcaccaaacggatgttcgatgaagttgccagcctgcaaaggtcattgcctggttccttggggaaatagtgtcatccttgtcggaggtaaaactgagcctgcttctgatcatttatcagtatggactttcaatacagaaacagagctttggtcacttattgaagccaagggtgatatccctctcgaagcggacacacggtgattagagctggtgctacattgatactttttggcggtgaggacacaaaaggaaagaaacggcatgaccttcacatgtttgatctgaagtcatcaacatggcttccattgaactataaaggcactggaccttctccaagatccaatcatattgctacactgtatgatgatagggtccttttaatttttggaggccactcaaaatctaagacacttaatgacttgtattctttggatttcgatacaatggtttggtcaagagtgaagacccatggtcctcacccatcacctcgagctggttgcagcggaactctctgtggaactaagtggtacatagctggcggcgcaagcaagaaaaaacgacatgctgaaacttgggtttttgatgttctacaatgtaaatggtctgtttgtgtagtgccccctagttcatcgattactacaaaaaaaggttttagcatggttcctttctaccacaaggacaagattgctcttattgcatttggaggaaacaaaaaagagccatgcaacaaggttgaagtattagtggtactgcaaaatgagcattcttttagttggcgctcagccccagaagtggacaccatggtgtatgagtattctccaagcaataaggagcttgctgatcatctccacaaatgtgcccccttgtactctaatagttccatcgcaaggcatagtctcacttctgtgatagaacaccctcctagaagggaacccctctctgagtcattgttgaagcagtccagtttgggcacttcactccatacgcagttggatcacgcagaagagtgcagcctaggtcagaaactgcagaaaccaatcgatgatgacagatatgatgacgtagatgactcttcttcatgccaagatagcactattgtttcttacagccaaaagggccctacagcaaaaggacagggcctggttttcagaatggcgcggaaaacatggtgactggaggatcaaaagtgagaaggatagctagatgctcttcagatgttggccagagccacttgtacaacacaaaaatagcagacttgatcagaagaaacaccacgctcgaagaccagcttgcgaccgcactggcaagcaaagatcagctagacaagagcttagcatcggtcattcacagcagaggacagctggagaagatgcttgccaacaaagataaggaggctgagatgctgaaagagaagatagcatgcttagagctggcgcaagaagagtcgaacagcctctcgaacacagtgcacgctgataatgtgcgcctggagcgtgaagtggcgttcctgaaggccgtcacaggcgaaacccagaaggagctgcattccactcgtagagttttagcaggggaacagtcgcgcgcgttccagctccaggttgaagtgttccatctcaagcagaggctgcagatactggagggaagatcaggaacacccaacaaacaaccgctataggctatagtggtcacatttctacatttctgcacatcgatcgttgcaagtttgcaaccccccaccccccaatgtaaatgattgtgtggcgagctttatggtaccatgttagtacatgcgctgatgttgatctgtaatttgcagggtatggtaaaactataaatagctgacggattgaaccatgctaatatgtgtagatattgatctgtaatttgcagggacatggtaaaaaaataaaaatgtgcaagctctacctgaatgtgtcaaa

SEQ ID NO: 213834 - DNA, 1658 bp, Zea Mays
cgccagtccactccaccaccgttcatgcatgaccatggagagatctcaaccgcagcaccagcagtctcctccgtcgccgtcgtcctcctcgtcctgcgtctccgcggacaccgtcctcgtccctccgggaaagaggcggcggagggcggcgacagccaaggccaataagagggcccgcaaggacccctctgatcctcctcccgccgccgggaagaggagctccgtatacagaggagtcaccaggcacaggtggacgggcaggttcgaggcgcatctctgggacaagcactgcctcgccgcgctccacaacaagaagaaaggcaggcaagtctatctgggggcgtacgacggcgaggaggcagcggctcgtgcctatgaccttgcagctctcaagtactggggtcctgaggctctgctcaacttccctgtggaggattactccagcgagatgccggagatggaggcagcgtcccgggaggagtacctggcctccctccgccgcaggagcagcggcttctccaggggggtctccaagtacagaggcgtcgccagacactcaagaagaggcagccaaggcctatgatcttgcggccatcgaataccgaggtgccaatgctgtaaccaacttcgacatcagctgctacctggaccacccactgttcctggcgcagctccagcaggagcagccacaggtggtgccagcgctcgaccaagaacctcaggctgatcagagagaacctgaaaccacagcccaagagcctgtgtcaagccaagccaagacaccggcggatgacaatgcagagcctgatgacatcgcggagcccctcatcacggtcgacaacagcgtcgaggagagcttatggagtccttgcatggattatgagctagacaccatgtcgagatctaactttggcagctcgatcaacctgagcgagtggttcactgacgcagacttcgacagcgacttgggatgcctgttcgacgggcgctctgcagttgatggaggaagcaagggtggcgtaggtgtggcggatttcagtttgtttgaagcaggtgatggtcagctgaaggatgttctttcggatatggaagaggggatacaacctccaacgataatcagtgtgtgcaattgattctgagacctatgcgtggcgtgcgacaagtgtcctgtctttgggtatacttggtttgtccaatgccacggtgccactgctgcgagtcagctgaacttcttgtagaaagcacatggcagcttggcattagacaagtgtgttggtgttccttaattctttggatatgctttaggcattgactaaccttaagggttcgtcactgtctcgcttagcttagattagactaatcacatccttgaatctgaagtagttgtgcagtatcacagtttcacatggcaattctgccaatgcagcatagatttgttcgtttgaacagctgtaactgtaaccctatagctccagattaaggaacagtttgtttttcatccatacatataacacgctttcagaagcagacaatttactctgagacacttagaaataatttgtcacgtattgtccagggaataaaaatgtctggaagtcgtagtttttcttttcaagatatcatatcatatattatgatctgtagctttaagctgcgac

SEQ ID NO: 213835 - DNA, 2332 bp, Zea Mays
gtgtgattcctcgggtagataataagacacaagacgcgctgctccaccttgtgcttcaccccgcccccgcccgaaggcagcatctgccagcagcaaccgtatacagagagagagagagagagagcttcacgactccggtcggccgtcagctcgattcgccttcccccccacctcccccgccctccgatgacggggcgtccgtgggcgggcgcgccgccgccgcctcttcctctcgccgtcgccgtgggcgtcgcggcgctgctgtcctgctgctgctgctgctgctgccagggcgcgtcggcgacggcggcggcgtcgttcggcgacaacttcgagatcacgggcgccgaggaccacgtgaagacctccgccgacgggcagacctggtacctatacctcgacaacaagacaggcgtcgggttccagacgaagcagcgctacctgttcggctggttcagcatgaagctgaagctggtgggcaacgactccgcgggcgtcgtcaccgcctactacatgtgctccgacctggacgcggcgcccctgcgcgacgagctggacttcgagttcctgggcaaccgcagcggggagccctacatcatccagaccaacgtgtaccacagcggcgtcggcggccgggagatgcgccactcgctctggttcgaccccaccgccgacttccacacctacgccatcctctggaaccccaagcagatcgtgtaagtaaataaaactactctccgtttcattcatccctctccacttgttgcctgctgctcctgctggctgctgctgctgctctgggtactgagagagagctgaccgtgacacagcgcgtgccgacttcaatgcggccacccacctccacgttcgaccccgcacccctgcactggttggttggcatgaggcatgaggcatggcacgttggatttggatacgatcccgtcggcgcccctgcaaacttggtacacgcccctgtttggggccgaaccatgcacggcgtctcgcccatgccctcccccggtcgcggtcggtccatgcctattattcccggtccacgacaccgcacatggatccactgcctgcctgcccccagggcccaggccccagtcctgtccgatccttggcatcggcagtcggcaccaccgaggatcgagatccataccctaccctaccctaccatacctcatcacgagtggtccatgacggtgctggcaggttcttcgtggacaaggtggcgatccgggtgtacccgaacgacgcgtccaaaccgccgggcggaggaggcggcggcgacggcttcttcccgatcgccaagcccatgtacatcttttccagcatctggaacgcggacgactgggcgacgcgcggcgggctggagaagacggactgggccaaggcgcccttcgtgtcgtcctaccgcgacttcgccgccgacgcctgcgcctggccgccgccggccgcgggggtcgccccgtccccgccgacgcccgcgtgcgccgcggccacgggggacagctggtgggaccagccccccgcgtgggcgctggacgccggccagcgcctggacaacgcctgggtggcaaggaacctcctcgtctacgactactgcgacgaccgcaagcgcttcccgacgccgcccgaggagtgcaagctccggcccgccgcgaccgcatcgtgatcatactatactgttggattggttcgtgcatgatgatgagatggttttttttttggggtttgtttcttggtgcgtaaaaccgggctgattgttgggggtgggggatggagaaaggccgtattatgcgtacattgtgtgtgggcgcatggacagtccggaccgatggttgtggcgttggaacggaccatgtcggccattcttttgttacgaggaaacgaggaatggattcagttttgtaccaccaaagcaattttgtttcccgttggcaaagccgccattttcacttagttaagttagacagcggaccgaacagacctaacaaactgtacagtaaggtggtgtttggttactgtacagtaaggtggtgtttggttagccatgcacagaagcggcaccgtcgtcctccagcagggatccatgcatcgcacatgcaactagtcaccaagcatcaagcaagcagcttaattagctaccacctcacgcacctcgaccggtcggaatcggaaatgcatgcgctggagttgaagcaatcctagctagcttttcttaccgaccaagaattcctggatctggaggcgagaaacaccccctgcggcgatggcctagctcagattctcctgcctctcgtgtccttccctccggtcttcttgcttt

SEQ ID NO: 213836 - DNA, 2308 bp, Zea Mays
cctttttccaaccacagcttgatgaacttctttttgggggtgttggaagagaatagcctgaaggttcacagtaaccttcatctgtcggaagatgtatcgggctaagagggctgcattgtcaccgaaggtgaagcgccgcgtcggcaagtacgagctcgggcgcaccattggggaagggaccttcgccaaggtccggtttgctaagaacactgaaaacggggaacctgttgctatcaaaatccttgacaaggagaaggttaagaggcacagattggttgagcaggtcagtatccgtccactattcctttctgagaccatgcactggctagcttcttgttatatccattttctgtcagtaccatgatgcatggatcaaacttttagttaactacaaacattgaggttaaaagcctttatgctcccctgtcgaagccgtgttgtgtgactttcgatttcgaaaatggtaaggagttcagtttgccatgcagccaatcatgtcctcgttcctaacagtcactagctggaccatgtgatttcctttcgtcaaaaatcaaaattcactgccgtcacttacatctttctatcaaaaggaacgaggtggagaatgaattttcttccttggatgctgccgtgacagcatgggagcataggaagatgtaacttcaattaagaaacgatacgtcgatactatacctgcatatttgcatgccatcgagatatatccacatggtggtcttccagttcaagtcatacctgcaccaactcaattaagcgtgaaatttgtatcatgaaattagtaaggcaccctaatgttgttcgactgtttgaggtgatgggaagtaaagcaagaattttcatcgttctggaatatgttaccggcggagagcttttcgaaatcattgctactaatggaaggttgaaggaagacgaagcacgtaaatacttccagcaactgattaatgctgttgattactgccacagtaggggagtgtatcacagagacttgaagctcgagaatttgctgcttgatgctgcaggaaatctcaaagtttctgactttggtttaagtgctttaaccgagcaagtgaaggctgatggtctgcttcatacaacatgtggaacccccaattatgttgcccctgaggtgatcgaggatggaggctatgatggtgcaactgcagatatttggtcttgcggagtaatcctctttgttcttcttgctggatatttacctttcgaggatgacaacatcatcgccctatacaagaagatttcagaagctcagtttagctgcccctcttggttttcagctggggccaagaacatgattaccagaattcttgatcccaatcctacaactagaatcacgatttctcagatactggagcatccttggttcaaaaaggggtacaagcctcctgtttttgacgagaaatatcaaactagcttggatgacgtggatgctgcttttggagattcagaagaccggcatgtgaaagaggaaactgaagatcagccaacctcaatgaatgcattcgaactgatttctctaaaccaggcactgaatctggagaatttgtttgaagcaaaggaggagtataaaagagagacaagattcacctcacagtgccccccgaaagagataatcacaaagatcgaagaagctgcaaagccgcttggctttgatgttcagaagaaaaaatacaagatgcggatggagaacccgaaagcaggtagaaagggcaatctgaatgttgcaactgaggttttccaaatagccccatccctgcatgtagtcgagctcaagaaggcgaagggggacactctggagttccaaaagttctacagaagcctgtcgacccagctgaaggatgttgtgtggaagtgcgacggcgaggtggacggcaacagcgcggcagcatgaaagtgccctttgaactttccactggacggcgccggttttccttttaagcccggtgaaacaaccgccctggaggctgttgtggatgagcttactggcgtgtttagttcgtttcatggtcgggaggttggatggaatggaaaccacaatcaaggctgtagtagtgtgtgtagtaacgaagtagatacatgcatcagatggtgtaagggagtaccagctgttagttcatggtttcaagcttagccccccttcaatttgttcgatgatgtattacttcacaataaacattattacttagatgtatgaggtgagcacacttggtcttttgtcctctttgtgctattttgcgtgataattgaattttagcaggggcggattcaggtggtt

SEQ ID NO: 213837 - DNA, 1914 bp, Zea Mays
gttttattctcctttttccaaccacagcttgatgaacttctttttgggggtgttggaagagaatagcctgaaggttcacagtaaccttcatctgtcggaagatgtatcgggctaagagggctgcattgtcaccgaaggtgaagcgccgcgtcggcaagtacgagctcgggcgcaccattggggaagggaccttcgccaaggtccggtttgctaagaacactgaaaacggggaacctgttgctatcaaaatccttgacaaggagaaggttaagaggcacagattggttgagcagattaagcgtgaaatttgtatcatgaaattagtaaggcaccctaatgttgttcgactgtttgaggtgatgggaagtaaagcaagaattttcatcgttctggaatatgttaccggcggagagcttttcgaaatcattgctactaatggaaggttgaaggaagacgaagcacgtaaatacttccagcaactgattaatgctgttgattactgccacagtaggggagtgtatcacagagacttgaagctcgagaatttgctgcttgatgctgcaggaaatctcaaagtttctgactttggtttaagtgctttaaccgagcaagtgaaggctgatggtctgcttcatacaacatgtggaacccccaattatgttgcccctgaggtgatcgaggatggaggctatgatggtgcaactgcagatatttggtcttgcggagtaatcctctttgttcttcttgctggatatttacctttcgaggatgacaacatcatcgccctatacaagaagatttcagaagctcagtttagctgcccctcttggttttcagctggggccaagaacatgattaccagaattcttgatcccaatcctacaactagaatcacgatttctcagatactggagcatccttggttcaaaaaggggtacaagcctcctgtttttgacgagaaatatcaaactagcttggatgacgtggatgctgcttttggagattcagaagaccggcatgtgaaagaggaaactgaagatcagccaacctcaatgaatgcattcgaactgatttctctaaaccaggcactgaatctggagaatttgtttgaagcaaaggaggagtataaaagagagacaagattcacctcacagtgccccccgaaagagataatcacaaagatcgaagaagctgcaaagccgcttggctttgatgttcagaagaaaaaatacaagatgcggatggagaacccgaaagcaggtagaaagggcaatctgaatgttgcaactgaggttttccaaatagccccatccctgcatgtagtcgagctcaagaaggcgaagggggacactctggagttccaaaagttctacagaagcctgtcgacccagctgaaggatgttgtgtggaagtgcgacggcgaggtggacggcaacagcgcggcagcatgaaagtgccctttgaactttccactggacggcgccggttttcctttgtacatagcttctctttcggatgatcccgtgtccattgcagagtcggttttgcaagcaagttctttggtttatttgtagtaagcccggtgaaacaaccgccctggaggctgttgtggatgagcttactggcgtgtttagttcgtttcatggtcgggaggttggatggaatggaaaccacaatcaaggctgtagtagtgtgtgtagtaacgaagtagatacatgcatcagatggtgtaagggagtaccagctgttagttcatggtttcaagcttagccccccttcaatttgttcgatgatgtattacttcacaataaacattattacttagatgtatgaggtgagcacacttggtcttttgtcctctttgtgctattttgcgtgataattgaattttagcaggggcggattcaggtggtt

SEQ ID NO: 213838 - DNA, 1807 bp, Zea Mays
ctcgcctctctcccttctctggtgttggaagagaatagcctgaaggttcacagtaaccttcatctgtcggaagatgtatcgggctaagagggctgcattgtcaccgaaggtgaagcgccgcgtcggcaagtacgagctcgggcgcaccattggggaagggaccttcgccaaggtccggtttgctaagaacactgaaaacggggaacctgttgctatcaaaatccttgacaaggagaaggttaagaggcacagattggttgagcagattaagcgtgaaatttgtatcatgaaattagtaaggcaccctaatgttgttcgactgtttgaggtgatgggaagtaaagcaagaattttcatcgttctggaatatgttaccggcggagagcttttcgaaatcattgctactaatggaaggttgaaggaagacgaagcacgtaaatacttccagcaactgattaatgctgttgattactgccacagtaggggagtgtatcacagagacttgaagctcgagaatttgctgcttgatgctgcaggaaatctcaaagtttctgactttggtttaagtgctttaaccgagcaagtgaaggctgatggtctgcttcatacaacatgtggaacccccaattatgttgcccctgaggtgatcgaggatggaggctatgatggtgcaactgcagatatttggtcttgcggagtaatcctctttgttcttcttgctggatatttacctttcgaggatgacaacatcatcgccctatacaagaagatttcagaagctcagtttagctgcccctcttggttttcagctggggccaagaacatgattaccagaattcttgatcccaatcctacaactagaatcacgatttctcagatactggagcatccttggttcaaaaaggggtacaagcctcctgtttttgacgagaaatatcaaactagcttggatgacgtggatgctgcttttggagattcagaagaccggcatgtgaaagaggaaactgaagatcagccaacctcaatgaatgcattcgaactgatttctctaaaccaggcactgaatctggagaatttgtttgaagcaaaggaggagtataaaagagagacaagattcacctcacagtgccccccgaaagagataatcacaaagatcgaagaagctgcaaagccgcttggctttgatgttcagaagaaaaaatacaagatgcggatggagaacccgaaagcaggtagaaagggcaatctgaatgttgcaactgaggttttccaaatagccccatccctgcatgtagtcgagctcaagaaggcgaagggggacactctggagttccaaaagttctacagaagcctgtcgacccagctgaaggatgttgtgtggaagtgcgacggcgaggtggacggcaacagcgcggcagcatgaaagtgccctttgaactttccactggacggcgccggttttccttttaagcccggtgaaacaaccgccctggaggctgttgtggatgagcttactggcgtgtttagttcgtttcatggtcgggaggttggatggaatggaaaccacaatcaaggctgtagtagtgtgtgtagtaacgaagtagatacatgcatcagatggtgtaagggagtaccagctgttagttcatggtttcaagcttagccccccttcaatttgttcgatgatgtattacttcacaataaacattattacttagatgtatgaggtgagcacacttggtcttttgtcctctttgtgctattttgcgtgataattgaattttagcaggggcggattcaggtggtt

SEQ ID NO: 213839 - DNA, 1757 bp, Zea Mays
gtctctccccccgtcgagcacacaacacaccctcctcgtcctccaatccaatcaacctggtagactcgcttcgcttctcccccagccgtcggacggagctcctcgcagtcgcagcagccgccgatcagcctgcgctcgggctcagcgctggaagattaagcgtgaaatttgtatcatgaaattagtaaggcaccctaatgttgttcgactgtttgaggtgatgggaagtaaagcaagaattttcatcgttctggaatatgttaccggcggagagcttttcgaaatcattgctactaatggaaggttgaaggaagacgaagcacgtaaatacttccagcaactgattaatgctgttgattactgccacagtaggggagtgtatcacagagacttgaagctcgagaatttgctgcttgatgctgcaggaaatctcaaagtttctgactttggtttaagtgctttaaccgagcaagtgaaggctgatggtctgcttcatacaacatgtggaacccccaattatgttgcccctgaggtgatcgaggatggaggctatgatggtgcaactgcagatatttggtcttgcggagtaatcctctttgttcttcttgctggatatttacctttcgaggatgacaacatcatcgccctatacaagaagatttcagaagctcagtttagctgcccctcttggttttcagctggggccaagaacatgattaccagaattcttgatcccaatcctacaactatactggagcatccttggttcaaaaaggggtacaagcctcctgtttttgacgagaaatatcaaactagcttggatgacgtggatgctgcttttggagattcagaagaccggcatgtgaaagaggaaactgaagatcagccaacctcaatgaatgcattcgaactgatttctctaaaccaggcactgaatctggagaatttgtttgaagcaaaggaggagtataaaagagagacaagattcacctcacagtgccccccgaaagagataatcacaaagatcgaagaagctgcaaagccgcttggctttgatgttcagaagaaaaaatacaagatgcggatggagaacccgaaagcaggtagaaagggcaatctgaatgttgcaactgaggttttccaaatagccccatccctgcatgtagtcgagctcaagaaggcgaagggggacactctggagttccaaaagttctacagaagcctgtcgacccagctgaaggatgttgtgtggaagtgcgacggcgaggtggacggcaacagcgcggcagcatgaaagtgccctttgaactttccactggacggcgccggttttcctttgtacatagcttctctttcggatgatcccgtgtccattgcagagtcggttttgcaagcaagttctttggtttatttgtagtaagcccggtgaaacaaccgccctggaggctgttgtggatgagcttactggcgtgtttagttcgtttcatggtcgggaggttggatggaatggaaaccacaatcaaggctgtagtagtgtgtgtagtaacgaagtagatacatgcatcagatggtgtaagggagtaccagctgttagttcatggtttcaagcttagccccccttcaatttgttcgatgatgtattacttcacaataaacattattacttagatgtatgaggtgagcacacttggtcttttgtcctctttgtgctattttgcgtgataattgaattttagcaggggcggattcaggtggtt

SEQ ID NO: 213840 - DNA, 1940 bp, Zea Mays
gtctctccccccgtcgagcacacaacacaccctcctcgtcctccaatccaatcaacctggtagactcgcttcgcttctcccccagccgtcggacggagctcctcgcagtcgcagcagccgccgatcagcctgcgctcgggctcagcgctggaaggtgttggaagagaatagcctgaaggttcacagtaaccttcatctgtcggaagatgtatcgggctaagagggctgcattgtcaccgaaggtgaagcgccgcgtcggcaagtacgagctcgggcgcaccattggggaagggaccttcgccaaggtccggtttgctaagaacactgaaaacggggaacctgttgctatcaaaatccttgacaaggagaaggttaagaggcacagattggttgagcagattaagcgtgaaatttgtatcatgaaattagtaaggcaccctaatgttgttcgactgtttgaggtgatgggaagtaaagcaagaattttcatcgttctggaatatgttaccggcggagagcttttcgaaatcattgctactaatggaaggttgaaggaagacgaagcacgtaaatacttccagcaactgattaatgctgttgattactgccacagtaggggagtgtatcacagagacttgaagctcgagaatttgctgcttgatgctgcaggaaatctcaaagtttctgactttggtttaagtgctttaaccgagcaagtgaaggctgatggtctgcttcatacaacatgtggaacccccaattatgttgcccctgaggtgatcgaggatggaggctatgatggtgcaactgcagatatttggtcttgcggagtaatcctctttgttcttcttgctggatatttacctttcgaggatgacaacatcatcgccctatacaagaagatttcagaagctcagtttagctgcccctcttggttttcagctggggccaagaacatgattaccagaattcttgatcccaatcctacaactagaatcacgatttctcagatactggagcatccttggttcaaaaaggggtacaagcctcctgtttttgacgagaaatatcaaactagcttggatgacgtggatgctgcttttggagattcagaagaccggcatgtgaaagaggaaactgaagatcagccaacctcaatgaatgcattcgaactgatttctctaaaccaggcactgaatctggagaatttgtttgaagcaaaggaggagtataaaagagagacaagattcacctcacagtgccccccgaaagagataatcacaaagatcgaagaagctgcaaagccgcttggctttgatgttcagaagaaaaaatacaagatgcggatggagaacccgaaagcaggtagaaagggcaatctgaatgttgcaactgaggttttccaaatagccccatccctgcatgtagtcgagctcaagaaggcgaagggggacactctggagttccaaaagttctacagaagcctgtcgacccagctgaaggatgttgtgtggaagtgcgacggcgaggtggacggcaacagcgcggcagcatgaaagtgccctttgaactttccactggacggcgccggttttccttttaagcccggtgaaacaaccgccctggaggctgttgtggatgagcttactggcgtgtttagttcgtttcatggtcgggaggttggatggaatggaaaccacaatcaaggctgtagtagtgtgtgtagtaacgaagtagatacatgcatcagatggtgtaagggagtaccagctgttagttcatggtttcaagcttagccccccttcaatttgttcgatgatgtattacttcacaataaacattattacttagatgtatgaggtgagcacacttggtcttttgtcctctttgtgctattttgcgtgataattgaattttagcaggggcggattcaggtggtt

SEQ ID NO: 213841 - DNA, 2548 bp, Zea Mays
gcgcatcacaccaccgcttcctttatagcgccaccccaccaccctcgtctctccccccgtcgagcacacaacacaccctcctcgtcctccaatccaatcaacctggtagactcgcttcgcttctcccccagccgtcggacggagctcctcgcagtcgcagcagccgccgatcagcctgcgctcgggctcagcgctggaaggtgttggaagagaatagcctgaaggttcacagtaaccttcatctgtcggaagatgtatcgggctaagagggctgcattgtcaccgaaggtgaagcgccgcgtcggcaagtacgagctcgggcgcaccattggggaagggaccttcgccaaggtccggtttgctaagaacactgaaaacggggaacctgttgctatcaaaatccttgacaaggagaaggttaagaggcacagattggttgagcaggtcagtatccgtccactattcctttctgagaccatgcactggctagcttcttgttatatccattttctgtcagtaccatgatgcatggatcaaacttttagttaactacaaacattgaggttaaaagcctttatgctcccctgtcgaagccgtgttgtgtgactttcgatttcgaaaatggtaaggagttcagtttgccatgcagccaatcatgtcctcgttcctaacagtcactagctggaccatgtgatttcctttcgtcaaaaatcaaaattcactgccgtcacttacatctttctatcaaaaggaacgaggtggagaatgaattttcttccttggatgctgccgtgacagcatgggagcataggaagatgtaacttcaattaagaaacgatacgtcgatactatacctgcatatttgcatgccatcgagatatatccacatggtggtcttccagttcaagtcatacctgcaccaactcaattaagcgtgaaatttgtatcatgaaattagtaaggcaccctaatgttgttcgactgtttgaggtgatgggaagtaaagcaagaattttcatcgttctggaatatgttaccggcggagagcttttcgaaatcattgctactaatggaaggttgaaggaagacgaagcacgtaaatacttccagcaactgattaatgctgttgattactgccacagtaggggagtgtatcacagagacttgaagctcgagaatttgctgcttgatgctgcaggaaatctcaaagtttctgactttggtttaagtgctttaaccgagcaagtgaaggctgatggtctgcttcatacaacatgtggaacccccaattatgttgcccctgaggtgatcgaggatggaggctatgatggtgcaactgcagatatttggtcttgcggagtaatcctctttgttcttcttgctggatatttacctttcgaggatgacaacatcatcgccctatacaagaagatttcagaagctcagtttagctgcccctcttggttttcagctggggccaagaacatgattaccagaattcttgatcccaatcctacaactagaatcacgatttctcagatactggagcatccttggttcaaaaaggggtacaagcctcctgtttttgacgagaaatatcaaactagcttggatgacgtggatgctgcttttggagattcagaagaccggcatgtgaaagaggaaactgaagatcagccaacctcaatgaatgcattcgaactgatttctctaaaccaggcactgaatctggagaatttgtttgaagcaaaggaggagtataaaagagagacaagattcacctcacagtgccccccgaaagagataatcacaaagatcgaagaagctgcaaagccgcttggctttgatgttcagaagaaaaaatacaagatgcggatggagaacccgaaagcaggtagaaagggcaatctgaatgttgcaactgaggttttccaaatagccccatccctgcatgtagtcgagctcaagaaggcgaagggggacactctggagttccaaaagttctacagaagcctgtcgacccagctgaaggatgttgtgtggaagtgcgacggcgaggtggacggcaacagcgcggcagcatgaaagtgccctttgaactttccactggacggcgccggttttcctttgtacatagcttctctttcggatgatcccgtgtccattgcagagtcggttttgcaagcaagttctttggtttatttgtagtaagcccggtgaaacaaccgccctggaggctgttgtggatgagcttactggcgtgtttagttcgtttcatggtcgggaggttggatggaatggaaaccacaatcaaggctgtagtagtgtgtgtagtaacgaagtagatacatgcatcagatggtgtaagggagtaccagctgttagttcatggtttcaagcttagccccccttcaatttgttcgatgatgtattacttcacaataaacattattacttagatgtatgaggtgagcacacttggtcttttgtcctctttgtgctattttgcgtgataattgaattttagcaggggcggattcaggtggtt

SEQ ID NO: 213842 - DNA, 305 bp, Zea Mays
agtccctcccctataataaacgggcgccacgcacgccacagccgcggcctgcgagcgaggcatacacatccacgggccacgcccaccggcatctcacggcggaagcagccaagcagccggccgggcgcctcccgtgccgccgctgagcatggccgctgctcccgtgggcgctcagaatcgctgcgtcttcgttggcaacataccatacgatgcgacagaggagcagctcgtgcagatttgcgaagaggttggcccagtcgtatccttcagtaagtccagagcagcactggtatctgacatgtctg

SEQ ID NO: 213843 - DNA, 2362 bp, Zea Mays
gcgaaaacagcataacatagaggaaaacatccacctcccacgaaaaccaccagcacgctgcacgctgcacgccgccgcgccgcacttctccccatccggcgccttctctatcctcgccgctgaagacgtcgtgccgtgcgtagctagcagtgctgacgcgcgctcgtcgaataaggattggatttggcttttcgtccccccaccgcctcctccggtccttcccctgccactccctattctcctcgtccgaagcggcaagctcaagctcaggagctcgcaaccgaggagtaccaatttctctagggatttggcgtatccaccagggagcaggaatagggtgaggcttcctgatggcgggggcgaaagcggatgtagacgcggaaacaggagacggcggctccttcagcgagcagaggctgattgataagctcaaaaggctcaacaactcagccgctagcatccagactctttcgcgttggtgcatttttcaccgcaagaaggccaaaagggttgtagacacatgggaaaaacagtttactagtgcaagggaggataagaaaatatcattcctatatctatcaaatgatatcctgcaaaacagtaaacgcaagggagcagactatgtggatgagttctggagggttctacctagatccctgaagcatgtctatgaaaaaggaggaggagaagggaagaatcaggtggcgagattgatatcaatctgggatgaccgtaaagtttttgggacccgtattgaaagtatgaaaaatggcattcttggtgacaaccctcctatattggataacaatgggaatagtttaaatcctagctctaatcccacttcaaattctaaagctgcacggaaggattctggtacaatagtaaaaaaactcactgttggtggtatgcctgaaaagatcgtgtctgcataccaattagtgcttgatcagcattttgatgaagacactgctttaaacaaatgtaagactactttgggccttttggagaggataaataaagatattaatgattctatcatcaacggtaatcagccagcattgtcattgatctctgaccttcaagaacaggaaatgacccttaaacattgtatcaaacaactcgaaagtgtagatatggcgaggatatccctggtcaatcaattgaaagaagctctcaacgaacaggagtcgaaatcattagttcttcgcgatcaattgcaagttgctcaaacagaggctcaacgtgtcatccaacttaggaaacaactggggggtgcccttgtcacgagcgtcacacattctacttctagtccgctcatgattactccaccagaacaaacttcggctataatgcagggttcagaagtaagatcgacacatccccagtcacaaccactgaatcctgcagcttcgcttccccctacagtcagtgcagtgggtgatgagtccaagagaacggcggcagctatggcggataagcttgcatctttgtcagcacctgtgcaggtgcaacaacagattggaggcacgcatccaccagctccagctccaggctcattcccaccacctccaccgccattgccgtctctactgccaccgctcctgcaacagttcggtcaaaatactggagggatgattggaatgggaggacctttcgggatgatggctggatctatgccacctccgcctccattgtccaacattctgccggcaggttttccgcgaccaagtgggccacctcctccacctccacttccaccagctcagagccagccccagcagcagtctcctcaggcggcacagcaatcaccaacatcaactggattctttcagtcatcgggcatggggttctttccgcctgcgcaggtgcagcaatctccatctgcccaacgccagtgactcaacggtggctctggcattcatgggcgtaaaggcagcggcgcccttgtgtgttaactttgtacactgaacaatatttcactctgtgtcgagcttaaacgtggctggctggtcctgcaagcgaggcagggccaatggccacgaattagagagattgtagaataggcatgcgtcctctgctatgtataactattcacttttttttgttttgttttgtttgtctgagtagttttaacttttcctttttcccgtttgcattgatcccccgaggcagaagaaagtgactttggaaagaaaaaaaaaactggtgtttgcccaactgatggaaacagttttaggactgaaacagctgtggaactaccggtcatagtctcagatatgataatgaactgcaaatatttcccatgctgtttaaatatgttgattcttattattgaagctacgcactatagctaggaaggaag

SEQ ID NO: 213844 - DNA, 822 bp, Zea Mays
tcagtccacgttgtggattgattcatttagtgtcatcatttgtagtccccaatcatccgacgctgatcccctcgattcgcggcgccctcgcctccaccactctccaaccacccgacgccgaccgccatcaattcacgcccccaccagctgcatcggttccctccagcgccccgcctcctggcgcagatccgtgcaccccttgccctctccggactcgatgattcacagatccgcccagctgcccaggcactgactaccggcatccggatctcctgctccactgctcgccgcctcggggctctccggcgttggctcagcgcgacgggccccccaatagcctagttccggatcccccaaccgcccaagccccacaggtcaagcaccggccaccgatgtctgacgaacgagcgaactccccgcggatgcaggaggaggaggtgcaggagcgaccgccgaccgtccgtgtttcaccatccccttcttcgatcacaaggaatcataaaagcatatggaggaactatgtataggctacaaagaagcataagaagcatttttatagcagaagccaagtgttctgatgattttgttttttcaattgtgttttatgttattagttcagcatgtacatatattgacatgatttatggcatggcatctgtcatctttgttatatttatgacatcgttcttgattgatgtgtgcgacatgaatgatggtttttttaacatcctgaccatcattgtgtcgctcattatcgtattttgtatatcgtttatgggttcacggatatgaaatgacaagtttcttatttttgagttctga

SEQ ID NO: 213845 - DNA, 3509 bp, Zea Mays
aacggatttgcgcgcttcgtggccgaaagaaacggagagattcggccaagattgggatcaatctgcgcatgggtcggtatcgtataagaacgtatagttgcaggtgatcaagatccaatacttgaaaataggatgttgacatgttactgtttagatgacaccagatgataatgcccttatagctctcaaaaaaggcagtaaacttatcaagtatagtaggaagggaagacccaagattcgtgagttcagactttctagtgatgaaacatcattggtttggtattcccatagcaaagtgaagtaccttgtactgtcttctgtctctagaatcattcctggacaaagaactgctgtatttaggaggtttttacgccctgagaaggactacctatcattttctttgatatacaagaacggacaacgttcccttgacctggtttgcaaggatcaagcagaagttgaggtctggttttcaacgcttgaggcacttattacttcatgccgtaaaagttattcagctgatggtccaagtgatagattatcagtttctgacgaagtatcacattaccaagatacttttcatgatacaacactagatattgcatcgagtatcacacgtacttttaactcagcaaaaacagatgttgtatctgatcgtgcaaatatgctaagagcaagtacagacagtagccggcttagtatttccagtgcccctagttcttcaagtcaaggttctggacaagatgacattgaatcccttggtgatgtttatgtgtggggtgaggtgtggactgatatgatccctgcagaaggatccgcaaactatttgtgctccaaagcagacattttaattcccaaaccacttgaatcagatgttgtcttggacgtacaacagatagcgtgtggttataggcacattgcactcactactaggcaaggagaagtatttgcatggggcgaagaacttggcggacgacttggtcatgggaccgatgcagatattagccgtcctaaacttgtcgaagccttagcagtgtcaaatgtagaatatgttgcgtgcggcgagttccatacttgtgctataactgcctctggtgatttgtacacttggggtgatggatactacaatgctggattgcttggacatggtgctggaactagtcactggcttccaaaacgagtctcaggacctttagaaggggttcaggtattgtctgtttcatgtggttcatggcattcagcactgaccacatcaagtggtaaagtgttcacctttggtgatgggacatttggtgcccttggacatgggaatcgtcatactgtcgcatatccaaaggaagtcgaaactttgagtggatttagaacaataaaagttgcctgtggactctggcattctgcagcgattgtggagaccactaatcaggcaggtgtgaatgtgatatccaggaagctatttacctggggtgctggtgataagaatcccctaggtcacggggataaagatgctaggctagttcctacttgtgttcaatctctcattgattataatttccatcaggtagcttgtggacatagtatgaccattgccctttctacatctggtcatgttttcacaatgggcagctctagcaatggccagcttgggaatccaaaatctgatggtaaacatcctaccccagtacaagataggctggctggagaattggttgaagagatctcatgtggctcatgccatgttgcagtcttgacttcacgaagcgaagtatatacatggggaatgggagccaatgggaggctgggacatggtggtgttgaagataagaaaaaaccaactcttgtggaagcattaaaagatcgtcacgttaaaagtatagcatgtggttctaatttcacgacctgcatttgtatacataagtgggtttcaggtgctgatcagtctgtctgctcaggttgtaggcaaccatttggcttcacaagaaagagacataattgttacaattgtgggcttgttcattgccatgcatgtagttcaaaaaaagttctgaaagctgctttggcaccaactcctggcaaaccacatcgcgtatgtgattcatgcttcatgaagcttaaggcagcggagaccagcagcaacagctcacatagcaaaagaaatgccattgctcgtcgctctgttgatagcaaagacaggtcagagagaccagaaataaggtcttccaggcttgcaactggatcaacagcagaaccactcaagcaagctgagctgaaagcagttagaaacgagataaaaccagatcctatgtccacgatgagggcaccccaagttccttccatgctaccttttaacaatcttgcttttggcgcaacatttggtggtccagctagtctgaagcccatgacaatggctccaatgccaatggccatgcctatgtcaccagctcctctcacaaagaagccaactccagcagcagcaactcctctttgtggtaaaagtgataccgataacttgaagatggctaaacaggtgctgaatgaagatatctcaaagttgcaatctcaggttaataaactgaaacaaaaatgtgatgcccaagaagagcaactgcagaaagcggaaaggagagctgaacattctgcctctacagctgcagaagagtcttcaaggcgtaatggtgtcttggagttcattaggttccttgacaatgagctcaagagcatcgcagatagggtgcccagcgacgctgccgacggcttaaaagccttgcaaaaccattcggagaggtttctcacagaacaaggtgttcgtccactggaagccacaggtatgcatcgtaagtgcgcaagcataggcaacctcgtaatgtctcaggacggcagtgctggaaacgcgagcagctcggctgcttccttggcgagcgagtctccatgccaccgtatcatggagaacagctcgagagctaacggcgacttagcaccgaagctcggtggtacccatggagaagtgcagctgattgagcagtttgaaccgggggtgtatgtgacgctcatccagcttagagatggcactaaggtgttcaagcgtgtccggttcagcaagaggaggtttgcggagcagcaggccgaggaatggtggagggagaaccaggagagagtgttcaggaaatacaaccacccggccaactaaccagcctcaccagacttcaccattggacacttcaagaagaaggcaaagttttcttcatgttgcttggggcattgctcctgcggctgtgtgccgtgggcctgtggcgatgtagaattaggttgtggatggggaagatgctgatgtagattctcattctgttgttgtttacctcctacagtttaccctttctctagctcacctcctacagtttactgtttcgcagttttgatatctcaaattattcattcaacagccgtgtgtttggttggaatgtgtttcgttggatcgcggcggtgaaaaaaactgacgtggaccgtgagttatg

SEQ ID NO: 213846 - DNA, 2269 bp, Zea Mays
gttccttccccaactatcgttaggcttctccaccccgccctccccgccctccccgccgaacgcgcctcactctccctccatgcagatcaatgcgtccttccaccccaaccgtgctcctcgcccttctctcgtcgtcctcgttccccctagactggcgtggagtgaagatccatccggactccgattgatttcttctcctgctggtaaaagaaacggagagattcggccaagattgggatcaatctgcgcatggttgcaggtgatcaagatccaatacttgaaaataggatgttgacatgttactgtttagatgacaccagatgataatgcccttatagctctcaaaaaaggcagtaaacttatcaagtatagtaggaagggaagacccaagattcgtgagttcagactttctagtgatgaaacatcattggtttggtattcccatagcaaagtgaagtaccttgtactgtcttctgtctctagaatcattcctggacaaagaactgctgtatttaggaggtttttacgccctgagaaggactacctatcattttctttgatatacaagaacggacaacgttcccttgacctggtttgcaaggatcaagcagaagttgaggtctggttttcaacgcttgaggcacttattacttcatgccgtaaaagttattcagctgatggtccaagtgatagattatcagtttctgacgttgtaggcaaccatttggcttcacaagaaagagacataattgttacaattgtgggcttgttcattgccatgcatgtagttcaaaaaaagttctgaaagctgctttggcaccaactcctggcaaaccacatcgcgtatgtgattcatgcttcatgaagcttaaggcagcggagaccagcagcaacagctcacatagcaaaagaaatgccattgctcgtcgctctgttgatagcaaagacaggtcagagagaccagaaataaggtcttccaggcttgcaactggatcaacagcagaaccactcaagcaagctgagctgaaagcagttagaaacgagataaaaccagatcctatgtccacgatgagggcaccccaagttccttccatgctaccttttaacaatcttgcttttggcgcaacatttggtggtccagctagtctgaagcccatgacaatggctccaatgccaatggccatgcctatgtcaccagctcctctcacaaagaagccaactccagcagcagcaactcctctttgtggtaaaagtgataccgataacttgaagatggctaaacaggtgctgaatgaagatatctcaaagttgcaatctcaggttaataaactgaaacaaaaatgtgatgcccaagaagagcaactgcagaaagcggaaaggagagctgaacattctgcctctacagctgcagaagagtcttcaaggcgtaatggtgtcttggagttcattaggttccttgacaatgagctcaagagcatcgcagatagggtgcccagcgacgctgccgacggcttaaaagccttgcaaaaccattcggagaggtttctcacagaacaaggtgttcgtccactggaagccacaggtatgcatcgtaagtgcgcaagcataggcaacctcgtaatgtctcaggacggcagtgctggaaacgcgagcagctcggctgcttccttggcgagcgagtctccatgccaccgtatcatggagaacagctcgagagctaacggcgacttagcaccgaagctcggtggtacccatggagaagtgcagctgattgagcagtttgaaccgggggtgtatgtgacgctcatccagcttagagatggcactaaggtgttcaagcgtgtccggttcagcaagaggaggtttgcggagcagcaggccgaggaatggtggagggagaaccaggagagagtgttcaggaaatacaaccacccggccaactaaccagcctcaccagacttcaccattggacacttcaagaagaaggcaaagttttcttcatgttgcttggggcattgctcctgcggctgtgtgccgtgggcctgtggcgatgtagaattaggttgtggatggggaagatgctgatgtagattctcattctgttgttgtttacctcctacagtttaccctttctctagctcacctcctacagtttactgtttcgcagttttgatatctcaaattattcattcaacagccgtgtgtttggttggaatgtgtttcgttggatcgcggcggtgaaaaaaactgacgtggaccgtgagttatg

SEQ ID NO: 213847 - DNA, 3672 bp, Zea Mays
gttccttccccaactatcgttaggcttctccaccccgccctccccgccctccccgccgaacgcgcctcactctccctccatgcagatcaatgcgtccttccaccccaaccgtgctcctcgcccttctctcgtcgtcctcgttccccctagactggcgtggagtgaagatccatccggactccgattgatttcttctcctgctgaagaaacggagagattcggccaagattgggatcaatctgcgcatggttgcaggtgatcaagatccaatacttgaaaataggatgttgacatgttactgtttagatgacaccagatgataatgcccttatagctctcaaaaaaggcagtaaacttatcaagtatagtaggaagggaagacccaagattcgtgagttcagactttctagtgatgaaacatcattggtttggtattcccatagcaaagtgaagtaccttgtactgtcttctgtctctagaatcattcctggacaaagaactgctgtatttaggaggtttttacgccctgagaaggactacctatcattttctttgatatacaagaacggacaacgttcccttgacctgctgatctacaggtttgcaaggatcaagcagaagttgaggtctggttttcaacgcttgaggcacttattacttcatgccgtaaaagttattcagctgatggtccaagtgatagattatcagtttctgacgaagtatcacattaccaagatacttttcatgatacaacactagatattgcatcgagtatcacacgtacttttaactcagcaaaaacagatgttgtatctgatcgtgcaaatatgctaagagcaagtacagacagtagccggcttagtatttccagtgcccctagttcttcaagtcaaggttctggacaagatgacattgaatcccttggtgatgtttatgtgtggggtgaggtgtggactgatatgatccctgcagaaggatccgcaaactatttgtgctccaaagcagacattttaattcccaaaccacttgaatcagatgttgtcttggacgtacaacagatagcgtgtggttataggcacattgcactcactactaggcaaggagaagtatttgcatggggcgaagaacttggcggacgacttggtcatgggaccgatgcagatattagccgtcctaaacttgtcgaagccttagcagtgtcaaatgtagaatatgttgcgtgcggcgagttccatacttgtgctataactgcctctggtgatttgtacacttggggtgatggatactacaatgctggattgcttggacatggtgctggaactagtcactggcttccaaaacgagtctcaggacctttagaaggggttcaggtattgtctgtttcatgtggttcatggcattcagcactgaccacatcaagtggtaaagtgttcacctttggtgatgggacatttggtgcccttggacatgggaatcgtcatactgtcgcatatccaaaggaagtcgaaactttgagtggatttagaacaataaaagttgcctgtggactctggcattctgcagcgattgtggagaccactaatcaggcaggtgtgaatgtgatatccaggaagctatttacctggggtgctggtgataagaatcccctaggtcacggggataaagatgctaggctagttcctacttgtgttcaatctctcattgattataatttccatcaggtagcttgtggacatagtatgaccattgccctttctacatctggtcatgttttcacaatgggcagctctagcaatggccagcttgggaatccaaaatctgatggtaaacatcctaccccagtacaagataggctggctggagaattggttgaagagatctcatgtggctcatgccatgttgcagtcttgacttcacgaagcgaagtatatacatggggaatgggagccaatgggaggctgggacatggtggtgttgaagataagaaaaaaccaactcttgtggaagcattaaaagatcgtcacgttaaaagtatagcatgtggttctaatttcacgacctgcatttgtatacataagtgggtttcaggtgctgatcagtctgtctgctcaggttgtaggcaaccatttggcttcacaagaaagagacataattgttacaattgtgggcttgttcattgccatgcatgtagttcaaaaaaagttctgaaagctgctttggcaccaactcctggcaaaccacatcgcgtatgtgattcatgcttcatgaagcttaaggcagcggagaccagcagcaacagctcacatagcaaaagaaatgccattgctcgtcgctctgttgatagcaaagacaggtcagagagaccagaaataaggtcttccaggcttgcaactggatcaacagcagaaccactcaagcaagctgagctgaaagcagttagaaacgagataaaaccagatcctatgtccacgatgagggcaccccaagttccttccatgctaccttttaacaatcttgcttttggcgcaacatttggtggtccagctagtctgaagcccatgacaatggctccaatgccaatggccatgcctatgtcaccagctcctctcacaaagaagccaactccagcagcagcaactcctctttgtggtaaaagtgataccgataacttgaagatggctaaacaggtgctgaatgaagatatctcaaagttgcaatctcaggttaataaactgaaacaaaaatgtgatgcccaagaagagcaactgcagaaagcggaaaggagagctgaacattctgcctctacagctgcagaagagtcttcaaggcgtaatggtgtcttggagttcattaggttccttgacaatgagctcaagagcatcgcagatagggtgcccagcgacgctgccgacggcttaaaagccttgcaaaaccattcggagaggtttctcacagaacaaggtgttcgtccactggaagccacaggtatgcatcgtaagtgcgcaagcataggcaacctcgtaatgtctcaggacggcagtgctggaaacgcgagcagctcggctgcttccttggcgagcgagtctccatgccaccgtatcatggagaacagctcgagagctaacggcgacttagcaccgaagctcggtggtacccatggagaagtgcagctgattgagcagtttgaaccgggggtgtatgtgacgctcatccagcttagagatggcactaaggtgttcaagcgtgtccggttcagcaagaggaggtttgcggagcagcaggccgaggaatggtggagggagaaccaggagagagtgttcaggaaatacaaccacccggccaactaaccagcctcaccagacttcaccattggacacttcaagaagaaggcaaagttttcttcatgttgcttggggcattgctcctgcggctgtgtgccgtgggcctgtggcgatgtagaattaggttgtggatggggaagatgctgatgtagattctcattctgttgttgtttacctcctacagtttaccctttctctagctcacctcctacagtttactgtttcgcagttttgatatctcaaattattcattcaacagccgtgtgtttggttggaatgtgtttcgttggatcgcggcggtgaaaaaaactgacgtggaccgtgagttatg

SEQ ID NO: 213848 - DNA, 2307 bp, Zea Mays
cccctccccccgttcccctagttgaatcccacctcttaccgaggttgtaagaggatgggtacagaaactccaaggacaaccccagagtgttagatgtagaagcccccaagcctgaacccaccacggagatcctcttcctctgcagctacgagaactgcggcaagacctttgttgatgtcagcgcgctccgcaagcatgctagcgtgcacaacgagaagcagtatatatgcaacgagcccaactgtgggaagaaatttgttgatagctccaagttgaagaggcattatcttacccacacaggacaaaaggattttgtctgtccacatccaggctgtggtaaggccttctcattggattttaacctacggtcacacctaaaaacacatgcattggagaattatcacatatgccctttcccagcatgtggcaaaagatttacaagtgacttcaaactaggagcacatgtcaagtcacatgaaaagactggaactcctattgcagtgcagcatgcgccagcgccaccagcagaaaaaccgcgtgtcgccccaaagcctccgactccagcaaccacaagctatgctgatcggccatatgtctgcccctatgaaggttgtgacaaagcatacattcacagttacaaattgaaccttcatctaaaaactcagcaccctgaacacggtcaagaggaaaacggtaaggtcggtgcttctggtgggcagcatgctgcgaacgaacacacttaccagtataactatgccgaggttggcgagattgcaccaaaccccaaaaggagcaagacgaatcatgggcacaaggtccactcatccaaagcctacaatgccaaggtttcgagagcaatgccttctgacattggcgtcaggaaccagtggccaggtaaagctacgtaccaagatgatagtgaagagacggaagaagatggaggcaacaacattgaagatggctggagatatggcaacaatgatgacgatgaggaaacaccagatgaagattgacctttatttaggtttggatatgtagatatatgagggtgatctgttgtcctttagtttcaatgcagtcatggggaagttcaagctttaaccttaggtagtagttcattcagatggtgcatggatatattgtactcagttacctgctcctaaatgctttcactcccctatcttccagagccacatgtattttagatagtttggatatgtttgccttggaataaattttcatttgaaatgttagtatgttactcaactaaattgtttttatcagatgaactaggtagttgaaaaaaaatacaaatccaggtagacatgcagtttagccataacaaacatgttttgcttacaacaatctgctcatttttttcctggcaaatcactcggtgtatcaaaaactttagagctatgtagttgaaagactaatcaacacgcagtttaaccatgagcaagctttgtttaattattacagtctacgagtacttattcaggcagatcactctgaggttgtgcctactgttgggcgctgccagcttgaccttgttggtagctgccactgccagcaggagtaagcacagccagctcatgcttcctaccgttcttgagctctgcagcttcctccatggagatggcatacgagctggcgatgacggcggccggcaagtcgctcaggacggagttcttcccggcgacgtggctgaccatggtgtcagggttcgtctcgaaggcgatgtactggaagccttctccctgcgccttggtggcgacgaggtagccctggggtacgatgagcagctgccccgcacggagcacgtcgtcgaacaccgtggtcccgttgtcgctggcgacctggacccttgcactgcccctgatgccgtacatggcgctgtgggcgttgaagttccagaacggcgacatgatggcgtcctggtacaggtctacccgcaccgcgctcatctgtacgaggttgaggacggggaacttgtggctggtgaggcgtgtgatcctcccagccccagggctgtagacgtcggcctggtccagccgttcgacgctgtgcctcacctccatggcgcagacgttgtgcctgtcgacgtcgcgctggcacgtttggtactggacttgtgacgatgggaacgaaaacgacgacgacgacggcgacggattcagctggtgaaagccgtgctccggctccacgcggacgatctcgcctcgctggtcacgccggctctgcagcttctcggcgacgtgcatgctgacgcccagggcttcgctcaggaaccgggcgtcgatccct

SEQ ID NO: 213849 - DNA, 2959 bp, Zea Mays
ctacaccaaaaccagcagcacgccgacacgccgccgcgccgcgccgccattctcccatccgcccccgtgcccccgccgcccttccctaacctcgccgcggaagacgtcgcgccgtgcgtagctagcagttccccgtcgcacgcgcgtcggataagaattggttttggctcttcgtctccccccatccttgggtccttcccctcccactccctcttcgcctcgtccgcggcagtaggctcaagcttaggaactcgctaccgaggatcataaatttctctagggatttggcatatccgcgagtgagcagaattagttggaggcttcgtgatggcgggcgcgaaggcggatgtagacgcagaaacaggagatggcagcggggtcggcagtggcggcggcggcctctttagcgagcagatgctgattgataagctcaacaggctcaacaactcagccactagcattgagacactttcacaatggtgcatttttcaccgcaagagggccaaaagggttgtagatacatgggaaaaacagtttactagttcaagggaggagaagaaaataccattcctctatctatcaaatgatatcctgcaaaacagtaaacgcaagggggcagactatgtggatgagttctggagggttctacctagatccctgaagcatgtttatgaaaatgggggagaggaagggaggaagcaggtggcgagattgatattaatctgggaccaacgtaaagtttttgggactcgtattggaagtatgaaaaatagcattcttggtgacaaccctcctatattggataacaatgtgaatagtttaaatcctagctctaatcccacttcaaattccaaagctgcacggaaggattctggtacagtagtaaaaaaactcactgttggcgggatgcctgaaaagattgtgtctgcataccaatcagtgtttgatcaacattttgatgaagacacagctctaaacaaatgtaagagtactgtgggccttttggagagaataaataaagatattaacgatgctagcatcaacggtaatcagccagcatcatcattgatctctgaccttcaagagcaggaaatgaccttaaaacagtgcatcgaacaacttgaaagtgcaggtagggtgaggatatccctgatcaatcaattgaaagaagctctcagcgaacaggagtcgaagtcaataattctccgtgatcaattgcaagtcgctcgagcagaggctgaacatgccattcaacttagacaacaactgggtcgtgttcttgtcacgaacgatacacaatctacttctagtccgctcatgattactccaccagatcaaacagcagctatgatgcacggttcgggagtaagatcgacacctccccattcacaaccactgaaccctgcagtgtcacttccccctacagtcagtgcagtgggtgatgagtccaagagaacggcagcagctatggcagataagcttgcatctttgtcagctcctgtgcaggtgctgacctccattctctcatcttttgccgctgagcaagctgcttccataaacggcggatcaccttctggagaactctctggagtaccaccaggtttccatattgataagaggcctaggctggagaaaacagggcaggccgaggcgggcgctcctcccttttttgggcaagcgtcacaggtgcaacaacaggttggagcagtgcctacttcttttggaggcacacatccaccaactccaggcccattcccaccccctccaccgccattgccacctctattgccaccgctcatgcaacagtttggtcaaaatactggaggaatgatgggaatgcgaggacctttcgggatgatggctggctctatgccacctccgcctccattgtccaacattctgccggcaggttttccgggactaagtggaccacctcctccacctccacttccaccagctcagagccagccccagcagcagcagacctctcaggcgccacagcaatcaccaacatcagctggattctttcaatcatcaggcatggggttctttcctcctgtgcaggtgcagcaatctcagcctgcccaacgacagtgattcaactgtgtctatttgcactcatgggcttaaaggcagcaccttgcattaactttgtgcattaaacaatatctcaccgagtattgagcctaaacgttggctggtcctgcaagcgaggcacggccaatgacgacggattagaaagattgtagaataggcatgcacgttgtagaactatccccttttttgtccgagtagttttaactcttcctggttatgtgaagttgctagacttcgtttgtttttgatccagtctgcattgatcacccgaagcaaaagaaaacgactttggaaaactggggctgaaattgggacttcgccaactgacaggacagttttatggctgaaacagttgtagaacttactggtcttagtctcatagatatgatgtgaactgcatatttggcatgctgtttaaatctgtggattattattatcatcataccaccttttctgggtttgaaactgcagaattctttcacctggttcttacacaagggctagtttggacaaggaatcgtgatctggaaaagttgaaatgcatcaagttggcgtctgtgcatatgattccagacaccatctattgaggcttattgaggctcagtttggtttcattagttctaggactaaactttagcccatactctgttgggttgtagcgactaattagattctgaacactacacaaagactgaaatgcccttgccagtaaccgtttagctcatgtgtacaaaaactgggcaggaccgtgtataatctacacaaaaactgggtagtacgtttacacaaatactgaacattgcaaacattataatatgttgaaaatgttacacacaaccggtccaaaaatacttgttcaaat

SEQ ID NO: 213850 - DNA, 1268 bp, Zea Mays
cgtgcccccgccgcccttccctaacctcgccgcggaagacgtcgcgccgtgcgtagctagcagttccccgtcgcacgcgcgtcggataagaattggttttggctcttcgtctccccccatccttgggtccttcccctcccactccctcttcgcctcgtccgcggcagtaggctcaagcttaggaactcgctaccgaggatcataaatttctctagggatttggcatatccgcgagtgagcagaattagttggaggcttcgtgatggcgggcgcgaaggcggatgtagacgcagaaacaggagatggcagcggggtcggcagtggcggcggcggcctctttagcgagcagatgctgattgataagctcaacaggctcaacaactcagccactagcattgagacactttcacaatggtgcatttttcaccgcaagagggccaaaagggttgtagatacatgggaaaaacagtttactagttcaagggaggagaagaaaataccattcctctatctatcaaatgatatcctgcaaaacagtaaacgcaagggggcagactatgtggatgagttctggagggttctacctagatccctgaagcatgtttatgaaaatgggggagaggaagggaggaagcaggtggcgagattgatattaatctgggaccaacgtaaagtttttgggactcgtattggaagtatgaaaaatagcattcttggtgacaaccctcctatattggataacaatgtgaatagtttaaatcctagctctaatcccacttcaaattccaaagctgcacggaaggattctggtacagtagtaaaaaaactcactgttggcgggatgcctgaaaagattgtgtctgcataccaatcagtgtttgatcaacattttgatgaagacacagctctaaacaaatgtaagagtactgtgggccttttggagagaataaataaagatattaacgatgctagcatcaacggtaatcagccagcatcatcattgatctctgaccttcaagagcaggaaatgaccttaaaacagtgcatcgaacaacttgaaagtgcaggtagggtgaggatatccctgatcaatcaattgaaagaagctctcagcgaacaggagtcgaagtcaataattctccgtgatcaattgcaattggtgaatgttcggcgccataagtgatgaaagccatgcacagattgatctgagtctgctaatagcaagcagattgaagcaacaacagatcatggtgtgcaactagctagca

SEQ ID NO: 213851 - DNA, 4703 bp, Zea Mays
cacggttctgccatcgtctcctctccgcgacgcacgcctccctctcctccgccccaccctcctccccacgccatcggcaccgccatcatcagatccggcccaagacgcctctgccccacgcgcccgagtcgtcgaggcacactcctgcccgcctccggcgtccacgcacatctccgcctcacctcggcgcccgagtcgtcgcacgcgttcgaggtggcgtccatcccggcaccggcctcacgcaccatctacagctcccaactctgctcctctcagttctccctctgcattccaccttctctcccttcctctccaagcaccgtcctcctcgcctagatccgtacaagctgcaaataacctctccggtggcaagacagatggagtcgatctccggcgaggatgctccgaagcacaacctgatcctgtccgcgctcgtctccaacctacagtgcatgctcgccgcccgccgcccgttcacggcagaggtcagcaccgccgccacagctagcgaggctgaggccttggctcaggaagcagaggcgtccgatgcccccacgggagatgggacgctggcgaggcccatcgtgctgctgacctgtgccggaggggaaccggtcggcgggtctcgcggcgctcgtcgacgccctcgttgccgccggccgctgcgatgtccacgtgtgtgcccccgaatcgtacatgctgtgacttagaaaaccaaaccacagcgggaccggtgctcggatagggtccaacggcgatgcaagcaaggagtggcatgcggccggaggggcgcagatcggctcctgcacgtgcagcgcagccgcgtgacagtgaagcagggaggccgcgataggcggcacagggagggtgcgacggaggcaaagtgcaagcacctggggacttcagtcactgaagcagaaagaaagagtacaagtctactactgcagaaagcaaggaggatgccaacagaagcagatttcatgtttggatcgggtattgacctttttgtgttctcctcaactcattatttagctacatatcttattaaatcttaatatttggtcattagctaccaacttgcactattattgtgaaaatccattaactttagccaatgaaatggttagactatcaccacgtaggtgatattagtggcattaagttattaatctgtggcaaattctattatcaactattttcttggctaatcattacaatatataatgaagaatactatggcttgaagggatatttatacagttggctatgtatacggtctgcccaagcgcccaacaatgaatgatgtggtgaaggaacttgagatcatcagatagaatgaaggggcacaattgctaaactcaacgtctttatcagttgaacaatttggaaaaaaagagaagagatccttatgcatttgcctatggatgatggaagcaacaacaacacttttgactacaacagtgggagttcaattaagttgttcacccaagtagatagttgtctccactctttcaacaagttattggagtgattatatatgtctgctccatatgaatgccttttcgttttagtatcacatctgaaattaccaaccttttagatcgggtattgacatctttgtgttctcctcaactcattatttagctacatatcttattaaatcttaatctttggtcattagctaccagcttgcactattattgtgaaaatccattaactttagtaagtgaaatggttagactatcaccacgtaggtgatattagtggcgttaagtgattaatcagtggcaaatcctattatcaactattttcttggctaatcattacaatatataatgaagaataccatggcttgcagtgatatttatacagttggctatgtatacagtctgcctaggcgcccaacaatgaatgaagtggtgaaggaacttgagatcatcagatagaatgaaggggcacaattgttaaactcagcgtctttattagttgaacaatttggaaacaaaaagagaagagatccttatgcatttgcctatggatgatggaagcaacaacaacacttttgactacaacagtgggagttcaattaagttgttcacccaagtagataattgtctccactctttcaacaagttattggagtgattatatatgtctgctccatatgaatgccttttcattttagtatcacatctgaaattaccaaccttttagatcgggtattgacattttttgtgttctcctcaactcactatttagctacatatcttattaaatcttaatcttttgtcattagctaccatattgcactattattgtgaaaatccattaactttagtcagtgaaatggttagactatcaccacgtaggtgatattagtggaattaagtgattaatcagtggcaaatcctattatcaactattttcttggctaatcattacaatatataatgaagaatactatggcttgaagggatatttatacagttggctatgctgcttacatgatccatttagctgtctttggatttttggggtaactctccaatatctcacatgaggttctttgtgatagctgttacttaatctgtggtgatctatgtaaatgtggcaacacttgcagttcctcgagcccttgtgcatggatatatcgtttagttgtgtctaataatttgtaattagtggcaacatctttttgttattttggttttatctgctttttattgttataagatctcgattgcaaactggcagttagtacaccattaggttttcctttgtcgtatcaagctaataatgtgtgaagcagggttcccattctgatctttagttttttgtgattttaatagcaataaccttttttcgcaaaaaagtaacaaactttatgcagaatgcggtccgtatagttcccagtatccttttgtacttagatttagtttgatatatggttatgtttattgacagaatgctttttagctttgcagataaaatcttaagcaaaatgggagaaggtttgggttttctgcaatctgtcgtctcctcttctgctgggtatctccgttattattctaatgaagagggctatgagttggattttcgtaggtacatttgagcgtgttttggaatgctgggaccgtgaaacacatgaatatgttgccataaaagttgttcgcagtatccacaagtactctgatgctacaatgattgagatagatgtgctcaatcgccttgtagaaaatgaaaaatatagatctctgtgagtatctcagagacctaattgcttaaagtataaccctattctatttttgacttgacagttcctcttcaatttgtcagctgtgctcaaatttagagatggcttgactatcgtaatcatatatgcatggatgcgttactttatgtttgcttgtatttaatatagaaggctcccttgccttcgttcgatcatgtggtatttgaaagtgatgtctctataaatgaagtaaggtagggcaatgcttatgttactgttgtcagttattagctttttaaaccatgcatctgtcaatgtgtcctgtttcaatagggtcttattataggacgtgatggcactgaattaggatgtttgttcttttgctacctttgttaaacaacatcagatcattcgtattgtatccttcctcggattgcttcttttgttctactacaaatatgcccaacatggcagggagaggtatgctcctaaatttcttattttgtgcattgtgaaatgattgttctaacaacatcaagtttgtgttcttcatataatctatctcagattgctctgtgttttgcaggtctcgaggtcaagcctggacccactgtcaagtgtgtgcttggacatgactttatcctgcactttccactgctgcacttggggaatcaaagaaaagtgaaagtaccatgtcaaagttgatgaccagaagcttgctattggaaccctctctattgaaaaatacccctagatagaaattgatttggttttcaataaagagtgtgagttgtcacacacatagaaaactacctgtgtatttttctttggttacaaggttgagcaaccaatcgaggaagatgaatatcctttttaacattgatttttttagttttatttcatgtaagactgatctaaacaatttctttgtggagtattttgtttccttgatctcatttttgcttcttgcctcttacataatggatcttgattctgaagatgaagagaaggagctaaacattccagtaatcaaggaaaatggcaaaggtgatgggaaggcagttgctgcagcttcaaaatcaagtcttgggcttgaaaaaaagcaaggatgagtatgagtctgatgattctgatgagggagaaggtgaaaccggagaatgaggagatgtggttgttcatggacgacagcatcaagaaacctgcaacatgcaacctgattttaagaaatctgccacctgcaacatgactgggcagtggtatctctgagatataatgtggacaacggcaaagaatactatgcatacacaacaaaagagtcctacaacctgattttaagtccatttgtagcaaaccatcttggaagccattaactcgttgaatttgaagctgatgtgcagttttatttttatgtcagttttactgatgcagttagttcctaagaagatccatggcaacttgtttcacgctgatg

SEQ ID NO: 213852 - DNA, 3457 bp, Zea Mays
tccacatccgtatggtgcacggttctgccatcgtctcctctccgcgacgcacgcctccctctcctccgccccaccctcctccccacgccatcggcaccgccatcatcagatccggcccaagacgcctctgccccacgcgcccgagtcgtcgaggcacactcctgcccgcctccggcgtccacgcacatctccgcctcacctcggcgcccgagtcgtcgcacgcgttcgaggtggcgtccatcccggcaccggcctcacgcaccatctacagctcccaactctgctcctctcagttctccctctgcattccaccttctctcccttcctctccaagcaccgtcctcctcgcctagatccgtacaagctgcaaataacctctccggtggcaagacagatggagtcgatctccggcgaggatgctccgaagcacaacctgatcctgtccgcgctcgtctccaacctacagtgcatgctcgccgcccgccgcccgttcacggcagaggtcagcaccgccgccacagctagcgaggctgaggccttggctcaggaagcagaggcgtccgatgcccccacgggagatgggacgctggcgaggcccatcgtgctgctgacctgtgccggaggggaaccggtcggcgggtctcgcggcgctcgtcgacgccctcgttgccgccggccgctgcgatgtccacgtgtgtgcccccgaatcgtacatgctgtgacttagaaaaccaaaccacagcgggaccggtgctcggatagggtccaacggcgatgcaagcaaggagtggcatgcggccggaggggcgcagatcggctcctgcacgtgcagcgcagccgcgtgacagtgaagcagggaggccgcgataggcggcacagggagggtgcgacggaggcaaagtgcaagcacctggggacttcagaaacaaaaaattgtttcaccgtcaagcaccaatttttaggtaggtcagtgttttgggatgattctccgatgcatcaatagcaaccttgtgcttggcaaagttatttgccctgataatgttgtaggtttagtgaaaagaaatatactgacatatccatcgatccatcgatgcccaatggagattgacctctatcaagatttagttacgtgtctcaatagggcaatatttctgtgagttgtatactgtggattcctcatctgcatcatgaattgatcgcactatttatgccctatttttcaaaccatggtttctgtaattctttgcaccatggtatttttctcaaatgattttatctttcacaacccggactgaagtcactgaagcagaaagaaagagtacaagtctactactgcagaaagcaaggaggatgccaacagaagcagatttcatgtttggatcgggtattgacctttttgtgttctcctcaactcattatttagctacatatcttattaaatcttaatatttggtcattagctaccaacttgcactattattgtgaaaatccattaactttagccaatgaaatggttagactatcaccacgtaggtgatattagtggcattaagttattaatctgtggcaaattctattatcaactattttcttggctaatcattacaatatataatgaagaatactatggcttgaagggatatttatacagttggctatgtatacggtctgcccaagcgcccaacaatgaatgatgtggtgaaggaacttgagatcatcagatagaatgaaggggcacaattgctaaactcaacgtctttatcagttgaacaatttggaaaaaaagagaagagatccttatgcatttgcctatggatgatggaagcaacaacaacacttttgactacaacagtgggagttcaattaagttgttcacccaagtagatagttgtctccactctttcaacaagttattggagtgattatatatgtctgctccatatgaatgccttttcgttttagtatcacatctgaaattaccaaccttttagatcggataaaatcttaagcaaaatgggagaaggtttgggttttctgcaatctgtcgtctcctcttctgctgggtatctccgttattattctaatgaagagggctatgagttggattttcgtaggtacatttgagcgtgttttggaatgctgggaccgtgaaacacatgaatatgttgccataaaagttgttcgcagtatccacaagtactctgatgctacaatgattgagatagatgtgctcaatcgccttgtagaaaatgaaaaatatagatctctgtgagtatctcagagacctaattgcttaaagtataaccctattctatttttgacttgacagttcctcttcaatttgtcagctgtgctcaaatttagagatggcttgactatcgtaatcatatatgcatggatgcgttactttatgtttgcttgtatttaatatagaaggctcccttgccttcgttcgatcatgtggtatttgaaagtgatgtctctataaatgaagtaagatcattcgtattgtatccttcctcggattgcttcttttgttctactacaaatatgcccaacatggcagggagaggtctcgaggtcaagcctggacccactgtcaagtgtgtgcttggacatgactttatcctgcactttccactgctgcacttggggaatcaaagaaaagtgaaagtaccatgtcaaagttgatgaccagaagcttgctattggaaccctctctattgaaaaatacccctagatagaaattgatttggttttcaataaagagtgtgagttgtcacacacatagaaaactacctgtgtatttttctttggttacaaggttgagcaaccaatcgaggaagatgaatatcctttttaacattgatttttttagttttatttcatgtaagactgatctaaacaatttctttgtggagtattttgtttccttgatctcatttttgcttcttgcctcttacataatggatcttgattctgaagatgaagagaaggagctaaacattccagtaatcaaggaaaatggcaaaggtgatgggaaggcagttgctgcagcttcaaaatcaagtcttgggcttgaaaaaaagcaaggatgagtatgagtctgatgattctgatgagggagaaggtgaaaccggagaatgaggagatgtggttgttcatggacgacagcatcaagaaacctgcaacatgcaacctgattttaagaaatctgccacctgcaacatgactgggcagtggtatctctgagatataatgtggacaacggcaaagaatactatgcatacacaacaaaagagtcctacaacctgattttaagtccatttgtagcaaaccatcttggaagccattaactcgttgaatttgaagctgatgtgcagttttatttttatgtcagttttactgatgcagttagttcctaagaagatccatggcaacttgtttcacgctgatg

SEQ ID NO: 213853 - DNA, 4886 bp, Zea Mays
gtgcacggttctgccatcgtctcctctccgcgacgcacgcctccctctcctccgccccaccctcctccccacgccatcggcaccgccatcatcagatccggcccaagacgcctctgccccacgcgcccgagtcgtcgaggcacactcctgcccgcctccggcgtccacgcacatctccgcctcacctcggcgcccgagtcgtcgcacgcgttcgaggtggcgtccatcccggcaccggcctcacgcaccatctacagctcccaactctgctcctctcagttctccctctgcattccaccttctctcccttcctctccaagcaccgtcctcctcgcctagatccgtacaagctgcaaataacctctccggtggcaagacagatggagtcgatctccggcgaggatgctccgaagcacaacctgatcctgtccgcgctcgtctccaacctacagtgcatgctcgccgcccgccgcccgttcacggcagaggtcagcaccgccgccacagctagcgaggctgaggccttggctcaggaagcagaggcgtccgatgcccccacgggagatgggacgctggcgaggcccatcgtgctgctgacctgtgccggaggggaaccggtcggcgggtctcgcggcgctcgtcgacgccctcgttgccgccggccgctgcgatgtccacgtgtgtgcccccgaatcgtacatgctgtgacttagaaaaccaaaccacagcgggaccggtgctcggatagggtccaacggcgatgcaagcaaggagtggcatgcggccggaggggcgcagatcggctcctgcacgtgcagcgcagccgcgtgacagtgaagcagggaggccgcgataggcggcacagggagggtgcgacggaggcaaagtgcaagcacctggggacttcaggtaagtagaaaaccaacactgaatttgtcggttctctgttttgtgattgaccgattggtttgttgatctcagaaacaaaaaattgtttcaccgtcaagcaccaatttttaggtaggtcagtgttttgggatgattctccgatgcatcaatagcaaccttgtgcttggcaaagttatttgccctgataatgttgtaggtttagtgaaaagaaatatactgacatatccatcgatccatcgatgcccaatggagattgacctctatcaagatttagttacgtgtctcaatagggcaatatttctgtgagttgtatactgtggattcctcatctgcatcatgaattgatcgcactatttatgccctatttttcaaaccatggtttctgtaattctttgcaccatggtatttttctcaaatgattttatctttcacaacccggactgaagtcactgaagcagaaagaaagagtacaagtctactactgcagaaagcaaggaggatgccaacagaagcagatttcatgtttggatcggggatatttatacagttggctatgtatacggtctgcccaagcgcccaacaatgaatgatgtggtgaaggaacttgagatcatcagatagaatgaaggggcacaattgctaaactcaacgtctttatcagttgaacaatttggaaaaaaagagaagagatccttatgcatttgcctatggatgatggaagcaacaacaacacttttgactacaacagtgggagttcaattaagttgttcacccaagtagatagttgtctccactctttcaacaagttattggagtgattatatatgtctgctccatatgaatgccttttcgttttagtatcacatctgaaattaccaaccttttagatcgggtattgacatctttgtgttctcctcaactcattatttagctacatatcttattaaatcttaatctttggtcattagctaccagcttgcactattattgtgaaaatccattaactttagtaagtgaaatggttagactatcaccacgtaggtgatattagtggcgttaagtgattaatcagtggcaaatcctattatcaactattttcttggctaatcattacaatatataatgaagaataccatggcttgcagtgatatttatacagttggctatgtatacagtctgcctaggcgcccaacaatgaatgaagtggtgaaggaacttgagatcatcagatagaatgaaggggcacaattgttaaactcagcgtctttattagttgaacaatttggaaacaaaaagagaagagatccttatgcatttgcctatggatgatggaagcaacaacaacacttttgactacaacagtgggagttcaattaagttgttcacccaagtagataattgtctccactctttcaacaagttattggagtgattatatatgtctgctccatatgaatgccttttcattttagtatcacatctgaaattaccaaccttttagatcgggtattgacattttttgtgttctcctcaactcactatttagctacatatcttattaaatcttaatcttttgtcattagctaccatattgcactattattgtgaaaatccattaactttagtcagtgaaatggttagactatcaccacgtaggtgatattagtggaattaagtgattaatcagtggcaaatcctattatcaactattttcttggctaatcattacaatatataatgaagaatactatggcttgaagggatatttatacagttggctatgctgcttacatgatccatttagctgtctttggatttttgggataaaatcttaagcaaaatgggagaaggtttgggttttctgcaatctgtcgtctcctcttctgctgggtatctccgttattattctaatgaagagggctatgagttggattttcgtaggtacatttgagcgtgttttggaatgctgggaccgtgaaacacatgaatatgttgccataaaagttgttcgcagtatccacaagtactctgatgctacaatgattgagatagatgtgctcaatcgccttgtagaaaatgaaaaatatagatctctgtgagtatctcagagacctaattgcttaaagtataaccctattctatttttgacttgacagttcctcttcaatttgtcagctgtgctcaaatttagagatggcttgactatcgtaatcatatatgcatggatgcgttactttatgtttgcttgtatttaatatagaaggctcccttgccttcgttcgatcatgtggtatttgaaagtgatgtctctataaatgaagtaaggtagggcaatgcttatgttactgttgtcagttattagctttttaaaccatgcatctgtcaatgtgtcctgtttcaatagggtcttattataggacgtgatggcactgaattaggatgtttgttcttttgctacctttgttaaacaacatcagatcattcgtattgtatccttcctcggattgcttcttttgttctactacaaatatgcccaacatggcagggagaggtctcgaggtcaagcctggacccactgtcaagtgtgtgcttggacatgactttatcctgcactttccactgctgcacttggggaatcaaagaaaagtgaaagtaccatgtcaaagttgatgaccagaagcttgctattggaaccctctctattgaaaaatacccctagatagaaattgatttggttttcaataaagagtgtgagttgtcacacacatagaaaactacctgtgtatttttctttggttacaaggttgagcaaccaatcgaggaagatgaatatcctttttaacattgatttttttagttttatttcatgtaagactgatctaaacaatttctttgtggagtattttgtttccttgatctcatttttgcttcttgcctcttacataatggatcttgattctgaagatgaagagaaggagctaaacattccagtaatcaaggaaaatggcaaaggtgatgggaaggcagttgctgcagcttcaaaatcaagtcttgggcttgaaaaaaagcaaggatgagtatgagtctgatgattctgatgagggtgagtgattatctcctgaagaaggaaatgttgtgatttgaagggtatggtgcagaaaagttttgtctgcatgtcatgacagtttcatacaacgcacgggcgaacgcactgggagcctaccacctcccgtgctcaccattgccgtgtttgatacctgactgctactgatgttacttcgaatctctggggtgctcatggagtcatggtgcatatgctcatgtttgcagggtgtcagtttttttcatcgtctacttctagagataacaactttagcatgttggttaaagattcttggtgtgctaagcttttcttttttgcttcatttgaaactcaactatatagatggtgccctactttacattttgcaaacacaaactgctccaaaataaatggaagcttatgtcttcatctctcgtgtgcttcatccgtgtgcttggaattttagccccttcttttgcttctaacatagatgcttttgtgttacatgtatttggttaccgaattaggaccatgttttctctttggatatttcagaactaatatccccaaaagattcccttatctaaacacttgagtaggggaagcaaccatgttgtgctgcgataagagcgtagctgatatgtgatttgtaatttgcatctttttaatgtcatgtaacagtaagaccccatatgtatgactcatagttttttgctttccctaagctaggttccaagtgaagacataccccacagacttatcaatatcgataaaaaggattagattagtataaatatatttacctatcactaaaaattgtatattgactttttagaaataatttgtgcgtattgataatgtttgctcggcatcagttcaaactatttggttcgac

SEQ ID NO: 213854 - DNA, 1270 bp, Zea Mays
ccgagtgctgcaaacacaggcacacagctgctatcggatgtcggaggccaaaacccagacgcaacgcaacccaccccctctctgtcctctccgtcctgaactcgcgcctcgcttcgtctctcccattcccacccgctgaagcttcaaggagcttctcgtctgagaccgagctaacgagctcaccggcgggcaggatgctggcggcgtccaccaaggtcggctctaggctggcctctccgcacgcctccttgtccgccggtgctgcggcggcggcactggcgagctcccccgtgctgggctctgggatgctcccaggcgccgggttcggcgagacggggagtcaccacgcggcagacgcgccgccggcgctgccttgcagttcctcgggcgattcaagggaatattatcagtggaagagactggtgaatcaaaggcagtcaacgctagatggaggcaaagtgcctgctgcattgggccaccatgtttttggtgcgggctgttcctcacggaaccaacatatctacagatatttttcatcttctcatcaagggagtatatgggccgggagcaaggttctacatgacctgccagggtatgtaaaaattgtggaagtagggccacgagatggtctacagaacgagaaggacatcgtgccaacacctgtaaaggttgagcttatacgaagattggccacatctggattacctgttgtggaggcaacgagttttgtatctccaaaatgggtacctcagttagctgatgcgaaggatgttatggaagcagttcggactatggggggtgtacgttttcctgtattgactccaaaccttaagggatttgaggcagctattgcagcaggggcaaaagaaatcgcaatatttgcatcagcttctgaaggattttccaagtcaaacataaactgcaccattaaagagagcattgcccgttataatgacgttgctcttgctgcgaaagagaaagaaattcctgtccgagggtacgtttcttgtgtggttggatgcccagtagatggaccagtgccaccttcaaacgtagcttatgtagcgaaagaactttatgacatgggctgctatgaggtttcacttggtgataccattggagtcggtactccaggcaccgtggttccgatgcttgaggcagctatctccgtcgttcccgtggagaagctcgctgtccacttccacgacacctacggccagtccctctcgaacattctcatctctcttcagacgaacaagccactgtggat

SEQ ID NO: 213855 - DNA, 591 bp, Zea Mays
cgctgcgccgttcccagggctctgcgtgcaggtgtgccgcgtccacgccgctggcttgtgctgctcaggcctctgcaggcgcgtttcggcgattggaatgccgcgcagccgatcggaccagcgctgctgctagccccgccgcgaccatcttcgtcgagcttccgtccgaggccacctacctctatataagcatgggcgttgaagcaatcgaataaccaatctcacatcccatggcgcttctcaagagtaatgacactagggctctcttcctgatggccatcgtggtcatggccatggccatcgtgttgacaccctgccctgtgcacggacgaaatgatgagaggtgcacgcatatgccggggtgcactatcagccgttgcctcagccagtgcaagcagtgggggtatgccaaccctgtgataaactgctggaacacaccaccgaatacagttttggacacatgctgctgctttagtaatgctgctagaaaattggcttgattttatcactgacagctctagctgttggatcttgactgaacaatccaaatatatcaaaataatttgaatggaaatccttgttttaaagttc

SEQ ID NO: 213856 - DNA, 1253 bp, Zea Mays
atcagcgctttgcctctttatgccccctttcgctttcggtgcgtaagggcagcaaggcaagtcactctgatctctgtcttgctttcggatgcgtatatatagccgtcgagagcaaccaaaatcttcacaaaacatatctatatatctgcaacgtcaaatcaacacaggctgttgtttgcttcttttggtaaaggctttagctgcggcagatccaccggcggcgccccgagaatcgaagatgccggtgaaggtgttcggatcgccgacgtcggcggaggtcgcccgcgtcctggcctgcctgttcgagaaggacgtcgagttccagctcatccgcgtcgactccttccgcggcaccaagcgcctgccccagtacctcaagctccagccgcacggcgaggcgctcaccttcgaggacggcaacgtcaccctcgtcgagtcgaggaagatcctgcgccacatcgccgacaagtacaagaaccaggggtacagggacctgttcggcccgggcgcgctggagcgggcctccatcgagcagtggctgcagacggaggcgcagagcttcgacgtccccagcgccgacatggtctacagcctcgcctacctgccgcccgacaagtacaagaaccaggggtacagggacctgttcggcccgagcgcgctggagcgggcctccatcgagcagtggctgcagacggaggcgcagagcttcgacgtccccagcgccgacatggtctacagcctcgcctacctgccgcccgacatgcagctcgacggcaggggcggcggcggcctcccggaggcgaccgggacgacggcagaaggtggaggagatgctgcagctgttcgagaagagccgcaggcagctgggcaagctgctggacatctacgagcagcgccttggcgaggaggccttcctggccggaggcaagttcacgctcgccgacctgtcccacctgcccaacgccgaccgcctcgccggcgacccgcggtccgcacgcctcatggagtcgcgcaggaacgtcagcaagtggtgggacaccgtatcccgccgcgactcttgggtcagggtcaaggagttgcagcgcccgccgtccgcggaggcgcccttctgatgtcgatcgatcgcaaattaaggcggtggcctttgctcaagcctacgtgttcggtttctgcataattttttaataaataaacgccactggcccctctacgtcattggcgattgttcattgtgtaataaatcgttcaagagc

SEQ ID NO: 213857 - DNA, 1811 bp, Zea Mays
gaccacagccataaaaagtgctcccatgtacttgttggcatcaagtacagaatcgtgactcatttttgttctcaggaaaagtgtggagatcaccaaagccataacagttatctgaatggtcttgaatatatggactggagagtttcttttcagcagcagtacttcccttgaaaagcatgctttgaaaatattccatctggatattcggcgacttgcattcacttttaccacctttttctttccagtattgtttgaactgcactgtttgtcttctactagaagagggagataggacgtcctgaaggattgtgcaaaattttcaattgtatggtactgatacttgttttgatcaccagcccagtattgcttttggtccatcttagaggttacctggtcagtggccaattgagaaaacttgttacattgtttttgcaaaaggacatggaaaacttgttacattattttgcaaaagcacatgtattgcagaatagcgacattttacgctcctgcacataattatattcctctcctcatctcgtctcctactagggtatcagcacactcagacaggccaagtatctgcatacaatcaactgttactattgtatcatcaaggtatacagcaaatcaaacaacacattccaatgaccttcaaaatggaaagctcactatatgcaagagtatgtcttaccgaattcgttattggttccgaacatcttagaagagaagttgattgtctccctcactgtcatctcagcatgatggagatcatactggctaacataagcacgcaggatgctgggatccaagtctgtgcgcatgaggagacatgtaccttgacggccggatgaccccgcttacttcgtttatgattctcataggtcttttcctggtaacacacatatggacagacgtcgctaattcctgaaagcaaaataaactcatcatcagaaatctctctctctctctctctctttttccccgaatatgacctaccaactttgcattgtaaaacaaacacatgcatgccatacacttgtattttagctctcgctaaagcacgcagcagcgtaaccgtaacgaggcgcggtatcctttcgattctggactgaactccatgtgttcaattcgaactggcctaaggttgtctgcagatttacaaacccgcttacagtcgtgattttgtaatttttatttatgtttttcttacagcatagaacctgctgatgcatcaatgtcccactatctatttgggcacaagatgagcctcattaatcatgaggaatctagcagacgtgttgggttctcttggttcactcccagcgcgcagggggacgccaagaagcactactgatgatgcggcaggctgggggatcggacaggcccacattaaaggcggtctcgtcaacgtcatggtctgcgctgcttcctaccacgagtaaatgaggaactcgaagcttggcaagactgaggagagagagaagaaaagcaggctatactgctatagccagtttagtcacaagttgatcataaattaataatagaaagctaactacaaagatccgccagcaatccactatacattactctaattgcttctttcaacgtcctaaatctcaggaaatactataagatccatgcatagtgccataactctgaatgatgcaagtgttgttttaatatggtccaacgtacgtcgtactagtatttgttgtttcaaacttgcagaatttgatcttttttttatcgacagtagtagatggaaccaaccatgctctgctaactacttcctctgtttatttggaaagaac

SEQ ID NO: 213858 - DNA, 1714 bp, Zea Mays
gaccacagccataaaaagtgctcccatgtacttgttggcatcaagtacagaatcgtgactcatttttgttctcaggaaaagtgtggagatcaccaaagccataacagttatctgaatggtcttgaatatatggactggagagtttcttttcagcagcagtacttcccttgaaaagcatgctttgaaaatattccatctggatattcggcgacttgcattcacttttaccacctttttctttccagtattgtttgaactgcactgtttgtcttctactagaagagggagataggacgtcctgaaggattgtgcaaaattttcaattgtatggtactgatacttgttttgatcaccagcccagtattgcttttggtccatcttagaggttacctggtcagtggccaattgagaaaacttgttacattgtttttgcaaaaggacatggaaaacttgttacattattttgcaaaagcacatgtattgcagaatagcgacattttacgctcctgcacataattatattcctctcctcatctcgtctcctactagggtatcagcacactcagacaggccaagtatctgcatacaatcaactgttactattgtatcatcaagcacattccaatgaccttcaaaatggaaagctcactatatgcaagacatgatggagatcatactggctaacataagcacgcaggatgctgggatccaagtctgtgcgcatgaggagacatgtaccttgacggccggatgaccccgcttacttcgtttatgattctcataggtcttttcctggtaacacacatatggacagacgtcgctaattcctgaaagcaaaataaactcatcatcagaaatctctctctctctctctctctttttccccgaatatgacctaccaactttgcattgtaaaacaaacacatgcatgccatacacttgtattttagctctcgctaaagcacgcagcagcgtaaccgtaacgaggcgcggtatcctttcgattctggactgaactccatgtgttcaattcgaactggcctaaggttgtctgcagatttacaaacccgcttacagtcgtgattttgtaatttttatttatgtttttcttacagcatagaacctgctgatgcatcaatgtcccactatctatttgggcacaagatgagcctcattaatcatgaggaatctagcagacgtgttgggttctcttggttcactcccagcgcgcagggggacgccaagaagcactactgatgatgcggcaggctgggggatcggacaggcccacattaaaggcggtctcgtcaacgtcatggtctgcgctgcttcctaccacgagtaaatgaggaactcgaagcttggcaagactgaggagagagagaagaaaagcaggctatactgctatagccagtttagtcacaagttgatcataaattaataatagaaagctaactacaaagatccgccagcaatccactatacattactctaattgcttctttcaacgtcctaaatctcaggaaatactataagatccatgcatagtgccataactctgaatgatgcaagtgttgttttaatatggtccaacgtacgtcgtactagtatttgttgtttcaaacttgcagaatttgatcttttttttatcgacagtagtagatggaaccaaccatgctctgctaactacttcctctgtttatttggaaagaac

SEQ ID NO: 213859 - DNA, 1460 bp, Zea Mays
gaccacagccataaaaagtgctcccatgtacttgttggcatcaagtacagaatcgtgactcatttttgttctcaggaaaagtgtggagatcaccaaagccataacagttatctgaatggtcttgaatatatggactggagagtttcttttcagcagcagtacttcccttgaaaagcatgctttgaaaatattccatctggatattcggcgacttgcattcacttttaccacctttttctttccagtattgtttgaactgcactgtttgtcttctactagaagagggagataggacgtcctgaaggattgtgcaaaattttcaattgtatggtactgatacttgttttgatcaccagcccagtattgcttttggtccatcttagaggttacctggtcagtggccaattgagaaaacttgttacattgtttttgcaaaaggacatggaaaacttgttacattattttgcaaaagcacatgtattgcagaatagcgacattttacgctcctgcacataattatattcctctcctcatctcgtctcctactagggtatcagcacactcagacaggccaagtatctgcatacaatcaactgttactattgtatcatcaagcacattccaatgaccttcaaaatggaaagctcactatatgcaagagtatgtcttaccgaattcgttattggttccgaacatcttagaagagaagttgattgtctccctcactgtcatctcagcatgatggagatcatactggctaacataagcacgcaggatgctgggatccaagtctgtgcgcatgaggagacatgtaccttgacggccggatgaccccgcttacttcgtttatgattctcatagcatagaacctgctgatgcatcaatgtcccactatctatttgggcacaagatgagcctcattaatcatgaggaatctagcagacgtgttgggttctcttggttcactcccagcgcgcagggggacgccaagaagcactactgatgatgcggcaggctgggggatcggacaggcccacattaaaggcggtctcgtcaacgtcatggtctgcgctgcttcctaccacgagtaaatgaggaactcgaagcttggcaagactgaggagagagagaagaaaagcaggctatactgctatagccagtttagtcacaagttgatcataaattaataatagaaagctaactacaaagatccgccagcaatccactatacattactctaattgcttctttcaacgtcctaaatctcaggaaatactataagatccatgcatagtgccataactctgaatgatgcaagtgttgttttaatatggtccaacgtacgtcgtactagtatttgttgtttcaaacttgcagaatttgatcttttttttatcgacagtagtagatggaaccaaccatgctctgctaactacttcctctgtttatttggaaagaac

SEQ ID NO: 213860 - DNA, 1694 bp, Zea Mays
gaccacagccataaaaagtgctcccatgtacttgttggcatcaagtacagaatcgtgactcatttttgttctcaggaaaagtgtggagatcaccaaagccataacagttatctgaatggtcttgaatatatggactggagagtttcttttcagcagcagtacttcccttgaaaagcatgctttgaaaatattccatctggatattcggcgacttgcattcacttttaccacctttttctttccagtattgtttgaactgcactgtttgtcttctactagaagagggagataggacgtcctgaaggattgtgcaaaattttcaattgtatggtactgatacttgttttgatcaccagcccagtattgcttttggtccatcttagaggttacctggtcagtggccaattgagaaaacttgttacattgtttttgcaaaaggacatggaaaacttgttacattattttgcaaaagcacatgtattgcagaatagcgacattttacgctcctgcacataattcacattccaatgaccttcaaaatggaaagctcactatatgcaagagtatgtcttaccgaattcgttattggttccgaacatcttagaagagaagttgattgtctccctcactgtcatctcagcatgatggagatcatactggctaacataagcacgcaggatgctgggatccaagtctgtgcgcatgaggagacatgtaccttgacggccggatgaccccgcttacttcgtttatgattctcataggtcttttcctggtaacacacatatggacagacgtcgctaattcctgaaagcaaaataaactcatcatcagaaatctctctctctctctctctctttttccccgaatatgacctaccaactttgcattgtaaaacaaacacatgcatgccatacacttgtattttagctctcgctaaagcacgcagcagcgtaaccgtaacgaggcgcggtatcctttcgattctggactgaactccatgtgttcaattcgaactggcctaaggttgtctgcagatttacaaacccgcttacagtcgtgattttgtaatttttatttatgtttttcttacagcatagaacctgctgatgcatcaatgtcccactatctatttgggcacaagatgagcctcattaatcatgaggaatctagcagacgtgttgggttctcttggttcactcccagcgcgcagggggacgccaagaagcactactgatgatgcggcaggctgggggatcggacaggcccacattaaaggcggtctcgtcaacgtcatggtctgcgctgcttcctaccacgagtaaatgaggaactcgaagcttggcaagactgaggagagagagaagaaaagcaggctatactgctatagccagtttagtcacaagttgatcataaattaataatagaaagctaactacaaagatccgccagcaatccactatacattactctaattgcttctttcaacgtcctaaatctcaggaaatactataagatccatgcatagtgccataactctgaatgatgcaagtgttgttttaatatggtccaacgtacgtcgtactagtatttgttgtttcaaacttgcagaatttgatcttttttttatcgacagtagtagatggaaccaaccatgctctgctaactacttcctctgtttatttggaaagaac

SEQ ID NO: 213861 - DNA, 932 bp, Zea Mays
ccaggcccgcggttggcaacggcccagagtcttgccggctttgctcccccgccgcggcgccgcgagcgcgtatgtataacgcgacccccctccccagtccccccagcggcaaggcggcaaccgttctcccgcgtcccgcactcccgccccttttccttttgctccttccttcctcgggaagcctagggcttaggctttaagcgccgcgatgtacggcggcggcggcggcggcgggcactacgacggaggcagcggtggcgccgggaacgctaacgcgctcttcggcggcgggggcttcatgccctcacagtccacggtggtcccggagaacagcggcctctctaagggtcggagcgcgcagacgctgctcccgctcaccgtgaaacagaccatggacgcggcgcaaaccagcggtgacaggtctaatttcgccatcaacggcgttgaggtgtctacgattaggcttgttggacgcatgctaggtaaggttgagcgtgtcacagatgttgtattcactcttgatgatggtactggcaagatagatgtgaatcgctgggaaaatgaggcttccgatgctaaggagatggctgatgctaataacgagaactatgtcatagtcattggcggtttgaaaggttttcaaggaaagcgccatgtagttgcctatgctgtgcggcgtgtgacaaacttcaatgaaataacctgtcactttctgcactgcattcaggtgcatatggagctcacagggttaaaggttgatggaaactacatatccaacttggtcttgagtgtttttcatgacccatctgtcatggaccaggagcatggactgcacatcaaagatgtcatagatcgtctcaaactaccagatgatgtagtcagaaccagactggcagcttgttttcctgcacatcgtttcttcaagttcttgg

SEQ ID NO: 213862 - DNA, 751 bp, Zea Mays
ggttattactgcggtgggcaacggaaacagaactttattttagactgatagatggataaatggcgactgcatcaatgattttgcccctgatgtcgtttccaaggttgataaacttattgtctccactagaacagtggcccaggctcttggaggacagcaatggatcagtgacatcttgacacttctttcctggacggggatccgacaatttttgctgatttgggatgatgtaagcaatattgtgttaacacaggaggcggatattcacacctggctgcatacttcctctgagtaaggacaattggatcaatttaagtaggtctgggcacacaaatttgaactattaacgcattgggagtgcttgtgtgttagaggtctaggaggagctatgaggtactacttccgtcaggtccagcgtttggttggagatatggaaggaggagctctcttgtttatagatgacctcaactccaagtgacaaagtgaacagctgttgaacttcccgtctatttctgtttctttttgctggatttggagatggaggtgaattcctctggtgaggaaacggtgataaaggtaaggaagccatacacaataaccaagcagcgggagcggtggacagaggctgagcacaaacggttccttgaagccttgaaactttatggcagagcatggcagcgcatagaagagcatgttgggacaaagacggccgtgcagatcagaagtcacgctcaaaagttcttcaccaagg

SEQ ID NO: 213863 - DNA, 988 bp, Zea Mays
cgggaatgcgggagggcgtgctcgatagatttcaggggccggagctcgagtaaaccacgagaaaagatagtggctgagatttctcgcggcgctcgccgcgagagcgacccccacaggtcgccgcccctccgcggcccgcgcagcgcacagcatacagtcagcacacgcagcagctgccaccacagcgaacagcaaagcacctccgactcggagtcgcggcgagagccgagaaccttctcattcatcttcctcttctatccatcctgcctgcctgcttgcctccgtattccagctagatctccgggcagccgattgaccgagaagtttgtggttgtggcggcggcggagagggaaacggggagcgggagggcggcgcggatgccactgctgcgccggcgccggcggggccggtgatgcccgccgtggcggtcgcttgaggccgccgtgcgtgggaggtggacgggggagcgaggcggtgcggaccgaggttgcgttgggttggattcgattgggctgcgtctgctgagagtaaggacaattggatcaatttaagtaggtctgggcacacaaatttgaactattaacgcattgggagtgcttgtgtgttagaggtctaggaggagctatgaggtactacttccgtcaggtccagcgtttggttggagatatggaaggaggagctctcttgtttatagatgacctcaactccaagtgacaaagtgaacagctgttgaacttcccgtctatttctgtttctttttgctggatttggagatggaggtgaattcctctggtgaggaaacggtgataaaggtaaggaagccatacacaataaccaagcagcgggagcggtggacagaggctgagcacaaacggttccttgaagccttgaaactttatggcagagcatggcagcgcatagaagagcatgttgggacaaagacggccgtgcagatcagaagtcacgctcaaaagttcttcaccaagg

SEQ ID NO: 213864 - DNA, 2027 bp, Zea Mays
cgcgacgccagcacgagccacccaagtcagagacagaaatcaccaagtgtctctctacttctctaccttgcctagccaaaatctactgccgaccaccaccgcggcaggcacacggagcaccctccactccaccgaccaataccagcggcagtaaattccgaggccgagcagccgctgccgagcctcgaggctcccttctcgcttccttcacccgcctactcctcctagggtttcctcccgcctcgctggcgtgccgcctcccctcgccattgccgcggggcgttccgccgctcgtgggacccgcatcgagactcgagagctgttcgtgctgattcccgcggagccttgtggctgcgactctgcggcgtcgggtggagaggttttgacgcccgtgggggtttggatcgagggcccggagctgtgtctccgcaatgccgggctggtctggcggcgattgctagggttttctggtcggatttcggtggaagagctgaggttttgcttcgagtgcgggagctgcctgcaaccccccccccccccccccccccccccctggcccgagctcggtgtttccgcagcaatgcctagccgattttagctcgctctggggttccgaagggcgaaggggctgtcgggcggttcgagattgcaaggagtcggtggctcggcccaatgtccggggcaagcgcgagggggcggctgtcgccagcgtccggcggcgccggggactccgaaccgcggtccgcggggggcaggacgcgctcggtgtccgctacccgcggccggaagccctcgccgaggcccgggagggatgccgccgcggcggcaggggcgacagaggagaggaaacccgccgccgtgcccacattgctgccctcgctcagcgcgcccgcggggatgcgtcggcaggagctgctgctgcgctcgggtctgtctctcgacgcgtcctgctcctcggacgcgtccacggactcgttctgcagccgagcatccacaggccggattgggaggccggcgtttggggctaggaagaagaagaccctctctcagactgattacaagcctgtttccatgctggaaagggagggtggattggcttatcagaccgatgctgctggtgtcaagaggaggtgcgcatgggtgacagcaaatactgatccttgttattctgcatttcacgatgaagagtggggagttcctgttcacgatgacaggaagttatttgagctgctagtactgtcaggggcattagctgaactgacatggccagcaattctgaataagagagacatattcagggaagttttcatggattttgacccagtatcagtctcaaaattaagtgagaagaagattatcgcacctggaagccctagcagttccttgttatccgaacagaaactgcgcggtgttattgaaaacgcacgccaaatactcaaggtactcccgtcaagtgcctgtcaaaacatcgaaagcagacgccataagcaaagacctggtccgaaggggtttccgcagcgtcggcccaacggtcgtttataccttcatgcaagtctctggcatgactaacgaccaccttatctcctgctaccgttttgctgaatgcgtggcctcctctgctggtgccgctaaacttaccgatggaagcctagcagatgcaagtgatagcaaccacgccacggcggagcagaaggtgaacgggacgaatgacattgaactgtccagggctatagacgagctcagcatttcatagcggttaggagggggtgctgaagcgagacggtgttagcttgtgtattttgtgtgctgtagtggagggtgtgatttggtgtcttttttctatagtttttaccactcgtcgatgtagggtagaacaatctttagtctttggcttgccaggaccattgagcgacagcagtgtaatgatgtatattctttgtgatgcgagtgcacctgttttcctgcatttcagttgagctggcttttcgccagtgtcgtcaatgctgtccctcttttccgcatctgag

SEQ ID NO: 213865 - DNA, 795 bp, Zea Mays
cttgttttctttgacactgcggatcaggttgatcctcaggatattgtcatgcttgtcatatcatggcacatgaaagccgccacaatgtgtgaatttactcgtcaggaattcattggtggactgcaatcaattggggtagattcaatcgagaagtttcgtggaaaattaccatcattacgagctgagctaaaagatgacaataaattccgtgatatatacaactttgcattcacttgggcaagggaaaagggtcaaaagtctctctcactggagactgctattggaatgtggcagttgctatttgctgaaaggaactggcctcttctggatcattggtgtcagtttttacaggtcagacacaataaagccatatctagagacacatggtcccagctgctggaatttgtgaagacgaccgatccacagttatccaactacgacgacgaaggtgcctggccctacctcatagacgaatttgtggaatatctgactgagaacggactcgtccagcgtaaaagatgaacaacggggagatgcatctccaaacaatggttgggctgtacaaacatgatttatctcggtcagctcgacgcccagggcctgatattggcactcctgctcaattcattcaccaaactgttggcatatcattgaatttgcttataaacgtggggaaacataacttgcctgggaagtggtggctgtcagcctgcgatcgtgaactgtaacttatcgaaaatgcaacggagtttgggactctactatatgatttgtttcagtttttcttagggcttg

SEQ ID NO: 213866 - DNA, 2102 bp, Zea Mays
tccacctcgccatctccccccagcggcagagcggcgcctcggttctgcctccgctcgcgctcgccgccggcattccggcagttcctgctcccggccggcctcccagagtgtatcgatcgccgcgatggacgacccgggcgcttccgccgaccccgccgcgcgccaccacctgtcgccgcagcagctcgggggccagccgccggtgccgcgctccccgaccccgctcgacctggcctccgccgccgcggcgtccgggtatcgccgcctctcgccgtcgctgcggccgccagcgcacccgcaggcgcgcctctcgtcgccctacggccagatcccctcgcccggcgccggcgcgcaccacgcgcgctcgctctcccagccgctcttcttctcgctcgactcgctcccgccgccgccctacgccgatctgggcgccgcgcccgccgtgcctccctccccgccgccgtcgacctccgacccgccgcctctcggcctgccgcccaggagggccggccaccgccgctcgcagagcgacatcccgttcggcttcgcgcagctcagcccgccgctgcccccgccggcgccggtcaagcgcgaggtcaccgctgcggccgacggctgcagatcggacggcggcggcggtgatgacgccgccctctacgacctcgtcaacgcgtacatggacctggacgggctggacccgctcaactcgtctgaggaccgccacgacgaccgcgacagtcgtgccagcggcacgcgcgcggggagcgcggccgagagcagcgagaacgaggcggagagccagtccacgtccgcggacaggaaggacgggggcaagtcccgccattgtcgcagcctgtccatagacagcttcatgggcaagctcagcttcgccgcaggggaggagtctccgaagctgccgctgccgtctcctggtggcagcctcaccaggagcgggagtggctcactggaaggtggtgctgtcgcgctgttcaatatggagtttaccaacggagagtttaccgactccgagaagaagaaaattatggcgaatgagcgacttgctgagatagctctgacggatcctaagagggtcaagaggattctggcgaatcggcagtcagcagccaggtcaaaggagcgcaagatgaggtacattcaggagcttgagcataaggtgcaagtgctgcagacagaggctacgacactctcagcacagttgacaatgctgcagagggactcagctggattggctactcagaacaacgagttgaaaataaggcttcaagcaatggagcaacaagcacagctgagagatgccctgaacgaagcgttaaccgccgaggtccaacgtctgaaactcgcgactggggaggtaaccgatggccggatgccgaagggcctacagcagcagatgaactcccagatgctccagatccagcagctgcaggttcagcagcagcctcagaaatcggcatagatcaggtcaggtcgagagaaggacgctgaagctaattgagcttgagcatgaccaattgaaggatgctgggtggggagaaaaaacccgagtcttttgcgtatatcagacatgttgtaggatagctgcaatagtagggcgacaggcgccgtggtgccgctgtttcagttggtttcgccgagtcaagtaccttagctggagtatgtcgtcttggtgtcgtagtaccatacatgattgcctgcctattgttgaggcgtcttggtagcgtccctgaacgttctctcggaggtgcttcttctgttcttttgtctaagggggctagggtgtcacaaatgtacctgcgtaatagtgtaattattatctatagcgtaccttcagcgtctgtactgtggaggggttcccaagttctcatgcatgcccgttgatctttcagacagtcagtggctggtggtagttgcgttgcctgctcgctagtcgctgctgactgctgtgggttggtcactggaaccttgaggcctgggctgggggccagcagcacatgatgcctggctgtgctgcactttgtgaagtgttctgctgctgacttgtgatacgctatccgcaaccgttacctctaaatcacttttcc

SEQ ID NO: 213867 - DNA, 864 bp, Zea Mays
attccttccttcaaaagctagcagacgaccaatccctgaacgaagcgttaaccgccgaggtccaacgtctgaaactcgcgactggggaggtaaccgatggccggatgccgaagggcctacagcagcagatgaactcccagatgctccagatccagcagctgcaggttcagcagcaggcgccccaggcacagcagcagggccagcgacagcagcagcagcagcctcagaaatcggcatagatcaggtcaggtcgagagaaggacgctgaagctaattgagcttgagcatgaccaattgaaggatgctgggtggggagaaaaaacccgagtcttttgcgtatatcagacatgttgtaggatagctgcaatagtagggcgacaggcgccgtggtgccgctgtttcagttggtttcgccgagtcaagtaccttagctggagtatgtcgtcttggtgtcgtagtaccatacatgattgcctgcctattgttgaggcgtcttggtagcgtccctgaacgttctctcggaggtgcttcttctgttcttttgtctaagggggctagggtgtcacaaatgtacctgcgtaatagtgtaattattatctatagcgtaccttcagcgtctgtactgtggaggggttcccaagttctcatgcatgcccgttgatctttcagacagtcagtggctggtggtagttgcgttgcctgctcgctagtcgctgctgactgctgtgggttggtcactggaaccttgaggcctgggctgggggccagcagcacatgatgcctggctgtgctgcactttgtgaagtgttctgctgctgacttgtgatacgctatccgcaaccgttacctctaaatcacttttcc

SEQ ID NO: 213868 - DNA, 862 bp, Zea Mays
ttcaaggaacttatttatatatttatttgagccctgaacgaagcgttaaccgccgaggtccaacgtctgaaactcgcgactggggaggtaaccgatggccggatgccgaagggcctacagcagcagatgaactcccagatgctccagatccagcagctgcaggttcagcagcaggcgccccaggcacagcagcagggccagcgacagcagcagcagcagcctcagaaatcggcatagatcaggtcaggtcgagagaaggacgctgaagctaattgagcttgagcatgaccaattgaaggatgctgggtggggagaaaaaacccgagtcttttgcgtatatcagacatgttgtaggatagctgcaatagtagggcgacaggcgccgtggtgccgctgtttcagttggtttcgccgagtcaagtaccttagctggagtatgtcgtcttggtgtcgtagtaccatacatgattgcctgcctattgttgaggcgtcttggtagcgtccctgaacgttctctcggaggtgcttcttctgttcttttgtctaagggggctagggtgtcacaaatgtacctgcgtaatagtgtaattattatctatagcgtaccttcagcgtctgtactgtggaggggttcccaagttctcatgcatgcccgttgatctttcagacagtcagtggctggtggtagttgcgttgcctgctcgctagtcgctgctgactgctgtgggttggtcactggaaccttgaggcctgggctgggggccagcagcacatgatgcctggctgtgctgcactttgtgaagtgttctgctgctgacttgtgatacgctatccgcaaccgttacctctaaatcacttttcc

SEQ ID NO: 213869 - DNA, 878 bp, Zea Mays
ccactgtctacttgtcaatggtcatgttgtgaattatgatcttttagccctgaacgaagcgttaaccgccgaggtccaacgtctgaaactcgcgactggggaggtaaccgatggccggatgccgaagggcctacagcagcagatgaactcccagatgctccagatccagcagctgcaggttcagcagcaggcgccccaggcacagcagcagggccagcgacagcagcagcagcagcctcagaaatcggcatagatcaggtcaggtcgagagaaggacgctgaagctaattgagcttgagcatgaccaattgaaggatgctgggtggggagaaaaaacccgagtcttttgcgtatatcagacatgttgtaggatagctgcaatagtagggcgacaggcgccgtggtgccgctgtttcagttggtttcgccgagtcaagtaccttagctggagtatgtcgtcttggtgtcgtagtaccatacatgattgcctgcctattgttgaggcgtcttggtagcgtccctgaacgttctctcggaggtgcttcttctgttcttttgtctaagggggctagggtgtcacaaatgtacctgcgtaatagtgtaattattatctatagcgtaccttcagcgtctgtactgtggaggggttcccaagttctcatgcatgcccgttgatctttcagacagtcagtggctggtggtagttgcgttgcctgctcgctagtcgctgctgactgctgtgggttggtcactggaaccttgaggcctgggctgggggccagcagcacatgatgcctggctgtgctgcactttgtgaagtgttctgctgctgacttgtgatacgctatccgcaaccgttacctctaaatcacttttcc

SEQ ID NO: 213870 - DNA, 3325 bp, Zea Mays
tccgcagcccagctaatcccaaacaccgtcgagcggacctcggaagggaacggccggagtcgccggcacccgcgcttcgcagcccgtcggtcatgccgccgccgcagccactgcgtgccttatcttccttccctttacctcgccgccatcctacccatacccccgccactataaccggttgcgcctctacttccgaccgcctaccattcgcaatgccctccggcccggatgtaaggttcgtagtcggaaaccgtcggaaacccttggaccatttgccaccggcccaatgatatcgacctgccccggccgcggcaagatatcatccattgggagttcgaaactccatgtgacggtaaccagccaacctgtcggcatctccctcttgtcaattcaccgtgtcccgccgccgtgcgagtccggagttcctatctacttgatttctctgcatttccttctagtaggaagtaccattctagattggcgcgtcactagcacgatgacccatatgtcagtgttgttcttgcgaggctctggtcatccaatcttccaacagctcatgccgatatcctaagtctccagagttagacatttcatgtatatatcccttcgtcctcagtttgcgcctgaattctcagcttcaccaaacaactgatgacccctgtagtctaattttttttgtccactaagctggattagtcctccaatctcattcaaatttctcaactgacaagaaccgcaaatcggagtactcgacccattccctaccccttcgagttcaaatatctgaggggtcatgggtcttagcgtgctatttccttgctgtctcctccacagcattataccaacttaccaacaaggtctaatcgccatggcttacctttatctgcctgttttgatcttccagttcatggtttgtttttgccaatccgttgacaggctaacacctgcaaagccgctcttgcatggtgatgttctcatatcaaatggtggtgtctttgctcttggcttcttctccctgaaaaactcaacttcgagctcatatgttggcatatggtacaacaacatccctgagcgcacatatgtgtggattgccaaccgtgacaacccaattaccaccaatgcgcccgggaagctagtttttaccaacagttctgaccttgtcttgttagactccacaggccacactatctggatgacaaaaaacaacatcactgcaggagaaggtggaactgctgccatcctgctcgactcggggaactttgttgtccaatcacaaaatggcactgacatatgggagagcttccattatccgactgacaccatggtccctgatgtaagtttttcattgagctcgtctgatgttgctaagcgccttgttgcctggaaggggcctgatgatccatccagcagcaacttctccatgggtggcgactcaagctcagatctccagattgttacttggaatgggacacggccatattggcggagagccgcatggggtggtgaagtgacattcggcacatttgagggcaacaccagcttcatggtgtacgaaacaatagttgacacaggggatggatactacatgaaactcactgtctctgaagggtcaccaagtatacgcttaactctggattacacgggcatgttaactttccgaagatggaacgtcaacacatcctcatgggcagttttcggacaattcccaagatgtcggagaaaggaggagctgaaatgtggtggcggagataaattcttaaccttgccatctatgaagactcctgacaagttcttgtacatcaagaacagaagttttgaccaatgcactgcagagtgcagtaacaactgctcatgcacagcgtatgcttatgctaacctgcaaaatgttgacacaacgcatgacacgacaaggtgcttggtctggatgggggagcttatcgatgcagagaaacttagtaacacatttggtgagaacctatatttccgggtccccacctcaccagtaagcaagaagaagagcactgtactaaagattgtacccgtggctacgggtacttttcttcttttaatcacatgcatatggcttgtatgcaagtcaagagggaaacaccaaagaaggaattctcagaacaatttactatgcctgaatccttccagcgaacttgggactgaaaaatctagatcttccatcagttagctttgaagacatcatcactgcaacaaataatttctctgagcacaagttgctcggggaaggtggttttggaaaagtttacaagggagtgctggaaggtggcaaggaagttgctatcaaaaggcttagcaagggttctgttcaagggatccaggagtttataaacgaagttattctgattgccaaactgcagcacagaaacttagtcagacttcttggtttctgcattcatgaagatgagaagttacttatctatgagtacttacctaacagaagcttagatgctttcctttttgatggtacaagaaaatctttgcttgattggccagtccggttcaaaataattaaaggggttgcaagaggaattctctatcttcaccaagattctagactaacaataattcatagagatctcaaagcaagcaacatcttgttggacacagatatgtgtcccaagatatcagattttggtacagccaggatttttagtggaagcgaacaacaagtaaatacaacacgagttgctggaacatacggttacatgtctcctgagtatgccatggaaggctcattctctgttaagtctgacacctatgcttttggtgttctgctacttgagattgtaagcggcttaaagatcagctcatccctaatgaactttccaagcctcatcgcttatgcatggagcttgtggaaagatggaaatgcattggaattggtcgactcatcaatttctgtgagttattcacttcaggaacttgtacggtgtgttcagttagggcttttgtgcgtccaagaccctccaaatgcaaggccactcatgtcatccatcgtgttcatgctagagaatgagacagctccacttcctacaccagaagaacctctatattttacagttaggaattacggaactgatcgatcaaatgaatacatgcagaggtctctgaataacatgagtatcacaactctagaggcgcgttagacatttcgcttcatcgttccttaaatttgtagacatttttaatctgtgttattgtacatttacactagccgttcatatttgtacacaaaagtgttccattaaatacgttgtattttccaacagcaatttgtgttataaaaatattcccc

SEQ ID NO: 213871 - DNA, 3498 bp, Zea Mays
tccgcagcccagctaatcccaaacaccgtcgagcggacctcggaagggaacggccggagtcgccggcacccgcgcttcgcagcccgtcggtcatgccgccgccgcagccactgcgtgccttatcttccttccctttacctcgccgccatcctacccatacccccgccactataaccggttgcgcctctacttccgaccgcctaccattcgcaatgccctccggcccggatgtaaggttcgtagtcggaaaccgtcggaaacccttggaccatttgccaccggcccaatgatatcgacctgccccggccgcggcaagatatcatccattgggagttcgaaactccatgtgacggtaaccagccaacctgtcggcatctccctcttgtcaattcaccgtgtcccgccgccgtgcgagtccggagttcctatctacttgatttctctgcatttccttctagtaggaagtaccattctagattggcgcgtcactagcacgatgacccatatgtcagtgttgttcttggtatgcaattctcctcagtagaccagttgcaatgctgaataatccacgattgtactaggctactagctgacaccttcgacatatgaggatgtttggtttctagggactattgtttagttctatcattttattctattttagtctataaattgtcaaatatagaaactaaaaagagttttagtttctatattcggtaattttgaaactaaaatggaataaaatgtagggactaaaaattagtcactagaaaccaaacaccccatgtatatatatttccagcgaggctctggtcatccaatcttccaacagctcatgccgatatcctaagtctccagagttagacatttcatgtatatatcccttcgtcctcagtttgcgcctgaattctcagcttcaccaaacaactgatgacccctgtagtctaattttttttgtccactaagctggattagtcctccaatctcattcaaatttctcaactgacaagaaccgcaaatcggagtactcgacccattccctaccccttcgagttcaaatatctgaggggtcatgggtcttagcgtgctatttccttgctgtctcctccacagcattataccaacttaccaacaaggtctaatcgccatggcttacctttatctgcctgttttgatcttccagttcatggtttgtttttgccaatccgttgacaggctaacacctgcaaagccgctcttgcatggtgatgttctcatatcaaatggtggtgtctttgctcttggcttcttctccctgaaaaactcaacttcgagctcatatgttggcatatggtacaacaacatccctgagcgcacatatgtgtggattgccaaccgtgacaacccaattaccaccaatgcgcccgggaagctagtttttaccaacagttctgaccttgtcttgttagactccacaggccacactatctggatgacaaaaaacaacatcactgcaggagaaggtggaactgctgccatcctgctcgactcggggaactttgttgtccaatcacaaaatggcactgacatatgggagagcttccattatccgactgacaccatggtccctgatgtaagtttttcattgagctcgtctgatgttgctaagcgccttgttgcctggaaggggcctgatgatccatccagcagcaacttctccatgggtggcgactcaagctcagatctccagattgttacttggaatgggacacggccatattggcggagagccgcatggggtggtgaagtgacattcggcacatttgagggcaacaccagcttcatggtgtacgaaacaatagttgacacaggggatggatactacatgaaactcactgtctctgaagggtcaccaagtatacgcttaactctggattacacgggcatgttaactttccgaagatggaacgtcaacacatcctcatgggcagttttcggacaattcccaagatgtcggagaaaggaggagctgaaatgtggtggcggagataaattcttaaccttgccatctatgaagactcctgacaagttcttgtacatcaagaacagaagttttgaccaatgcactgcagagtgcagtaacaactgctcatgcacagcgtatgcttatgctaacctgcaaaatgttgacacaacgcatgacacgacaaggtgcttggtctggatgggggagcttatcgatgcagagaaacttagtaacacatttggtgagaacctatatttccgggtccccacctcaccagtaagcaagaagaagagcactgtactaaagattgtacccgtggctacggcgaacttgggactgaaaaatctagatcttccatcagttagctttgaagacatcatcactgcaacaaataatttctctgagcacaagttgctcggggaaggtggttttggaaaagtttacaagggagtgctggaaggtggcaaggaagttgctatcaaaaggcttagcaagggttctgttcaagggatccaggagtttataaacgaagttattctgattgccaaactgcagcacagaaacttagtcagacttcttggtttctgcattcatgaagatgagaagttacttatctatgagtacttacctaacagaagcttagatgctttcctttttgatggtacaagaaaatctttgcttgattggccagtccggttcaaaataattaaaggggttgcaagaggaattctctatcttcaccaagattctagactaacaataattcatagagatctcaaagcaagcaacatcttgttggacacagatatgtgtcccaagatatcagattttggtacagccaggatttttagtggaagcgaacaacaagtaaatacaacacgagttgctggaacatacggttacatgtctcctgagtatgccatggaaggctcattctctgttaagtctgacacctatgcttttggtgttctgctacttgagattgtaagcggcttaaagatcagctcatccctaatgaactttccaagcctcatcgcttatgcatggagcttgtggaaagatggaaatgcattggaattggtcgactcatcaatttctgtgagttattcacttcaggaacttgtacggtgtgttcagttagggcttttgtgcgtccaagaccctccaaatgcaaggccactcatgtcatccatcgtgttcatgctagagaatgagacagctccacttcctacaccagaagaacctctatattttacagttaggaattacggaactgatcgatcaaatgaatacatgcagaggtctctgaataacatgagtatcacaactctagaggcgcgttagacatttcgcttcatcgttccttaaatttgtagacatttttaatctgtgttattgtacatttacactagccgttcatatttgtacacaaaagtgttccattaaatacgttgtattttccaacagcaatttgtgttataaaaatattcccc

SEQ ID NO: 213872 - DNA, 2754 bp, Zea Mays
tccgcagcccagctaatcccaaacaccgtcgagcggacctcggaagggaacggccggagtcgccggcacccgcgcttcgcagcccgtcggtcatgccgccgccgcagccactgcgtgccttatcttccttccctttacctcgccgccatcctacccatacccccgccactataaccggttgcgcctctacttccgaccgcctaccattcgcaatgccctccggcccggatgtaaggttcgtagtcggaaaccgtcggaaacccttggaccatttgccaccggcccaatgatatcgacctgccccggccgcggcaagatatcatccattgggagttcgaaactccatgtgacggctaacacctgcaaagccgctcttgcatggtgatgttctcatatcaaatggtggtgtctttgctcttggcttcttctccctgaaaaactcaacttcgagctcatatgttggcatatggtacaacaacatccctgagcgcacatatgtgtggattgccaaccgtgacaacccaattaccaccaatgcgcccgggaagctagtttttaccaacagttctgaccttgtcttgttagactccacaggccacactatctggatgacaaaaaacaacatcactgcaggagaaggtggaactgctgccatcctgctcgactcggggaactttgttgtccaatcacaaaatggcactgacatatgggagagcttccattatccgactgacaccatggtccctgatgtaagtttttcattgagctcgtctgatgttgctaagcgccttgttgcctggaaggggcctgatgatccatccagcagcaacttctccatgggtggcgactcaagctcagatctccagattgttacttggaatgggacacggccatattggcggagagccgcatggggtggtgaagtgacattcggcacatttgagggcaacaccagcttcatggtgtacgaaacaatagttgacacaggggatggatactacatgaaactcactgtctctgaagggtcaccaagtatacgcttaactctggattacacgggcatgttaactttccgaagatggaacgtcaacacatcctcatgggcagttttcggacaattcccaagtacagcgtgtgcacattatgccttttgtggcccgtttgcctactgtgatggcactgagtctgttcctacttgcaagtgccttgatgggtttgaggcgatggtcttgatttttcccaaggatgtcggagaaaggaggagctgaaatgtggtggcggagataaattcttaaccttgccatctatgaagactcctgacaagttcttgtacatcaagaacagaagttttgaccaatgcactgcagagtgcagtaacaactgctcatgcacagcgtatgcttatgctaacctgcaaaatgttgacacaacgcatgacacgacaaggtgcttggtctggatgggggagcttatcgatgcagagaaacttagtaacacatttggtgagaacctatatttccgggtccccacctcaccagtaagcaagaagaagagcactgtactaaagattgtacccgtggctacggcgaacttgggactgaaaaatctagatcttccatcagttagctttgaagacatcatcactgcaacaaataatttctctgagcacaagttgctcggggaaggtggttttggaaaagtttacaagggagtgctggaaggtggcaaggaagttgctatcaaaaggcttagcaagggttctgttcaagggatccaggagtttataaacgaagttattctgattgccaaactgcagcacagaaacttagtcagacttcttggtttctgcattcatgaagatgagaagttacttatctatgagtacttacctaacagaagcttagatgctttcctttttgatggtacaagaaaatctttgcttgattggccagtccggttcaaaataattaaaggggttgcaagaggaattctctatcttcaccaagattctagactaacaataattcatagagatctcaaagcaagcaacatcttgttggacacagatatgtgtcccaagatatcagattttggtacagccaggatttttagtggaagcgaacaacaagtaaatacaacacgagttgctggaacatacggttacatgtctcctgagtatgccatggaaggctcattctctgttaagtctgacacctatgcttttggtgttctgctacttgagattgtaagcggcttaaagatcagctcatccctaatgaactttccaagcctcatcgcttatgcatggagcttgtggaaagatggaaatgcattggaattggtcgactcatcaatttctgtgagttattcacttcaggaacttgtacggtgtgttcagttagggcttttgtgcgtccaagaccctccaaatgcaaggccactcatgtcatccatcgtgttcatgctagagaatgagacagctccacttcctacaccagaagaacctctatattttacagttaggaattacggaactgatcgatcaaatgaatacatgcagaggtctctgaataacatgagtatcacaactctagaggcgcgttagacatttcgcttcatcgttccttaaatttgtagacatttttaatctgtgttattgtacatttacactagccgttcatatttgtacacaaaagtgttccattaaatacgttgtattttccaacagcaatttgtgttataaaaatattcccc

SEQ ID NO: 213873 - DNA, 3457 bp, Zea Mays
tccgcagcccagctaatcccaaacaccgtcgagcggacctcggaagggaacggccggagtcgccggcacccgcgcttcgcagcccgtcggtcatgccgccgccgcagccactgcgtgccttatcttccttccctttacctcgccgccatcctacccatacccccgccactataaccggttgcgcctctacttccgaccgcctaccattcgcaatgccctccggcccggatgtaaggttcgtagtcggaaaccgtcggaaacccttggaccatttgccaccggcccaatgatatcgacctgccccggccgcggcaagatatcatccattgggagttcgaaactccatgtgacggtaaccagccaacctgtcggcatctccctcttgtcaattcaccgtgtcccgccgccgtgcgagtccggagttcctatctacttgatttctctgcatttccttctagtaggaagtaccattctagattggcgcgtcactagcacgatgacccatatgtcagtgttgttcttggtatgcaattctcctcagtagaccagttgcaatgctgaataatccacgattgtactaggctactagctgacaccttcgacatatgaggatgtttggtttctagggactattgtttagttctatcattttattctattttagtctataaattgtcaaatatagaaactaaaaagagttttagtttctatattcggtaattttgaaactaaaatggaataaaatgtagggactaaaaattagtcactagaaaccaaacaccccatgtatatatatttccagcgaggctctggtcatccaatcttccaacagctcatgccgatatcctaagtctccagagttagacatttcatgtatatatcccttcgtcctcagtttgcgcctgaattctcagcttcaccaaacaactgatgacccctgtagtctaattttttttgtccactaagctggattagtcctccaatctcattcaaatttctcaactgacaagaaccgcaaatcggagtactcgacccattccctaccccttcgagttcaaatatctgaggggtcatgggtcttagcgtgctatttccttgctgtctcctccacagcattataccaacttaccaacaaggtctaatcgccatggcttacctttatctgcctgttttgatcttccagttcatggtttgtttttgccaatccgttgacaggctaacacctgcaaagccgctcttgcatggtgatgttctcatatcaaatggtggtgtctttgctcttggcttcttctccctgaaaaactcaacttcgagctcatatgttggcatatggtacaacaacatccctgagcgcacatatgtgtggattgccaaccgtgacaacccaattaccaccaatgcgcccgggaagctagtttttaccaacagttctgaccttgtcttgttagactccacaggccacactatctggatgacaaaaaacaacatcactgcaggagaaggtggaactgctgccatcctgctcgactcggggaactttgttgtccaatcacaaaatggcactgacatatgggagagcttccattatccgactgacaccatggtccctgatgtaagtttttcattgagctcgtctgatgttgctaagcgccttgttgcctggaaggggcctgatgatccatccagcagcaacttctccatgggtggcgactcaagctcagatctccagattgttacttggaatgggacacggccatattggcggagagccgcatggggtggtgaagtgacattcggcacatttgagggcaacaccagcttcatggtgtacgaaacaatagttgacacaggggatggatactacatgaaactcactgtctctgaagggtcaccaagtatacgcttaactctggattacacgggcatgttaactttccgaagatggaacgtcaacacatcctcatgggcagttttcggacaattcccaagatgtcggagaaaggaggagctgaaatgtggtggcggagataaattcttaaccttgccatctatgaagactcctgacaagttcttgtacatcaagaacagaagttttgaccaatgcactgcagagtgcagtaacaactgctcatgcacagcgtatgcttatgctaacctgcaaaatgttgacacaacgcatgacacgacaaggtgcttggtctggatgggggagcttatcgatgcagagaaacttagtaacacatttggtgagaacctatatttccgggtccccacctcaccagtaagcaagaagaagagcactgtactaaagattgtacccgtggctacgggtacttttcttcttttaatcacatgcatatggcttgtatgcaagtcaagagggaaacaccaaagaaggaattctcagaacaatttactatgcctgaatccttccagcgaacttgggactgaaaaatctagatcttccatcagttagctttgaagacatcatcactgcaacaaataatttctctgagcacaagttgctcggggaaggtggttttggaaaagtttacaagggagtgctggaaggtggcaaggaagttgctatcaaaaggcttagcaagggttctgttcaagggatccaggagtttataaacgaagttattctgattgccaaactgcagcacagaaacttagtcagacttcttggtttctgcattcatgaagatgagaagttacttatctatgagtacttacctaacagaagcttagatgctttcctttttgatatgtgtcccaagatatcagattttggtacagccaggatttttagtggaagcgaacaacaagtaaatacaacacgagttgctggaacatacggttacatgtctcctgagtatgccatggaaggctcattctctgttaagtctgacacctatgcttttggtgttctgctacttgagattgtaagcggcttaaagatcagctcatccctaatgaactttccaagcctcatcgcttatgcatggagcttgtggaaagatggaaatgcattggaattggtcgactcatcaatttctgtgagttattcacttcaggaacttgtacggtgtgttcagttagggcttttgtgcgtccaagaccctccaaatgcaaggccactcatgtcatccatcgtgttcatgctagagaatgagacagctccacttcctacaccagaagaacctctatattttacagttaggaattacggaactgatcgatcaaatgaatacatgcagaggtctctgaataacatgagtatcacaactctagaggcgcgttagacatttcgcttcatcgttccttaaatttgtagacatttttaatctgtgttattgtacatttacactagccgttcatatttgtacacaaaagtgttccattaaatacgttgtattttccaacagcaatttgtgttataaaaatattcccc

SEQ ID NO: 213874 - DNA, 2165 bp, Zea Mays
cttcacacagccattttttctctctctctctcatgcatcgtctatctatattattttatctccccccgtctccacctccccctatattctctctctcccctcctctcctctccccagctacgccagtcctcctccctgtctgcttcggtgcttcgctcccgcactgcgcttggccgctttccctctccccgcaccttctccacctcccccattccgccaccgcacgagcagagctccctcaccaagaggaccaaaaaaaaaaaaaacgagggaggcaagccaggcgggacagcaacgcgacgcgcttgtcattcactcgaggagctcatgcaaggcgtaaatcttattgcaagaagggcagctgtgcatgttaagtctcaaatatagactcacttgataacactgcatgagaggttgaaaacttgaggtacagttgatattctggttcagagtatgggttcaaggtttgcatcacatcagctgagcaatggcctgtatgtttctggtcgacctgagcaacctaaggagaaggccccaaccatttgttccactgcgatgccatatactgggggtgacatcaagaagtctggagagcttgggaagatgtttgatctccatgttgagaaatcaagaaaatctggtcctctaggaaacgctccttcaaggaatacttcatttggaggcactgcttccaattctgggcctgtctccaatgctggtggtcggtccaactactctggttccctttcatcttcagttcctggtgctggtggatcagccagagcgaaatcaaactccggaccactcaataagcatggagagccaacaaagaggtcatctggtccccagtctggaggagtaaccccaatggcacgccagaattctggcccccttcctcctgtgcttccgacaactgggcttatcacatctgggcctatctcttcagggccacttaattcgtctggtgctccaaggaaagtatctgggccacttgattctgctgcatcgatgaaaatgcgggctacttcctttgctcacaatcaagctgttactaatctgaacactgaagatggttactcaattcagggaagctttccgaagccaatactctgggctgtgattttgctctttgtgatgggttttatagcaggtggcttcattttgggggctgttcacaatgcaattttgctgatagttgttgtggtcatatttggttttgttgctgcacttcttatctggaatgcttgctggggtagcagaggtggaattgggtttgttagtcgctaccctgatgctgatctcagaacggccaaagatggacaatatgtaaaggttacaggggttgttacttgtggaaatttccccctcgaatcctcgttccaaagggttccaagatgcgtatacacttctactggcttgtatgagtacaggggttgggattccaaagctgccaataccgaacatcggcgttttacatggggtttacgttcaatggagcgacatgcggttgatttctacatttcagattttcagtccgggcttcgagcattggtgaaaacaggatatggtgcacgtgtgaccccatacgttgatgaatctgttataattgacatcgatccagacaacaaggatatgtcccctgaatttttgagatggctaagagagagaaacctttcaagcgatgatcggacaatgcgcctaaaagaagggtagcactgtaagtgtgatgggggttgtccaaaggaacgacaacgttctgatgattgttcctccatcagagcccatctcaactggttgtcagtgggccaagtgcgttctcccgaccaaccttgacgggcttgttttaagatgcgaagatacttcgaacattgatgtggtgccagtttaattagcggtgaagagtcgttgccaaagaaagtgtctgttaaatatgagtctgaattgtttcatgcaatgttagttgacaaaaatgtgcaaatgttgggtgtgattatggcaggtggagggtggttcgttaagctggcttttggatgtatagtttctttttcttttagttgtgttttgtcatttctttttaattttcagctccgagatctgaaacttgtgtaaccagatgcctcttaatctaaatcagcgtggcatttagatcgatttgaaagcttaca

SEQ ID NO: 213875 - DNA, 2151 bp, Zea Mays
cttcacacagccattttttctctctctctctcatgcatcgtctatctatattattttatctccccccgtctccacctccccctatattctctctctcccctcctctcctctccccagctacgccagtcctcctccctgtctgcttcggtgcttcgctcccgcactgcgcttggccgctttccctctccccgcaccttctccacctcccccattccgccaccgcacgagcagagctccctcaccaagaggaccaaaaaaaaaaaaaacgagggaggcaagccaggcgggacagcaacgcgacgcgcttgtcattcactcgaggagctcatgcaaggcgtaaatcttattgcaagaagggcagctgtgcatgttaagtctcaaatatagactcacttgataacactgcatgagaggttgaaaacttgaggtacagttgatattctggttcagagtatgggttcaaggtttgcatcacatcagctgagcaatggcctgtatgtttctggtcgacctgagcaacctaaggagaaggccccaaccatttgttccactgcgatgccatatactgggggtgacatcaagaagtctggagagcttgggaagatgtttgatctccatgttgagaaatcaagaaaatctggtcctctaggaaacgctccttcaaggaatacttcatttggaggcactgcttccaattctgggcctgtctccaatgctggtggtcggtccaactactctggttccctttcatcttcagttcctggtgctggtggatcagccagagcgaaatcaaactccggaccactcaataagcatggagagccaacaaagaggtcatctggtccccagtctggaggagtaaccccaatggcacgccagaattctggcccccttcctcctgtgcttccgacaactgggcttatcacatctgggcctatctcttcagggccacttaattcgtctggtgctccaaggaaagtatctgggccacttgattctgctgcatcgatgaaaatgcgggctacttcctttgctcacaatcaagctgttactaatctgaacactgaagatggttactcaattcagggaagctttccgaagccaatactctgggctgtgattttgctctttgtgatgggttttatagcaggtggcttcattttgggggctgttcacaatgcaattttgctgatagttgttgtggtcatatttggttttgttgctgcacttcttatctggaatgcttgctggggtagcagaggtggaattgggtttgttagtcgctaccctgatgctgatctcagaacggccaaagatggacaatatgtaaaggttacaggggttgttacttgtggaaatttccccctcgaatcctcgttccaaagggttccaagatgcgtatacacttctactggcttgtatgagtacaggggttgggattccaaagctgccaataccgaacatcggcgttttacatggggtttacgttcaatggagattttcagtccgggcttcgagcattggtgaaaacaggatatggtgcacgtgtgaccccatacgttgatgaatctgttataattgacatcgatccagacaacaaggatatgtcccctgaatttttgagatggctaagagagagaaacctttcaagcgatgatcggacaatgcgcctaaaagaaggatacatcaaggaaggtagcactgtaagtgtgatgggggttgtccaaaggaacgacaacgttctgatgattgttcctccatcagagcccatctcaactggttgtcagtgggccaagtgcgttctcccgaccaaccttgacgggcttgttttaagatgcgaagatacttcgaacattgatgtggtgccagtttaattagcggtgaagagtcgttgccaaagaaagtgtctgttaaatatgagtctgaattgtttcatgcaatgttagttgacaaaaatgtgcaaatgttgggtgtgattatggcaggtggagggtggttcgttaagctggcttttggatgtatagtttctttttcttttagttgtgttttgtcatttctttttaattttcagctccgagatctgaaacttgtgtaaccagatgcctcttaatctaaatcagcgtggcatttagatcgatttgaaagcttaca

SEQ ID NO: 213876 - DNA, 2184 bp, Zea Mays
cctggcccgccaagtttggtcctaccctggtgaatttaaaagcaaagatgctgctggtcaagttcgtggttcccctaatgaatttcctgggattggtgctacatctcctcttctttggttaactagagggtttgtgattctgtctggtccgacaatcccaattatcggtgaaggcgatgaagaggccaatgacagatatgtggaacaactagtagtgcaagtgacccaaacttcttcagtgagaggtagatttgtaagaagtataatcacgcacactaccaaggactacacttttaattgttgtaccaggatagcaattttaattttgcatatgtgatattagacctgcttgatttggagtgcctttaccattaaactgacttgtttgcttctcgttgttttatgcaagtcttcattattttctgtggaaatattctctatgttctcatgatttaattttctgcttatttttgttactggttaatgacttttactaatttgcgttattgatcttatggtttgtcctttttctttttgcagtcagaccgattcttcaatgccttgaaagcattgtctcctttggtaatacttccttttgagagccatgggtactctgccaaggagagtatcatgcacgtcctctaggagactgataggtggttgcagaactaccgtgtaaatggtactagcaaggttgactcagtgtcagaggctaacagtaaaaataaaacattgtcagctaatggtggcagtgtagcccgtgaaggtctaaaccctgaggaactctcatcattaccaagatcgcttctgtggtaaattttttccttggttgctgcttctcaagaagaaaaaagatacacttttctgtttgtttgtctgttgggttaattggcgctcctgatattgaccgtcgtaaggcgtcagttgtacccagtctattttggaccttgttcctttctatttttaatataatgatacacagctctcctatgtgttcgagaaaaaaagatattgtcttatgtagtatttgtgatacctgctttaaagctcactatacagactgaaaaaaaatctcatctccttaattatcttatatcaaagttcccacacggagcaggttctgtttatatggatttttgtatgtaagattgcattgttcttttgtatgaggctgcatatggcgaggcgatgtctagtcagcacagaccagactatgattggaggatctcacctattgaaccacaggttgtgtatgcaagtggtggaaaagctcatggaaggtgagggttcagcgtggaggttcatcgaggcctgctgctcgtagctcccgtcgctccactcaagatccagcagaagtggagcaactacgagaagaacttaggcgacatcaggattacttgaagcaacaagctgcgcaacgtgaatattatgctacacagattcaacaacagcaaacactcatacaacaactagcacaggcccaagggatacacgtcccgatgccccctccaccacctcccgttcattatccttggtcttcacctccacctatacctacatatccatctatcgaacatcagaccccttcagctaccttgtcgatgcatgaacaagaagacgggttagactttgtcaaaaccctcttcactagtggaggtatcgaccatcactcgtcactgtaacccgatggtgatcggcgaccgtgagcttccatgttattgtgttctgatacttgagacttttattatgactatgtatgagatattgtctcttattagtactggatgatgagatgtgtcttattatgactatggatgagacttttgtgatgtaattgatgagactatggatttaaatattgttatgagattgtgtgtgagatgttttatgtgaaaatatggtgttctatataactgttgatatatttgttatgttgtggaatgtggtgtaaaataaaaataaacagcatttgtaatgctggtcaaattaacttcctagaggcttattgggtcgtaggaagttagccagctaactttctagaggctacagtcagccgtaggaagttagccagctaacttcctaggggctacggtcagccgtaggaagttagtcgtaggaagttagtcagctaacggtgctgacggcgtgaagctactaacttccgagaatctactaacttccgag

SEQ ID NO: 213877 - DNA, 2257 bp, Zea Mays
cgccttttggcccatgggctggaacggggaggcctgacctagtaagcagctggcggctccctagtaggccagaccaaccaaccatatcctttccccaccccgcatcgtcggacaccctccaaagtccaaaccctctccccgccgcatcgccgccgccggaagcgcctccctcgatccagatccaggagatatgcctcgcaatgatgatcgctatgggaatacacgcttgtatgttggaagattgtctccccgcacccgttctcgtgacctagaataccttttcagcaaatatgggaggtaagcatcacattatatgcacatagaactattctgaaactcagagtgtgctggcgtgctgctttttgttatgtggtcggacaccagttatgctctactacctccgtttttatatatttgacgccatacaattccacttttacatgccgacgtcaaataaaaatgaacggagggagtagtatatatcatgagcacgtgatgttaactctgcatggttaaattttgtggtacacaactacacatcaatccagatataaaatacaatagcaagctaggggctttcctatcgtgttcaaaaaaaactcgacctgtgggggtaagaccgtctgtacaatattatattaagaagaccttctcacacaggtcaagaagaccttccacgcaggtcgagaaaacctctaaactcctgccccaccacccccacccatacacaatggcaccgtagcccaagtgagaacgaccgggccaggcctgtgctttggcttgggacaggcgaggggatgttttaacttttaaccacagcctgaaaattcgctcccacggggagtcaaacctagaacctgacaagtgctactcagaccacctaaccaactcgcctgttcataataggtagtttatgaaggtgttgggttttgtgatgcttgacatcattttgaggtttttgtggatggggtcatacaagtcttctgattttattggtgtatgttctgttacatcactaagcacaaaataaatgtttgacctgggcctatttgacttgaatgatcttgttgaaggtttttcggttttttacacaaccatggaggtgtggtggaagggtgcccttgatggaattggtggccatagttccaatgtttgtggaggactttgaattcgagaagtggagttgaagcgtgactatgcattcattgaattcagtgacccccgtgatgctgatgatgcacagtacaacctagatggcagggacgtcgatggaagccgcattattgttgaatttgctaaaggggttcctcgtggttctggtggttcacgtgattacaacggaagaggacctccaccaggaacaggccgttgttttaactgtggagttgatggtcactgggcaagagactgtcaggctggtgactggaagaacaaatgctaccgttgtggcgaaaggggccatatagaaagaaattgccagaacagtccaaggaacctcaggcgtgagagaagctattcacggtctccatccccacgccgaggacggggccgcagccggagctacagcagaagccggagctatagccgatccagatccccgtctggatctcctaggggtggacgccgagaccgtgatgagaggagatcaaggagtcttagctacagcaggagcgcaagccctaggcgttctgtgtcacctgtaaaggaaaaggagcgcagccgcacacctgatggcagtaggagccccagcccaagggacaaggtgagcccaccaccaaaggataatggtgcccacaatggctcggaccgtgaagacagccctgggggcagggagatgagcaagaggagtcggagcccgtctgatggctaccgtagccctgtgggcaatgggcgcagcccgagccgtagcccaagccccaaggtcaacaatggtgatgacccaagccccaagggcaacaatggtgacgacccaagccccaagggcaacaatggtgatgacgagcaccgcggttcaccaagaggaagtcagtccccctgaactgaaaaactccccgtgcaatttggggagcagtgtgcctgatttgagaaaacaaactgtattttgccatttctcagacttgtgatctttttgagcaagaaaactcggtgtaagaatttgttgccctcgggtgtaagacagatttgtggtatttgagcttttcatcctgccaaaagctgaatattcattcaattgccaagtatctcgagtttatctgct

SEQ ID NO: 213878 - DNA, 537 bp, Zea Mays
gtttggtcctaccctggtgaatttaaaagcaaagatgctgctggtcaagttcgtggttcccctaatgaatttcctgggattggtgctacatctcctcttctttggttaactagagggtttgtgattctgtctggtccgacaatcccaattatcggtgaaggcgatgaagaggccaatgacagatatgtggaacaactagtagtgcaagtgacccaaacttcttcagtgagagtcagaccgattcttcaatgccttgaaagcattgtctcctttggtaatacttccttttgagagccatgggtactctgccaaggagagtatcatgcacgtcctctaggagactgataggtggttgcagaactaccgtgtaaatggtactagcaaggttgactcagtgtcagaggctaacagtaaaaataaaacattgtcagctaatggtggcagtgtagcccgtgaaggtctaaaccctgaggaactctcatcattaccaagatcgcttctgtggtaaattttttccttggttgctgcttctcaaga

SEQ ID NO: 213879 - DNA, 3309 bp, Zea Mays
ccggcgccggggcccgcgaaatctcctcgaccgctgctttctcttcctcttcctcttcctcttcctttcccatcctttccacccatccacaccgccaccaccgcctacctccaccaccagtccatctcctccgcagcgtctaaagccctatccggatatccccactcgccgacgcccggacatatggccagcttcggcgtcgacacccgcccggccgccgcggcctccggcggcggcgtgggcgtggcggggacgagggagggcgcgctctcgttcctctcccgcgggctgcgggaggacctccgtctcatccgcgcgcgggccggggagctcgagaccttcctcagcgcgccggtgccggaacccgagctgttcgcgcgcctccgtcgcgcctactcctgctcggcgtcctcttcgcggacgcggctcgacctgtccgccatcgggaaggcgttcgaggccgacgcgtggaggggcgccaggactgccaggtggaggtgggaggcggagacggaggcggaggagtgggagccagtcaggatggtcaaggcgcacctcagggagctcgagcggaggaggctggcccagtcgcccagcgacatgctgcacaagctcaagctcagcttgaaatcactgacctttgcgcctgaagcgtctgaggttagtcctcttgattcacttcttgttgcaatgttgcatagtgctgtcaaggagatacacttctgaaaccttttgctcgtagtggtgtcttttatttgcgtatatttaattactgacttctgacagtgacttttgcaagaatgttcaatctaaagaaaaatgattgtggtaaacatttcattcaatatattacttatgtaacattttcctaaaccctggtaccacatttctcttctgtatatctgtgtaaatccttattaaacaaaagaggaacattctatcttgttagagcactgcctaatcaaccttgtccacttttgcatttccataatcagtaccacgcttgtgcaggatgttctgccactggatttaggggaacttcttgcttattttgtaaagcaatctgtaccactattcgaccaacttggtataaaaagagatgtatgtgacaagttggtggagtctctgtgcagcaagcgcaaggaccaccctgcatatagttttttgtcagcaactgaatcatcttcattgaaaaatgacaatgttgggaatgaactcgacctaagaatagctagcgccctacagagtacaggacaccattatgaaggtggattttggagtgatggccataagtctgacatatctggcaagagacatgttgccatagtcaccactgccagtcttccctggatgactggaacggctgtgaatcctttgtttcgagctgcatacttggctaaatcttgcaagcaagatgtaactttggtagtgccctggctttgtaagtcggatcaggaacttgtgtaccccaacagcatgacttttagttcaccagaagagcaagaaaaatatatgaggaattggctggaagaaagagttggtttcaagacagacttcaaaatatcattttatcctggaaagtttcaaaaggaaaggagaagcataattcctgctggggacacttcacagttcataccatcaaaggaagctgatattgcaatcttggaagagcccgagcacctcaactggtatcatcacgggaaacgatggacagataaattcaatcatgtgatcggtgtagtgcatacaaattatttggagtacatcaagagggagaagaatggtgctattcaggcctttttcgttaagcacattaataacctggtcgccagagcttattgccataagatcttgcggctgtcaggtgccactcaagatcttcccaagtcgacgatctgcaatgtgcacggtgtgaaccccaagtttctggaggttggagagaggatagcagcagagcgggagtctggccagcaatccttctctaaaggagcttattttctggggaagatggtgtgggccaagggttacagagagttaatagatttgttcgcgaagcacaacagtgatttggaaggcttcaagctggacatctatggaaacggtgaggattcacacgaggtgcaatcggctgccaggaagctgaatctgaacctcaactttcataagggccgggaccatgcggatgattctcttcatgggtacaaggttttcataaacccaagcatcagcgacgtcctctgcaccgcgaccgcggaggcgctagcgatgggcaagttcgtggtgtgcgccgaccacccgtccaacgacttcttccggtcgttccccaactgcctgacatacaagacctccgaggacttcgtcgccagagtgaaggaagccatggcgcgcgacccgcagcccctgaccccggagcagcggtacaacctgtcgtgggatgccgccacccagcggttcatggagcactccgagctcgacaaggtcctgaatggcgacagcaacagcgaatgcggtggctctgttggcaccgaaaccggcaagagcgcgggcacaatgatgaggagatccgcctcggcgccgaacatgtcagacgtcgtggacggcggcctggcgttcgtgcactattgcttcaccggcagtgagctcttgaggctgtccacgggtgccgtccctggaacccgggactacaacaagcaacatagcctggacctccgtctcccgccgccccaggtacagaacccggtctacggctggtaattactagatatataggtatagctctgcagtctgtagcactagctttttcatctccgcgtgtgtttgtttgccaaaggcgagccttgttcattattacctacaaacaacaactacgactgtaaggatgacaacgctgcgtcgtgattttgtaagactagtgctagatagagaggcgagcatttcttcaatcaaaaaatttaaaaaaaaggaaaggaaagaaagactgaggcggggcaggccctctgtttccaactttttgttgccaacaattgcacgcaccgccctcgttcagactcagtataggtgtacatttgggctgggcctgatgggccggctcaaagcacgaaaaaaagtacggcccaggcacgacacggttcgaaatattttagtgctgggctggcacggccccaatatattgggctgggtttgggccgaggtcgtggcccgtgggcgagcacgagcacggcttgtttaaggcaggcacgaaatggcccatatagaggcacgaaaagatccatatatttattaaaaccatacttcattccacattttcat

SEQ ID NO: 213880 - DNA, 2406 bp, Zea Mays
atgcatatttttagtagctttgctgaaaagtggttttttatgatccaaagggcacacgagaatttgaaaaacaagaaatcactgacctttgcgcctgaagcgtctgaggatgttctgccactggatttaggggaacttcttgcttattttgtaaagcaatctgtaccactattcgaccaacttggtataaaaagagatgtatgtgacaagttggtggagtctctgtgcagcaagcgcaaggaccaccctgcatatagttttttgtcagcaactgaatcatcttcattgaaaaatgacaatgttgggaatgaactcgacctaagaatagctagcgccctacagagtacaggacaccattatgaaggtggattttggagtgatggccataagtctgacatatctggcaagagacatgttgccatagtcaccactgccagtcttccctggatgactggaacggctgtgaatcctttgtttcgagctgcatacttggctaaatcttgcaagcaagatgtaactttggtagtgccctggctttgtaagtcggatcaggaacttgtgtaccccaacagcatgacttttagttcaccagaagagcaagaaaaatatatgaggaattggctggaagaaagagttggtttcaagacagacttcaaaatatcattttatcctggaaagtttcaaaaggaaaggagaagcataattcctgctggggacacttcacagttcataccatcaaaggaagctgatattgcaatcttggaagagcccgagcacctcaactggtatcatcacgggaaacgatggacagataaattcaatcatgtgatcggtgtagtgcatacaaattatttggagtacatcaagagggagaagaatggtgctattcaggcctttttcgttaagcacattaataacctggtcgccagagcttattgccataagatcttgcggctgtcaggtgccactcaagatcttcccaagtcgacgatctgcaatgtgcacggtgtgaaccccaagtttctggaggttggagagaggatagcagcagagcgggagtctggccagcaatccttctctaaaggagcttattttctggggaagatggtgtgggccaagggttacagagagttaatagatttgttcgcgaagcacaacagtgatttggaaggcttcaagctggacatctatggaaacggtgaggattcacacgaggtgcaatcggctgccaggaagctgaatctgaacctcaactttcataagggccgggaccatgcggatgattctcttcatgggtacaaggttttcataaacccaagcatcagcgacgtcctctgcaccgcgaccgcggaggcgctagcgatgggcaagttcgtggtgtgcgccgaccacccgtccaacgacttcttccggtcgttccccaactgcctgacatacaagacctccgaggacttcgtcgccagagtgaaggaagccatggcgcgcgacccgcagcccctgaccccggagcagcggtacaacctgtcgtgggatgccgccacccagcggttcatggagcactccgagctcgacaaggtcctgaatggcgacagcaacagcgaatgcggtggctctgttggcaccgaaaccggcaagagcgcgggcacaatgatgaggagatccgcctcggcgccgaacatgtcagacgtcgtggacggcggcctggcgttcgtgcactattgcttcaccggcagtgagctcttgaggctgtccacgggtgccgtccctggaacccgggactacaacaagcaacatagcctggacctccgtctcccgccgccccaggtacagaacccggtctacggctggtaattactagatatataggtatagctctgcagtctgtagcactagctttttcatctccgcgtgtgtttgtttgccaaaggcgagccttgttcattattacctacaaacaacaactacgactgtaaggatgacaacgctgcgtcgtgattttgtaagactagtgctagatagagaggcgagcatttcttcaatcaaaaaatttaaaaaaaaggaaaggaaagaaagactgaggcggggcaggccctctgtttccaactttttgttgccaacaattgcacgcaccgccctcgttcagactcagtataggtgtacatttgggctgggcctgatgggccggctcaaagcacgaaaaaaagtacggcccaggcacgacacggttcgaaatattttagtgctgggctggcacggccccaatatattgggctgggtttgggccgaggtcgtggcccgtgggcgagcacgagcacggcttgtttaaggcaggcacgaaatggcccatatagaggcacgaaaagatccatatatttattaaaaccatacttcattccacattttcat

SEQ ID NO: 213881 - DNA, 2406 bp, Zea Mays
gagttaaggaaaatagtaatgttaaacaactggaggttcaaagctcatggaaatgttcttctgtgaagtctacagaaatcactgacctttgcgcctgaagcgtctgaggatgttctgccactggatttaggggaacttcttgcttattttgtaaagcaatctgtaccactattcgaccaacttggtataaaaagagatgtatgtgacaagttggtggagtctctgtgcagcaagcgcaaggaccaccctgcatatagttttttgtcagcaactgaatcatcttcattgaaaaatgacaatgttgggaatgaactcgacctaagaatagctagcgccctacagagtacaggacaccattatgaaggtggattttggagtgatggccataagtctgacatatctggcaagagacatgttgccatagtcaccactgccagtcttccctggatgactggaacggctgtgaatcctttgtttcgagctgcatacttggctaaatcttgcaagcaagatgtaactttggtagtgccctggctttgtaagtcggatcaggaacttgtgtaccccaacagcatgacttttagttcaccagaagagcaagaaaaatatatgaggaattggctggaagaaagagttggtttcaagacagacttcaaaatatcattttatcctggaaagtttcaaaaggaaaggagaagcataattcctgctggggacacttcacagttcataccatcaaaggaagctgatattgcaatcttggaagagcccgagcacctcaactggtatcatcacgggaaacgatggacagataaattcaatcatgtgatcggtgtagtgcatacaaattatttggagtacatcaagagggagaagaatggtgctattcaggcctttttcgttaagcacattaataacctggtcgccagagcttattgccataagatcttgcggctgtcaggtgccactcaagatcttcccaagtcgacgatctgcaatgtgcacggtgtgaaccccaagtttctggaggttggagagaggatagcagcagagcgggagtctggccagcaatccttctctaaaggagcttattttctggggaagatggtgtgggccaagggttacagagagttaatagatttgttcgcgaagcacaacagtgatttggaaggcttcaagctggacatctatggaaacggtgaggattcacacgaggtgcaatcggctgccaggaagctgaatctgaacctcaactttcataagggccgggaccatgcggatgattctcttcatgggtacaaggttttcataaacccaagcatcagcgacgtcctctgcaccgcgaccgcggaggcgctagcgatgggcaagttcgtggtgtgcgccgaccacccgtccaacgacttcttccggtcgttccccaactgcctgacatacaagacctccgaggacttcgtcgccagagtgaaggaagccatggcgcgcgacccgcagcccctgaccccggagcagcggtacaacctgtcgtgggatgccgccacccagcggttcatggagcactccgagctcgacaaggtcctgaatggcgacagcaacagcgaatgcggtggctctgttggcaccgaaaccggcaagagcgcgggcacaatgatgaggagatccgcctcggcgccgaacatgtcagacgtcgtggacggcggcctggcgttcgtgcactattgcttcaccggcagtgagctcttgaggctgtccacgggtgccgtccctggaacccgggactacaacaagcaacatagcctggacctccgtctcccgccgccccaggtacagaacccggtctacggctggtaattactagatatataggtatagctctgcagtctgtagcactagctttttcatctccgcgtgtgtttgtttgccaaaggcgagccttgttcattattacctacaaacaacaactacgactgtaaggatgacaacgctgcgtcgtgattttgtaagactagtgctagatagagaggcgagcatttcttcaatcaaaaaatttaaaaaaaaggaaaggaaagaaagactgaggcggggcaggccctctgtttccaactttttgttgccaacaattgcacgcaccgccctcgttcagactcagtataggtgtacatttgggctgggcctgatgggccggctcaaagcacgaaaaaaagtacggcccaggcacgacacggttcgaaatattttagtgctgggctggcacggccccaatatattgggctgggtttgggccgaggtcgtggcccgtgggcgagcacgagcacggcttgtttaaggcaggcacgaaatggcccatatagaggcacgaaaagatccatatatttattaaaaccatacttcattccacattttcat

SEQ ID NO: 213882 - DNA, 1130 bp, Zea Mays
acgacaggtaggtcgccggaaggcgagctagctcgtcgtcatcatggacggcggcagcagctggttgccattcctaggccgtggaattggcgacggcgtatcgggcagcaggagcagtggctcggaggtgcagcggaaggaggacgacgacctgccgatcagctcgcaagtggaggaggagctccgacagttctacttgctgatgggcatggagagaactggacacccagcagagcgagagacgacgacggcgttgcccccctcatcggaatcatccatgttccgctccttccctggaagcccggccgacgaggcctcgtcgctcaggccacggagcagcaacaacaatagtaccacggcgaactcctaccaccaccacccggcagaagtctcctcccagtcccatctgaccgagctctccccggtcacctacggcggcggccaccgccactgtgacgaccatcagtgctacgtcaatctcgacacgatcctaaagctggacgacgagttcaagcgctgccacgacgaacaaccccacaacgaaagagcgcagcacaagaacggcttccgtggcggcgcgttcgtgccctacacccgccacctcggccccaagaagaagcccaagccacctgcaggctccggcgggcagagggcgatcaaggcggccatggcagccttggcacgaatgcacatggtcaggctcgcccagtggcagtgctaccagatggaactggtggtagcgcctgcgccgcccaccggcgggatcaacggcaacaaccagcagcagcacgttttgtcggagcgcaagcgccgcgagaagctcaacgacagcttcaaggccctcaggacagtgctccccccttcttccaagaaagataaggcatccacactgatgagagcaagggactacgtcagcactctccagtctagagtgtctgagttagaggagaagaacaggatgatgctagtacagttgcagcaccgccgcaatgatgtttctcccaacaagattgaggtcgacatcagaagtaatagagaggaaattaggaaacatgacaggaatttcacctgaagatatatagcagttgttatggtttatagtaggaggcctaaacagccctctagtcggc

SEQ ID NO: 213883 - DNA, 4195 bp, Zea Mays
cgctactgtactataaatcctctaaagttttccgaaaaggtacaaacccccgaaacatcggatcttctgcaccaagtctataggccgcaccgctacagcagctccgagcgacggagcgagagagcacagcagcgcaacggtggccaccgcaggagccgcagaagataacgccaccgccgtcgtctgctttcttccgcatacggcacagctagacagcttgtttggagccgcttcgtgccggctttacggtggaaaaaagcggacgaactctcccaaacggcggccaattgtcccgggcatgccttttgtcccgcctgcgattcttctccccgcggtgttcaacgtgcaaggctgcaaacggaatcggcaaggcgaggcgcagtggggaaaatcccatcgattcgctcggccctcgcccctccgctcgctccagaggcaccggcgccgccgactccggactactactccccgcgacgcaggcgctgtctccctcctcgcgcggcggccgccaccgcctcccagacgcctttgaggcagagaaggtgtcaactttgtttccatttgattggatattgtctttacgatcattgctagtgtattatgattttatgaaagatgatggtactatgtgaggtcaaatgaaagttatgatatgccttccttctgatggccagaatatgttaattgatcagtttggataccattgcgataagtagctgtctagatacaccagtacccacaaattctctcacacccaatatgccgacatggtggggtaaatcatcgtcaaaagatgttaagaaaaccaccaaggaaaacctgatcgatacatttcatcgcttgataagtccaaatgagcaaaagggaagcacaaaatcaaaacggaattgcaggcgtggcaataatacagctgctgagaaagtttgcaaatcaacaacagtgtcacgtccaacttctccatcgaaagaagtttctcgctgccaaagtttttcggctgataggctgcatgcccagccacttcctattcctggagtacgccctcgagtaactcgtgcagttgctgatgtcaatgtttcaaagcccatattggaaaaacgtggcaaacctccactgcttttgccacttcctaaacccaatccacttcaccggggacctggaagcagtgatattccttcagaaatagtggttgcttctgtctctagcaattgttctgctgatagtgaggatcgtgcagattctcagcttcagagccctgttgggaatgatactaacaatgtaaaaaaggtttcttcaaagaacaagtcaagtaatgtttgcaaggatcactctggtgctattactaccaagaccacgaaagaaatattgaagccagctgctaatgcattcctcagtaaccatacacagtccgcgccaccaagaggtatctcagctgacaataatcaactaaatttacaaaatccccagccagtagtttttgagagtgctcccaatagtttgatgtcaagtccttcgagaagtccaagaccaatatgtcctgatcatattctgacttcagcattttgggcagtgaagcctcatgctgatgtaactttccttggatctggtcagtgctccagtccaggttcaggacaaacatctggacataattcagtgggtggtgatatgctatcccagctttttttgcagcccaccagaggtagtccagagtgttcaccagttcctagcccaagaatgacaagtcctggtcctagttctcgtgtgcacagtggaagtgtttccccattgcatccaaggtctggaggactggcacctgaatctcctacaagtcggcatgatggtggaaagaagaagcaaacccataaattgccccttccaccattgagcatcgctcacagtccattttttccgaataactcgacaccaagtagtcctatttcagtaccccgtagccctggcagaacagagaatccatcaagtcctgcatcgcgatggaagaagggcaagctgattggtcgtgggacatctggtcatgtatatgttggcttcaacagtgatagtggtgaaatgtgcgcaatgaaagaggttaccctattcttggatgatcctaaatcaaaggagagtgcaaagcaattggggcaggaaatatcactcttgagtcgcttacgacatccaaatattgtacaatactatggatcagaaatggttgaagataaactttacatatatttggaatatgtttctggtggatccatacataaacttctacaagaatatggacagcttggtgaaccagcaatacgcagctacacccttcagatactttcaggcttagcttatttgcatgccaagaatacggtccacagggacatcaaaggtgccaacatactagtaaatccaagtggccgtgttaagcttgcagactttggaatggcaaaacatatcaatgggcagcactgtcctttttcatttaagggtagtccatactggatggctccagaggttataaaaaattctaatggatgcaaccttgtggttgacatatggagtttaggttgcactgtcctggaaatggctacctcaaagccaccatggagccagtatgaagggattgctgcagtgtttaagattgggaatagcaaggaacttccaccaataccggattatctttcggagcactgcagggacttcattaggaagtgtctgcaacgtgacccgtctcaacgtccaacggcagttgagcttttgcaacacccgttcatacaaaatggaatttcacttgagaaatctgttactcctaatcatttggagcatttggctgccatatcatgcagaacaaaacccaaggtggccgtgcagacaagaaatgcctccttaggttttgagggtcagacgatttaccaaagaaggggtgtaaaactatcttcaaaacacagtgatattcacatacgaagcaatacatcctgtccagtttctccatgtcggagccccctgctaaaggcgaggtccccccaacacacaagtggcaaaatgtcaccctctcctatttcgagccccagaactacatcaggcacttccacacccctatctggtggtaatggtgcaattccttttaaccacctaaggtatgcaacttacagcagcgagggatttgggaccacatcaagaggcctagatgatcacttctccaactgtcataaagatctgaaccttgggcattttgctgaggcgcatcaagtctcacagggacctagggaaagggtagtatctgaagctgatattctgagccctcaatttagaaagaaacttggaaatgtatttgacttgcgggaaaggttgtccccttctgaacattttactcgtcgtgccttggtggatcatgtggagctaaatccttcaaaccctggactaaagcgtggtaaataactagagtataaaaggcagggttgcatttttttttgaagtttgttgaagtaactggtggtttttggctactatgaccattcaatggctgcaagtgtatcatagtatcagaaagattgataatttctttagaagctaatggttgccaatggatgggatctctgttgtcatcaacgcaattcaagtcaacaaagattctgcctattcctacatggctgagcaagtttccttagcttactaaactggcgtgctaacaagtgacacgtgtcaattgatgggactgactgaatcacggaatgacccaaagcagtaactctccatctgtatacccctcaccccaatatgtacagaaggaatctcaactaggaacctagaatttgcacaggaaaaaaaaacaggtgtgctagccatttggcaatcagtgccagtttatctgttgctccacagttacatatcccacccatggttgaggtggagctgcaaagtccgttggaattatcttgtagcagtttctcggcaagatgagtcgcttcattcactgtacgtcggtgccggctactctgaaacttacatactataagaatctggtcccttactaactgcatgtcgtccgaaccactgcatgaacttgtttgcactgctgctgggattacgaatgttgtaacaaagcacgggttttgctgcttgatggcggaagcaaaatgtagtacagattaggtgatatgcagtcaagtgtttacctgtctgggtgatggcattcgtcaggaaatttctg

SEQ ID NO: 213884 - DNA, 2358 bp, Zea Mays
ccgggcatgccttttgtcccgcctgcgattcttctccccgcggtgttcaacgtgcaaggctgcaaacggaatcggcaaggcgaggcgcagtggggaaaatcccatcgattcgctcggccctcgcccctccgctcgctccagaggcaccggcgccgccgactccggactactactccccgcgacgcaggcgctgtctccctcctcgcgcggcggccgccaccgcctcccagacgcctttgaggcagagaaggtgtcaactttgtttccatttgattggatattgtctttacgatcattgctagtgtattatgattttatgaaagatgatggtactatgtgaggtcaaatgaaagttatgatatgccttccttctgatggccagaatatgttaattgatcagtttggataccattgcgataagtagctgtctagatacaccagtacccacaaattctctcacacccaatatgccgacatggtggggtaaatcatcgtcaaaagatgttaagaaaaccaccaaggaaaacctgatcgatacatttcatcgcttgataagtccaaatgagcaaaagggaagcacaaaatcaaaacggaattgcaggcgtggcaataatacagctgctgagaaagtttgcaaatcaacaacagtgtcacgtccaacttctccatcgaaagaagtttctcgctgccaaagtttttcggctgataggctgcatgcccagccacttcctattcctggagtacgccctcgagtaactcgtgcagttgctgatgtcaatgtttcaaagcccatattggaaaaacgtggcaaacctccactgcttttgccacttcctaaacccaatccacttcaccggggacctggaagcagtgatattccttcagaaatagtggttgcttctgtctctagcaattgttctgctgatagtgaggatcgtgcagattctcagcttcagagccctgttgggaatgatactaacaatgtaaaaaaggtttcttcaaagaacaagtcaagtaatgtttgcaaggatcactctggtgctattactaccaagaccacgaaagaaatattgaagccagctgctaatgcattcctcagtaaccatacacagtccgcgccaccaagaggtatctcagctgacaataatcaactaaatttacaaaatccccagccagtagtttttgagagtgctcccaatagtttgatgtcaagtccttcgagaagtccaagaccaatatgtcctgatcatattctgacttcagcattttgggcagtgaagcctcatgctgatgtaactttccttggatctggtcagtgctccagtccaggttcaggacaaacatctggacataattcagtgggtggtgatatgctatcccagctttttttgcagcccaccagaggtagtccagagtgttcaccagttcctagcccaagaatgacaagtcctggtcctagttctcgtgtgcacagtggaagtgtttccccattgcatccaaggtctggaggactggcacctgaatctcctacaagtcggcatgatggtggaaagaagaagcaaacccataaattgccccttccaccattgagcatcgctcacagtccattttttccgaataactcgacaccaagtagtcctatttcagtaccccgtagccctggcagaacagagaatccatcaagtcctgcatcgcgatggaagaagggcaagctgattggtcgtgggacatctggtcatgtatatgttggcttcaacagtgatagtggtgaaatgtgcgcaatgaaagaggttaccctattcttggatgatcctaaatcaaaggagagtgcaaagcaattggggcaggaaatatcactcttgagtcgcttacgacatccaaatattgtacaatactatggatcagaaatggttgaagataaactttacatatatttggaatatgtttctggtggatccatacataaacttctacaagaatatggacagcttggtgaaccagcaatacgcagctacacccttcagatactttcaggcttagcttatttgcatgccaagaatacggtccacagggacatcaaaggtgccaacatactagtaaatccaagtggccgtgttaagcttgcagactttggaatggcaaaacatatcaatgggcagcactgtcctttttcatttaagggtagtccatactggatggctccagaggttataaaaaattctaatggatgcaaccttgtggttgacatatggagtttaggttgcactgtcctggaaatggctacctcaaagccaccatggagccagtatgaagggttcaagtaattggttgacatcatgtatgctattgatgctggaa

SEQ ID NO: 213885 - DNA, 3639 bp, Zea Mays
tttgtttccatttgattggatattgtctttacgatcattgctagtgtattatgattttatgaaagatgatggtactatgtgaggtcaaatgaaagttatgatatgccttccttctgatggccagaatatgttaattgatcagtttggataccattgcgataagtagctgtctagatacaccagtacccacaaattctctcacacccaatatgccgacatggtggggtaaatcatcgtcaaaagatgttaagaaaaccaccaaggaaaacctgatcgatacatttcatcgcttgataagtccaaatgagcaaaagggaagcacaaaatcaaaacggaattgcaggcgtggcaataatacagctgctgagaaagtttgcaaatcaacaacagtgtcacgtccaacttctccatcgaaagaagtttctcgctgccaaagtttttcggctgataggctgcatgcccagccacttcctattcctggagtacgccctcgagtaactcgtgcagttgctgatgtcaatgtttcaaagcccatattggaaaaacgtggcaaacctccactgcttttgccacttcctaaacccaatccacttcaccggggacctggaagcagtgatattccttcagaaatagtggttgcttctgtctctagcaattgttctgctgatagtgaggatcgtgcagattctcagcttcagagccctgttgggaatgatactaacaatgtaaaaaaggtttcttcaaagaacaagtcaagtaatgtttgcaaggatcactctggtgctattactaccaagaccacgaaagaaatattgaagccagctgctaatgcattcctcagtaaccatacacagtccgcgccaccaagaggtatctcagctgacaataatcaactaaatttacaaaatccccagccagtagtttttgagagtgctcccaatagtttgatgtcaagtccttcgagaagtccaagaccaatatgtcctgatcatattctgacttcagcattttgggcagtgaagcctcatgctgatgtaactttccttggatctggtcagtgctccagtccaggttcaggacaaacatctggacataattcagtgggtggtgatatgctatcccagctttttttgcagcccaccagaggtagtccagagtgttcaccagttcctagcccaagaatgacaagtcctggtcctagttctcgtgtgcacagtggaagtgtttccccattgcatccaaggtctggaggactggcacctgaatctcctacaagtcggcatgatggtggaaagaagaagcaaacccataaattgccccttccaccattgagcatcgctcacagtccattttttccgaataactcgacaccaagtagtcctatttcagtaccccgtagccctggcagaacagagaatccatcaagtcctgcatcgcgatggaagaagggcaagctgattggtcgtgggacatctggtcatgtatatgttggcttcaacagtggtgaaatgtgcgcaatgaaagaggttaccctattcttggatgatcctaaatcaaaggagagtgcaaagcaattggggcaggaaatatcactcttgagtcgcttacgacatccaaatattgtacaatactatggatcagaaatggttgaagataaactttacatatatttggaatatgtttctggtggatccatacataaacttctacaagaatatggacagcttggtgaaccagcaatacgcagctacacccttcagatactttcaggcttagcttatttgcatgccaagaatacggtccacagggacatcaaaggtgccaacatactagtaaatccaagtggccgtgttaagcttgcagactttggaatggcaaaacatatcaatgggcagcactgtcctttttcatttaagggtagtccatactggatggctccagaggttataaaaaattctaatggatgcaaccttgtggttgacatatggagtttaggttgcactgtcctggaaatggctacctcaaagccaccatggagccagtatgaagggattgctgcagtgtttaagattgggaatagcaaggaacttccaccaataccggattatctttcggagcactgcagggacttcattaggaagtgtctgcaacgtgacccgtctcaacgtccaacggcagttgagcttttgcaacacccgttcatacaaaatggaatttcacttgagaaatctgttactcctaatcatttggagcatttggctgccatatcatgcagaacaaaacccaaggtggccgtgcagacaagaaatgcctccttaggttttgagggtcagacgatttaccaaagaaggggtgtaaaactatcttcaaaacacagtgatattcacatacgaagcaatacatcctgtccagtttctccatgtcggagccccctgctaaaggcgaggtccccccaacacacaagtggcaaaatgtcaccctctcctatttcgagccccagaactacatcaggcacttccacacccctatctggtggtaatggtgcaattccttttaaccacctaaggtatgcaacttacagcagcgagggatttgggaccacatcaagaggcctagatgatcacttctccaactgtcataaagatctgaaccttgggcattttgctgaggcgcatcaagtctcacagggacctagggaaagggtagtatctgaagctgatattctgagccctcaatttagaaagaaacttggaaatgtatttgacttgcgggaaaggttgtccccttctgaacattttactcgtcgtgccttggtggatcatgtggagctaaatccttcaaaccctggactaaagcgtggtaaataactagagtataaaaggcagggttgcatttttttttgaagtttgttgaagtaactggtggtttttggctactatgaccattcaatggctgcaagtgtatcatagtatcagaaagattgataatttctttagaagctaatggttgccaatggatgggatctctgttgtcatcaacgcaattcaagtcaacaaagattctgcctattcctacatggctgagcaagtttccttagcttactaaactggcgtgctaacaagtgacacgtgtcaattgatgggactgactgaatcacggaatgacccaaagcagtaactctccatctgtatacccctcaccccaatatgtacagaaggaatctcaactaggaacctagaatttgcacaggaaaaaaaaacaggtgtgctagccatttggcaatcagtgccagtttatctgttgctccacagttacatatcccacccatggttgaggtggagctgcaaagtccgttggaattatcttgtagcagtttctcggcaagatgagtcgcttcattcactgtacgtcggtgccggctactctgaaacttacatactataagaatctggtcccttactaactgcatgtcgtccgaaccactgcatgaacttgtttgcactgctgctgggattacgaatgttgtaacaaagcacgggttttgctgcttgatggcggaagcaaaatgtagtacagattaggtgatatgcagtcaagtgtttacctgtctgggtgatggcattcgtcaggaaatttctg

SEQ ID NO: 213886 - DNA, 1639 bp, Zea Mays
aaaacatcaagaatggattaaatctagctccctgtttcctcctgttatcctaccgctggtgcctaaatccctgcttcgtggtccagattgctgcagtgtttaagattgggaatagcaaggaacttccaccaataccggattatctttcggagcactgcagggacttcattaggaagtgtctgcaacgtgacccgtctcaacgtccaacggcagttgagcttttgcaacacccgttcatacaaaatggaatttcacttgagaaatctgttactcctaatcatttggagcatttggctgccatatcatgcagaacaaaacccaaggtggccgtgcagacaagaaatgcctccttaggttttgagggtcagacgatttaccaaagaaggggtgtaaaactatcttcaaaacacagtttctccatgtcggagccccctgctaaaggcgaggtccccccaacacacaagtggcaaaatgtcaccctctcctatttcgagccccagaactacatcaggcacttccacacccctatctggtggtaatggtgcaattccttttaaccacctaaggtatgcaacttacagcagcgagggatttgggaccacatcaagaggcctagatgatcacttctccaactgtcataaagatctgaaccttgggcattttgctgaggcgcatcaagtctcacagggacctagggaaagggtagtatctgaagctgatattctgagccctcaatttagaaagaaacttggaaatgtatttgacttgcgggaaaggttgtccccttctgaacattttactcgtcgtgccttggtggatcatgtggagctaaatccttcaaaccctggactaaagcgtggtaaataactagagtataaaaggcagggttgcatttttttttgaagtttgttgaagtaactggtggtttttggctactatgaccattcaatggctgcaagtgtatcatagtatcagaaagattgataatttctttagaagctaatggttgccaatggatgggatctctgttgtcatcaacgcaattcaagtcaacaaagattctgcctattcctacatggctgagcaagtttccttagcttactaaactggcgtgctaacaagtgacacgtgtcaattgatgggactgactgaatcacggaatgacccaaagcagtaactctccatctgtatacccctcaccccaatatgtacagaaggaatctcaactaggaacctagaatttgcacaggaaaaaaaaacaggtgtgctagccatttggcaatcagtgccagtttatctgttgctccacagttacatatcccacccatggttgaggtggagctgcaaagtccgttggaattatcttgtagcagtttctcggcaagatgagtcgcttcattcactgtacgtcggtgccggctactctgaaacttacatactataagaatctggtcccttactaactgcatgtcgtccgaaccactgcatgaacttgtttgcactgctgctgggattacgaatgttgtaacaaagcacgggttttgctgcttgatggcggaagcaaaatgtagtacagattaggtgatatgcagtcaagtgtttacctgtctgggtgatggcattcgtcaggaaatttctg

SEQ ID NO: 213887 - DNA, 1708 bp, Zea Mays
cggccaagatcggcggccgggcgacgtcgccagcaggtgcgtcgacgccgcgaagctcgccggcttcgcgctcgccacctcggcgctcctcgtctcgggcgcgagcgcggagggcacgcccaagaggctgacctacgacgagatccagagcaaaacgtacatggaggtgaagggcacgggcacggcgaaccagtgcccgaccatcgacggcggcgtggagtcgttcccgttcaaggccggcaagtaccagatgaagaagctgtgcctggagccgacgtccttcaccgtcaaggcggagggcatcgccaagaacgccccgcccgagttccagaagaccaagctcatgacccgcctcacgtacacgctggacgagatcgagggcccgctcgaggtcggctccgacggcacgctcaagttcgaggagaaggacggcatcgactacgccgccgtcaccgtgcagctcccggggggcgagcgcgtgccgttcctcttcaccgtcaagcagctcgtcgccaccggcaagcccgagagcttcggcgggcccttcctcgtgcccagctaccgtggctcctccttcctcgaccccaagggccgcggcggctccaccggctacgacaacgccgtcgcgctccccgccgggggcagaggtgacgaggaggagctccagaaggagaacatcaagaacgccgcctcctccaccggcaacatcacgttgagcgtcaccaagagcaacccggagaccggcgaggtcatcggcgtcttcgagagcgtgcagccgtccgacaccgacctcggggccaaggcgcccaaggatgtcaagatccagggggtctggtacgctcagctcgagtgattcgagtgtctaactgctaggtgtccgaccgccgtcatggatcttgggaaggtgtatgtataccatggaaaactttggagagcagaggaggaatcgtgtatgtaatgtacttgttaatgcaaattcgggctgtcgcttttttactccgctaaattcccatagagtcacagcaaaacaatccactaaaaaaaaatctccataactgaagtccacaggcgctttaggatttagtcgtttttttccagccacaactgacttgtatatagtatagtatactagtattcaacacagcaagaactttcctcccgttgatttgatccaacgcttcctccccctttcaaccaggaacaacaaagaagggtgcaacccccatcgctttccctttcaaccaagaacaatcaagaagagaatgcttcagaaccaggaaactatatcagcattgtacagttcagcttaaattgaggtaaccaaacaaacagatagcatcctatgtctacacttgcactcaaggaggggggctaatcatgcacaggaagggggagctgcacatcacctgatcttacacaccagaacgagtcatcctgaaagaaacagtaaccatcgcgacgggcaagcaattaattaagcagaacacctctagtcgtcaactccattcattcgctgtccaagaagaggcttcaagaatttgtttcggggtcacaacgcaagtcttcacgaatccgtatgatcaatggggccagtcgctgttaatccagtgcttacaagaaatagcaaaaccaacagaattagaatcagccagcttgagggaagaagcgctgcaaaaaaaaaataaaattatagtccaagtattgcctt

SEQ ID NO: 213888 - DNA, 3476 bp, Zea Mays
gttcgcactcctcccgtgcccccccatccccagtcgggccagtccccacctcctccccgcttccaccccctcgcccgtcgcttcctcgtcacgagtcgtcgtctccccttcgccgaccgggacgcggaaacgctcgacgcaagcaaaccctagccaccgagctagcggggagcctggagggatgaagagcctgttcaagagtaagatcaggtggcagcaccggtccaacgaccccgcgtccccggcggcgccgccgccgcagacgtcggggccgccgcccgcgagctccccgtcggggacggcgccggcgccggcgctctccgtctctacgccggtctcgccctcgccctcctccgcggcggcgacgcccacgggcgctgctgctgctgcggcggcggctggagcgggaggggaggactacatatcgtcggaagaggagttccagatgcagcttgccatggcgctgtcggcgtcttccaacagcgactgcgcggggggcctggacggggagcagatcaggaaggccaagctcatgagcctcgatcgcttcgccgcccaccgggacgagacccacaccgcggagttcctctcccgccgatattgggattataactttcttgattaccatgagaaagttattgatggcttctatgacatctttggctcctctattgaatcctctaggcaggggaagatgccatcattagcagatctccaaacaggcataggggacctaggctttgaagtcattgtagtaaaccgagccattgatagtaccttgcaggagatggagcaagtggcacagtgcatcctgttggacttccctgttgccaatattgcactcttagtgcaaagaatagctgagcttgttacagataatatgggtggacctgtcaaagatgctaacgacatgctcacaaggtggctggagaagagtactgagctgagaacatcgctacaaacaagtttgttgcctattggttgcatcaagatagggttatcacgtcaccgtgccctacttttcaagatccttgccgatagtgttgggattccatgcaaacttgtcaaagggagcaattatactggtggtgatgatgacgatgctataaacataattaagatggacaatgaaagcagatatcttaagttggaaaggcaattcgttaaattctaatcgaaaactcggcctgaatcgaacagctggatcatcaagtactgttgatgctaatgtggatcctactgtattgccacttgaacctaaaggtggccaactgcctttgttcagcagtggtgattggatgtcagacattgattctggatatgaggcagcagaaattgcagcttctactcaaacctcttcgggtgtcacaccatctgtttctgctggaagtgtttttggcagttcatggatgctggttaatcatgaccaatcagatggaccatcaacttctgctggtacatcatcgcagcagaaagttgtacctcaaagcgagcatcagcggaatttaaaccgccttccagatctgcaggaaattccagagtcaaaatacctttttgctgatcttgttccttctggggataataagtctaagaaaacttcagtaccattcaaaggaccagatcataggaacaatgagttgcaaaagcgcagagagaacattgtccctaatgctggaagaccacagcagcggttagttatgaagaattggtctccttacaatgatgtttccaacaacaaacagtacaattatgtcgaggattcgtttgctcgtagaaatgttggtaataatgctgcatcatcatcatcccagatgccacgaccagccgtaagatctaaccttaattctggattgcataatgatgcatcatatcataattatgatagcattatggctggtacctctgccatgaagattacatctacagctgagaccgggaaggttcctgaaagggttctgcgtggtgatttggacaagggtcaaacaaattatagattggaggatcaacatgtcatagttcaaccaccacagggaagacttccatggggtaatcctgcagaaggaagagttccaatgaatagagttcagagtcaagcaaaacaacacttggaaaacatggatgcaaagcaagaccataagaaattgctccctgatccaaaaaaatctccccttgacagattcatggacacatcattgccttcaagaaacatggacatgaggtcacagaggcttgacttcgatgatgtctctgagtgcgaaattccttgggaagatcttgtgattggtgaaaggattggcttaggttcatatggagaggtttaccgtgctgactggaatggaaccgaagtagctgtaaaaaaattcttggatcaagatttttatggcgatgctctggatgagtttaggagtgaagttcgaattatgcgtcggctgcgccatccaaatattgttctctttatgggtgctgttacacgccctccgaacttatctattgtatctgaatatcttccaaggggaagcttgtataagatccttcaccgccctaattgcctaattgatgaaaagcggaggatcaagatggcccttgatgtggccaaaggtatgaattgcctgcacactagcatgcctacaattgttcatcgagatctgaaatctccaaacttgctggttgacaataattggaatgttaaggtttgtgactttggactttcgcggttgaagcacagtacatttttgtcatccaaatctacagctggaacacctgagtggatggcacctgaggttctgcggaatgaacaatcgaatgaaaagtgagtgattttcagatgcattctagctcccatcttattcgggaatcaggatattcgggttattgagcatttccgtggagcgtggatataggattccatgttcctgtcgaatttttgttcttgtggttttgtgctcagaccaaagatttttttgttttctcgtagttggatctgactgcttagtaatttcatgttgtgggatcatgcatctatctagtcaatcttttacaaatattttgtactccatatgcaagactttgttactaagaccgtgtcaagcaggttacctatatggtcacccaaaacactattttgcattatagactgcattgttcgcagagtggaatttgaaataggagatgagatgagagataggatgagtaagctggagatagtgtaaatgtgtaataacccggtaaaacacagttctcttctctctcccttctactctgccatctctctgtctctcctccgtcaccccatcctaacaacacgaacccaagtagcatatatggcgcacagcttgacacatacatgcttgtcacatgtgactatgtgagccttgttcctgttacacttgccagcgatccaacactcgccttcggcaatgaattcttacaagccgccttctccaggagatacacttaccttccttgccaacttcccc

SEQ ID NO: 213889 - DNA, 3505 bp, Zea Mays
cccatccccagtcgggccagtccccacctcctccccgcttccaccccctcgcccgtcgcttcctcgtcacgagtcgtcgtctccccttcgccgaccgggacgcggaaacgctcgacgcaagcaaaccctagccaccgagctagcggggagcctggagggatgaagagcctgttcaagagtaagatcaggtggcagcaccggtccaacgaccccgcgtccccggcggcgccgccgccgcagacgtcggggccgccgcccgcgagctccccgtcggggacggcgccggcgccggcgctctccgtctctacgccggtctcgccctcgccctcctccgcggcggcgacgcccacgggcgctgctgctgctgcggcggcggctggagcgggaggggaggactacatatcgtcggaagaggagttccagatgcagcttgccatggcgctgtcggcgtcttccaacagcgactgcgcggggggcctggacggggagcagatcaggaaggccaagctcatgagcctcgatcgcttcgccgcccaccgggacgagacccacaccgcggagttcctctcccgccgatattgggattataactttcttgattaccatgagaaagttattgatggcttctatgacatctttggctcctctattgaatcctctaggcaggggaagatgccatcattagcagatctccaaacaggcataggggacctaggctttgaagtcattgtagtaaaccgagccattgatagtaccttgcaggagatggagcaagtggcacagtgcatcctgttggacttccctgttgccaatattgcactcttagtgcaaagaatagctgagcttgttacagataatatgggtggacctgtcaaagatgctaacgacatgctcacaaggtggctggagaagagtactgagctgagaacatcgctacaaacaagtttgttgcctattggttgcatcaagatagggttatcacgtcaccgtgccctacttttcaagatccttgccgatagtgttgggattccatgcaaacttgtcaaagggagcaattatactggtggtgatgatgacgatgctataaacataattaagatggacaatgaaagggagtttttggttgatctgatggctgctcctggtgctcttattccagcagatatcttaagttggaaaggcaattcgttaaattctaatcgaaaactcggcctgaatcgaacagctggatcatcaagtactgttgatgctaatgtggatcctactgtattgccacttgaacctaaaggtggccaactgcctttgttcagcagtggtgattggatgtcagacattgattctggatatgaggcagcagaaattgcagcttctactcaaacctcttcgggtgtcacaccatctgtttctgctggaagtgtttttggcagttcatggatgctggttaatcatgaccaatcagatggaccatcaacttctgctggtacatcatcgcagcagaaagttgtacctcaaagcgagcatcagcggaatttaaaccgccttccagatctgcaggaaattccagagtcaaaatacctttttgctgatcttgttccttctggggataataagtctaagaaaacttcagtaccattcaaaggaccagatcataggaacaatgagttgcaaaagcgcagagagaacattgtccctaatgctggaagaccacagcagcggttagttatgaagaattggtctccttacaatgatgtttccaacaacaaacagtacaattatgtcgaggattcgtttgctcgtagaaatgttggtaataatgctgcatcatcatcatcccagatgccacgaccagccgtaagatctaaccttaattctggattgcataatgatgcatcatatcataattatgatagcattatggctggtacctctgccatgaagattacatctacagctgagaccgggaaggttcctgaaagggttctgcgtggtgatttggacaagggtcaaacaaattatagattggaggatcaacatgtcatagttcaaccaccacagggaagacttccatggggtaatcctgcagaaggaagagttccaatgaatagagttcagagtcaagcaaaacaacacttggaaaacatggatgcaaagcaagaccataagaaattgctccctgatccaaaaaaatctccccttgacagattcatggacacatcattgccttcaagaaacatggacatgaggtcacagaggcttgacttcgatgatgtctctgagtgcgaaattccttgggaagatcttgtgattggtgaaaggattggcttaggttcatatggagaggtttaccgtgctgactggaatggaaccgaagtagctgtaaaaaaattcttggatcaagatttttatggcgatgctctggatgagtttaggagtgaagtaggttcgaattatgcgtcggctgcgccatccaaatattgttctctttatgggtgctgttacacgccctccgaacttatctattgtatctgaatatcttccaaggggaagcttgtataagatccttcaccgccctaattgcctaattgatgaaaagcggaggatcaagatggcccttgatgtggccaaaggtatgaattgcctgcacactagcatgcctacaattgttcatcgagatctgaaatctccaaacttgctggttgacaataattggaatgttaaggtttgtgactttggactttcgcggttgaagcacagtacatttttgtcatccaaatctacagctggaacacctgagtggatggcacctgaggttctgcggaatgaacaatcgaatgaaaagtgagtgattttcagatgcattctagctcccatcttattcgggaatcaggatattcgggttattgagcatttccgtggagcgtggatataggattccatgttcctgtcgaatttttgttcttgtggttttgtgctcagaccaaagatttttttgttttctcgtagttggatctgactgcttagtaatttcatgttgtgggatcatgcatctatctagtcaatcttttacaaatattttgtactccatatgcaagactttgttactaagaccgtgtcaagcaggttacctatatggtcacccaaaacactattttgcattatagactgcattgttcgcagagtggaatttgaaataggagatgagatgagagataggatgagtaagctggagatagtgtaaatgtgtaataacccggtaaaacacagttctcttctctctcccttctactctgccatctctctgtctctcctccgtcaccccatcctaacaacacgaacccaagtagcatatatggcgcacagcttgacacatacatgcttgtcacatgtgactatgtgagccttgttcctgttacacttgccagcgatccaacactcgccttcggcaatgaattcttacaagccgccttctccaggagatacacttaccttccttgccaacttcccc

SEQ ID NO: 213890 - DNA, 1006 bp, Zea Mays
ggaatgtgtgaattaaatatcccactctagacaatacagaaggggaagcttgtataagatccttcaccgccctaattgcctaattgatgaaaagcggaggatcaagatggcccttgatgtggccaaaggtatgaattgcctgcacactagcatgcctacaattgttcatcgagatctgaaatctccaaacttgctggttgacaataattggaatgttaaggtttgtgactttggactttcgcggttgaagcacagtacatttttgtcatccaaatctacagctggaacacctgagtggatggcacctgaggttctgcggaatgaacaatcgaatgaaaagtgagtgattttcagatgcattctagctcccatcttattcgggaatcaggatattcgggttattgagcatttccgtggagcgtggatataggattccatgttcctgtcgaatttttgttcttgtggttttgtgctcagaccaaagatttttttgttttctcgtagttggatctgactgcttagtaatttcatgttgtgggatcatgcatctatctagtcaatcttttacaaatattttgtactccatatgcaagactttgttactaagaccgtgtcaagcaggttacctatatggtcacccaaaacactattttgcattatagactgcattgttcgcagagtggaatttgaaataggagatgagatgagagataggatgagtaagctggagatagtgtaaatgtgtaataacccggtaaaacacagttctcttctctctcccttctactctgccatctctctgtctctcctccgtcaccccatcctaacaacacgaacccaagtagcatatatggcgcacagcttgacacatacatgcttgtcacatgtgactatgtgagccttgttcctgttacacttgccagcgatccaacactcgccttcggcaatgaattcttacaagccgccttctccaggagatacacttaccttccttgccaacttcccc

SEQ ID NO: 213891 - DNA, 1678 bp, Zea Mays
gatgctggtgcgcagcgtcgtgaacgagtggttgccgcccgagtgcgcgatctggtcctctccggcttcggctacctgcgctcgcgcacgtcgtccgaccacaccatcatcgtcgagaagaagaacgacgggttcgctaacaactacgtctactgcgctgtgaagacttacctcgccacgcgcatgaacaccgacatccagcagcgcctgcgcgtcagcagcatggacgaggacgacaagatgatggtcagcatggatgagggcgacgagatgctcgatgtttatcaaggcacggagttcaagtggtgccttgtctgcaaagacaactcaaatgactccctcaacagcagccagaacgagtcccacttcttcgagctgaccttcaacaagaagcacaaggacaaagccctcagatcgtacctcccgttcattttggccacagccaaggccattaaagcccaggagagaaccctcatgatacacatgactgagtacggcaattggtccccgattgaactccaccacccatctacattcgacacgcttgccatggacaagaagctgaagcagtccatcatcgatgacctggacaggttcatgaagaggaaagattactacaggaagattggcaaggcatggaagcggggttaccttctgtatggtccacctgggactgggaagtcaagcctaatcgcagccatggccaaccatctcaggtttgacatatatgatctcgagctaactgcggtcacatccaactcagacctcaggaggcttcttgttaacatggacaaccgatccattctagtcattgaagatattgactgcaccatcgaactcaaacaacggcaggaggccgagggacatgatgagtcagattctacagaacaaaacaagggggaaggcaaggtaacgctgtctggactgctcaactttgttgatgggctgtggtcaacaagtggggaagaaaggatcatcgtcttcacaaccaattacaaggagcggcttgacccggcactgctgcggcctggaaggatggacatgcacatccacatgggaggttgctgaggttctgatgaggaacgatgacactgatgttgtgctccatgatcttgtcgatttcctgaagtcaaaaatcaaggatgccaatgagatcaagactgaacacaaggaagcagacaaccagctagatgagaagaaaaatgacaaaaaataaaacccagtgcatttccttccaaaaaagaagatgaaagctaatggcggtttaagactgagcacaaggaagcaaataaccagctggatgaggagaaaggcaacgagatagtgagaaaaaaaaacagtgcaattccttctagtagaggaaagaagatgaaagcaacacatcgtatttcatatagatagatcctacaggggatccattggcatatgtgagtgtttgcatattgttaacattatgtttttggtgatcaatgaggtgtaatggtacttgcagtgcatctgcagaattctgttagtgcttgtttaggagcatgtatgcagaactacagatatgtaaaatcccattacaacttacatgaaactgcaaacatgccattgcatgcaaatggcaaccttggaaagtgtaaagtagtacttatagtcatttccggcggatgtcatgcatttcacacgacgtcca

SEQ ID NO: 213892 - DNA, 1124 bp, Zea Mays
cgcagcgggtatcgtcgtcggctcgtcgccggcggtgccaaattcccctttccccctcggcgtcgacgggccgaacccccgcgggtgctgtctgctgtctgagcaggagcagaagcaggctgcgggcggggcactgccccgtcgtcctcgtcccgccgcgacgtgtatgcgacgcccgagatctgtcccacgatttcgaggaaatcgacaagatcatggagcacaacatcagtgtcatcgttcctcatcagaacctcagcaacctctgcgggcgtaaccgtcacctccttgatcagtttctcaatctctggatacgtgtcatggtactcgatggagtggtagttgttggcaaggatttggaaagactctggggtgcaataccccatgtggatgtgcatgtccatccttccaggccgcagcagtgccgggtcaagccgctccttgtaattggttgtgaagacgatgatcctttcttccccacttgttgaccacagcccatcaacaaagttgagcagtccagacagcgttacctgttcagaaaatccaaattatttgtcaagataactgaggaagtggtggaatcgagaagatagtactcaccttgccttcccccttgttttgttctgtagaatctgactcatcatgtccctcggcctcctgccgttgtttgagttcgatggtgcagtcaatatcttcaatgactagaatggatcggttgtccatgttaacaagaagcctcctgaggtctgagttggatgtgaccgcagttagctcgagatcatatatgtcaaacctgagatggttggccatggctgcgattaggcttgacttcccagtcccaggtggaccatacagaaggtcatcgatgatggactgcttcagcttcttgtccatggcaagcgtgtcgaatgtagatgggtggtggagttcaatcggggaccaattgccgtactcagtcatgtgtatcatgagggttctctcctgggctttaatggccttggctgtggccaaaatgaacgggaggcgctgctggatgtcggtgttcatgcgcgtggcgaggtagccgaagccggagaggaccagatcgcgcactcgggcggcaaccactcgttcacgacgctgcg

SEQ ID NO: 213893 - DNA, 1272 bp, Zea Mays
aaaaaagtacgcgagcggagcacagctcgcagcccgtagcccgcagcgggtatcgtcgtcggctcgtcgccggcggtgccaaattcccctttccccctcggcgtcgacgggccgaacccccgcgggtgctgtctgctgtctgagcaggagcagaagcaggctgcgggcggggcactgccccgtcgtcctcgtcccgccgcgacgtgtatgcgacgcccgagatctgtcccacgatttcgaggaaatcgacaagatcatggagcacaacatcagtgtcatcgttcctcatcagaacctcagcaacctctgcgggcgtaaccgtcacctccttgatcagtttctcaatctctggatacgtgtcatggtactcgatggagtggtagttgttggcaaggatttggaaagactctggggtgcaataccccatgtggatgtgcatgtccatccttccaggccgcagcagtgccgggtcaagccgctccttgtaattggttgtgaagacgatgatcctttcttccccacttgttgaccacagcccatcaacaaagttgagcagtccagacagcgttacctgttcagaaaatccaaattatttgtcaagataactgaggaagtggtggaatcgagaagatagtactcaccttgccttcccccttgttttgttctgtagaatctgactcatcatgtccctcggcctcctgccgttgtttgagttcgatggtgcagtcaatatcttcaatgactagaatggatcggttgtccatgttaacaagaagcctcctgaggtctgagttggatgtgaccgcagttagctcgagatcatatatgtcaaacctgagatggttggccatggctgcgattaggcttgacttcccagtcccaggtggaccatacagaaggtcatcgatgatggactgcttcagcttcttgtccatggcaagcgtgtcgaatgtagatgggtggtggagttcaatcggggaccaattgccgtactcagtcatgtgtatcatgagggttctctcctgggctttaatggccttggctgtggccaaaatgaacgggagacaaggcaccacttgaactccgtgccttgataaacatcgagcatctcgtcgccctcatccatgctgaccatcatcttgtcgtcctcgtccatgctgctgacgcgcaggcgctgctggatgtcggtgttcatgcgcgtggcgaggtagccgaagccggagaggaccagatcgcgcactcgggcggcaaccactcgttcacgacgctgcg

SEQ ID NO: 213894 - DNA, 3845 bp, Zea Mays
gtagaagctttcgacgaattggcgttggatggtcatttttccagcactcgatatccgagtaaagaatgttgcagggacctattccttagagcataaaggagaaagcgatctttttagccagttatttgatctcctgcaattggacatacataatgatgatggtcttcgtagggagcttgcgtcatgcacaggcgcgatacagacatgtctcagccaacatatgtccaaggaggaagaacaggtctttccattgcttacaaagaaattttcgtgtgaagaacaagctgatttagtgtggcaattcctatgcaacattcctgtcaatatggtggcagagttccttccatggctttcaacttctgtcacatctgatgagcaccaagatatccgtaactgcttatgcaaagtagttcctgatgagaaacttctccaacaggttgtattcacatggatggaagggaaagcaacaagagaagtggcagagagcattgctgctggtatttcagcaagaaataatagtgttgaggatgtcccagaccaagggaagattcatatttgtttacatcacaattctaaacttgggagtaaaaactgtggagaatctaatggtcctcaggctgacaagcatcctatagatgatattttatactggcacaatgctattcgtatggagttacgtgatataaaagaggagacaagaagggtgcagcaatctggggatttttctgatatatcagccttcaatgagaggcttcagttcattgcagatgtatgcatctaccacagtatcgctgaggatcaggttgtttttcctgcagtcgatagtgagctgtcctttgtgcaggagcatgctgaagaagaatgcaggtttaacaattttaggtgtttaattcagcaaatccaaatagcaggagccgaatcaactgcattggacttctactcaaaactgtgttcacatgctgataaaatattggaggcaatcgaaaaacacttctgcaatgaagaaaccaaggtgcttcctcaagctaggatgctcttctctcttgagaagcaaagggaactttcatacaaaagtttgtgtgttatgccattgaaattattggaacgtgttttgccgtggttggtgtcgaagctgagtgatgttcaggcaacttcatttcttcagaatatacgcttggcagcatcaccatctgaaactgcactggtcactcttatctctggttgggcatgcaaaggccgggataaatccaaagatggagaatatttatgcttaacatcaggtgcggcgagatgtctatcagatgatgtagatgatctgggaaaatgccgatcattctgtccatgtgcttcacccaacagctcagatctttctctgcagctacatactgagaatgattctaggccaggcaagcgaggaaaagatgcagtatctttttctcatactaatggaatctactgctctcaaactgctgacattgaagcaattccatgtagcaaaaaaccatgttgtattcctggtttgagagtagagagtagcaatcttggtattggttccttggcttctgcaaagtcttttcactctttatcatacaattcaactgctccttcactatattcgagcctcttttcatgggagacagatacatcattgtcttgttcggacagcatttcaaggccaatcgatacaatattcaaatttcataaggcaattcgcaaggatttagaatacttagatgttgaatctggcaagctcattgatggcaacgagtcctgccttcgccaattcattggaaggttccgtttgttatggggtctttacagggctcacagcaatgctgaggatgaaattgtgtttccagcattggaatccagagaaacattacacaatgtgagccattcatatactcttgaccacaagcaggaagaacagttgtttgaagatatctcaaatgttctctttcaactttcacaactacatgatagccagggccatgcccagactgaagttaatgaagtaaagaaaagctgtttccattcatctaatgatgtcgattttgctagaaagtataatgaacttgccacaaaacttcagggcatgtgcaagtctatccgggtcgccttgactaatcatgtccatagagaagaacttgaattatggccgttgtttgataaacatttttctgtggaggagcaagataaacttgtaggtcgtataattggttcaacaggtgctgaggttctccaatctatgttaccctgggttacatcagttctcactcaagaggagcagaacaaaatgcttgatatgtggaagcaagctacaaaaaatacaatgtttggggaatggctaaacgagtggtggaagggagctggaacagcatctgattcttcagcagaggcgtcctctgctccagaagatagtcatttacaagataagcttgaacaaaatgaccagatgttcaagcctggctggaaggacatatttcgaatgaatcagagtgaacttgaggctgaggtgcgaaaggtttcacgagattctacacttgacccaaggcggaaggcgtatctaattcaaaatctcatgacaagccgctggatagctgcacagcagaagttaccagaaccaaattctgaagaatgtaatcacgatgccagtatacctggatgtgcaccttcataccgagaccaggagaaacaaatttatggttgtgaacactacaaacggaactgcaaacttgttgctgcatgctgcaacaagctcttcacatgcaggttctgccatgataaagttagtgaccatacgatggaaaggaaagcaacacaggagatgatgtgcatggtatgcctaaagattcaacctgttggttcgttctgccaaaccccatcttgcaacagactatcgatggcaaagtactactgtaacatctgtaaattttttgatgatgaaaggactgtgtaccactgtccgttttgtaatttgtgtcgtcttgggaaaggtcttggtgttgatttcttccattgcatgaaatgcaactgctgccttggaatgaaattaactgagcacaaatgtcgggaaaaagggctagagacaaattgtccaatatgctgtgacttcctatttacatcaagtgccgcagtcagagccctcccttgtggccacttcatgcattcagcttgctttcaggcatacacttgtagtcactacacttgccctatctgctgcaaatccttgggagatatggcggtttattttggcatgcttgatgccttgttggcggctgaagagcttccggaggaataccgtgatcggtgtcaggatatactttgcaatgactgtgagaggaaaggtagatgtcgatttcattggttataccacaaatgcggctcctgtgggtcgtacaacacccgagttatcaagactgccacagcagattgctctacaccaaactagttggagggaacatttgtgcttaattagtcactgtattctttgtttctctttgtacatatcttctagagagaaggaaaaagagaagttgtgtagcatagttataccataatttcattcgtagccatttcagttttgtaagtgtagcagtttacaatttactaggtctagtgcgttatactgacaaaattgacggttctgatggaagaacataacctgaggaaattggcttgttagaagtactcgtgagcatgttctgcaatttggcggccacttagactatcttcaattatatcttctatattccttctctatatccctcttttatggactcttaaaagatttctttctttatatctatctcttctatacgttaattaacttacaagagatatat

SEQ ID NO: 213895 - DNA, 4986 bp, Zea Mays
gatatgaataattttttaaaagaatcatccgacagtttatttaaataattatctaaatatagacatcttcttctgttcctgtgttatcgttagacaaagatagaaaaagtaaataacttttcagagtgcaaataagatatagaaaatctattggatgcgagacctacctagccaaccgcttcaaatcaaagttcaaacctacaacaagcagtaaaataaccacacagacgagacggcaacacacacattgagagctctaccgagcgaaagagacccaggaaaagccaacgggacgccaaatccattcctcctccctcgtccacaggccgtgagggccgaacccgaagccagccgaggaagccaggcgacaggcgacgccaagtcgagaagagcctaggtggtcgctcgcgggctgcgagggagagccgtggcggagtcgccgtcgtcgcccacggaggaggacacggccgccgccgccgcagtggcatggcgacgccgacgcccatgcctggaggcgaggggacgctcgcagcggtgatgccgcggtccccgtctccgacgccggcggaggcggggacctcggcgaccgagacgcccgtgctgatattcctttactttcacaaggcgatccgcgcggagctcgaggcgctgcacggcgccgccgtgctcctggccaccgagcgcaccggcgatgtagagatgctcgccaagcgctgccgcttcttcttcaacatttacaaacaccactgcgacgccgaggatgcggtcatttttccagcactcgatatccgagtaaagaatgttgcagggacctattccttagagcataaaggagaaagcgatctttttagccagttatttgatctcctgcaattggacatacataatgatgatggtcttcgtagggagcttgcgtcatgcacaggcgcgatacagacatgtctcagccaacatatgtccaaggaggaagaacaggtctttccattgcttacaaagaaattttcgtgtgaagaacaagctgatttagtgtggcaattcctatgcaacattcctgtcaatatggtggcagagttccttccatggctttcaacttctgtcacatctgatgagcaccaagatatccgtaactgcttatgcaaagtagttcctgatgagaaacttctccaacaggttgtattcacatggatggaagggaaagcaacaagagaagtggcagagagcattgctgctggtatttcagcaagaaataatagtgttgaggatgtcccagaccaagggaagattcatatttgtttacatcacaattctaaacttgggagtaaaaactgtggagaatctaatggtcctcaggctgacaagcatcctatagatgatattttatactggcacaatgctattcgtatggagttacgtgatataaaagaggagacaagaagggtgcagcaatctggggatttttctgatatatcagccttcaatgagaggcttcagttcattgcagatgtatgcatctaccacagtatcgctgaggatcaggttgtttttcctgcagtcgatagtgagctgtcctttgtgcaggagcatgctgaagaagaatgcaggtttaacaattttaggtgtttaattcagcaaatccaaatagcaggagccgaatcaactgcattggacttctactcaaaactgtgttcacatgctgataaaatattggaggcaatcgaaaaacacttctgcaatgaagaaaccaaggtgcttcctcaagctaggatgctcttctctcttgagaagcaaagggaactttcatacaaaagtttgtgtgttatgccattgaaattattggaacgtgttttgccgtggttggtgtcgaagctgagtgatgttcaggcaacttcatttcttcagaatatacgcttggcagcatcaccatctgaaactgcactggtcactcttatctctggttgggcatgcaaaggccgggataaatccaaagatggagaatatttatgcttaacatcaggtgcggcgagatgtctatcagatgatgtagatgatctgggaaaatgccgatcattctgtccatgtgcttcacccaacagctcagatctttctctgcagctacatactgagaatgattctaggccaggcaagcgaggaaaagatgcagtatctttttctcatactaatggaatctactgctctcaaactgctgacattgaagcaattccatgtagcaaaaaaccatgttgtattcctggtttgagagtagagagtagcaatcttggtattggttccttggcttctgcaaagtcttttcactctttatcatacaattcaactgctccttcactatattcgagcctcttttcatgggagacagatacatcattgtcttgttcggacagcatttcaaggccaatcgatacaatattcaaatttcataaggcaattcgcaaggatttagaatacttagatgttgaatctggcaagctcattgatggcaacgagtcctgccttcgccaattcattggaaggttccgtttgttatggggtctttacagggctcacagcaatgctgaggatgaaattgtgtttccagcattggaatccagagaaacattacacaatgtgagccattcatatactcttgaccacaagcaggaagaacagttgtttgaagatatctcaaatgttctctttcaactttcacaactacatgatagccagggccatgcccagactgaagttaatgaagtaaagaaaagctgtttccattcatctaatgatgtcgattttgctagaaagtataatgaacttgccacaaaacttcagggcatgtgcaagtctatccgggtcgccttgactaatcatgtccatagagaagaacttgaattatggccgttgtttgataaacatttttctgtggaggagcaagataaacttgtaggtcgtataattggttcaacaggtgctgaggttctccaatctatgttaccctgggttacatcagttctcactcaagaggagcagaacaaaatgcttgatatgtggaagcaagctacaaaaaatacaatgtttggggaatggctaaacgagtggtggaagggagctggaacagcatctgattcttcagcagaggcgtcctctgctccagaagatagtcatttacaagataagcttgaacaaaatgaccagatgttcaagcctggctggaaggacatatttcgaatgaatcagagtgaacttgaggctgaggtgcgaaaggtttcacgagattctacacttgacccaaggcggaaggcgtatctaattcaaaatctcatgacaagccgctggatagctgcacagcagaagttaccagaaccaaattctgaagaatgtaatcacgatgccagtatacctggatgtgcaccttcataccgagaccaggagaaacaaatttatggttgtgaacactacaaacggaactgcaaacttgttgctgcatgctgcaacaagctcttcacatgcaggttctgccatgataaagttagtgaccatacgatggaaaggtaaattctatggcctgtaagtcaattatttttatcttgtttgtgccagaggtactgtgctttgggttcttttcctttaaacctcgattctttctccaaacgagtgtactatgataaaaaagatggaaggtgtgtaagaagtagagaaccttctgttaaaatgttccccctggtttgctgctcttcattgtatatggttgcaacttcctgttcatgtgtggttgtagtgtgggcttgcaattcagtccaaccttttgaatgtattatctttagttctcttgtaaacctcttaacactgttgaaaacaaaatttgttacagtccttgtgtcgatgtgcattttctcttctatacttttgcaacacattttagaaagtataacgagccaactcatcttgatgtctcaaggaaagcaacacaggagatgatgtgcatggtatgcctaaagattcaacctgttggttcgttctgccaaaccccatcttgcaacagactatcgatggcaaagtactactgtaacatctgtaaattttttgatgatgaaaggactgtgtaccactgtccgttttgtaatttgtgtcgtcttgggaaaggtcttggtgttgatttcttccattgcatgaaatgcaactgctgccttggaatgaaattaactgagcacaaatgtcgggaaaaagggctagagacaaattgtccaatatgctgtgacttcctatttacatcaagtgccgcagtcagagccctcccttgtggccacttcatgcattcagcttgctttcaggcatacacttgtagtcactacacttgccctatctgctgcaaatccttgggagatatggcggtttattttggcatgcttgatgccttgttggcggctgaagagcttccggaggaataccgtgatcggtgtcaggatatactttgcaatgactgtgagaggaaaggtagatgtcgatttcattggttataccacaaatgcggctcctgtgggtcgtacaacacccgagttatcaagactgccacagcagattgctctacaccaaactagttggagggaacatttgtgcttaattagtcactgtattctttgtttctctttgtacatatcttctagagagaaggaaaaagagaagttgtgtagcatagttataccataatttcattcgtagccatttcagttttgtaagtgtagcagtttacaatttactaggtctagtgcgttatactgacaaaattgacggttctgatggaagaacataacctgaggaaattggcttgttagaagtactcgtgagcatgttctgcaatttggcggccacttagactatcttcaattatatcttctatattccttctctatatccctcttttatggactcttaaaagatttctttctttatatctatctcttctatacgttaattaacttacaagagatatat

SEQ ID NO: 213896 - DNA, 1790 bp, Zea Mays
attctgctacctatagtggttattgcttgctgcgcagccctggtaacttggatgacaaggttcctgagagggttctgtatgaaattcttattcagatctctgggcaagacaaaccctcattaaatggcaatatccctgtaactcctaggttaaactctgtaccacagccaaagcctcatcaacctatgaggtctagtgatactcctttgccacagcatgcagcagtgaatggcaggaatgccgggtatggtatcccaccaaatcattcatacgacacgcacactcaaggtgaggaaaactctggtcattttggaatccaagttaatgttgaattatgtgttaagtctcacaactccccttttgaccagcactgtcgagtgggttaccgaatagaggactaagcaacggtacatatgaatatagtaggcgtgtatttggttctgttctgaatgatgttagccgtcgagctaccagggaaccaatcccgtacccgtcctactagcatgttgagccccggtgactgtgactctgtgctgacagaaaatatttctgaagatgttgtctgttgtgtcagccacctgtaatatctctgtactcaccatttcatgcctgtaaatatgggttatggtggtaggacatatgcttgtttttttggttctgcttcgcattgtagtgagacttgtccctgcttgttaggtccttctcatcccctagtgtgaaggccatgcctccactagtatggctgcactaggaaataccattcctagttacatgaatgggtggcaatatgctggcaattgtgttttaacattagtgccattagctatttcaatgttacagcagggcgtgtttgtgtttgcgatattagtatttggtggattttgtgcttctcatcatgtatctgggacatctgaaggagaaacattgttttaaaagaaaattgtgaaataagtcccacaatttatgatgtttgagtatatgaatatttggttacatatgactttttgtttgcttgtgctgtatgtctgtcgcagcacaagcattcgtgatccgcccaattggctctcagggtgatcaagttataccgtttctgttacctggctgctgtccggtatttgcaagttgacctgttgtcatttccaagttcattagcgtggaagctggtgctgctggattttcacttaactggtgacttatcttgcattgtgataatgccacttcatcctagtcagaaaccagctggctttctgagtggcaaaccagcaggataccacaaatccaccatattgttggtcaagatgggttagatgcacatttctcatcgggttgtatctggaagccccatgactgcgattatgatgagctcatatatctactgaccgttgtatctgtctgtgatttgagctcgtgtacctgcagtaggccgataaaagaatggtaagatatcaatacttctgaagttcgaacttggccaagtcccgttgggatccaaattacaggttgtcggagttcgtaatagacgctcagactatgaaatcaatccgggacagaaaatatgatagtgcaccatttaccattacgatccattttgtattgtgtaagtaatgaacattcatggtgatctgaaccttctgtcagtttttcttttcacagcacacagcagtgcctcaatttgtgtcactacagaattgaaccatcgtctcgagacaataagacaataagggagtgtttggtttaaggaatcactacatttaaaatgaatgagatggtgcatcatgattttattcatc

SEQ ID NO: 213897 - DNA, 1977 bp, Zea Mays
tggcaaaatagtaattttcccgctcgcggcttgccactctgcttccgtgcttggcttgctcgctttcctttcccgtctcgactctcgagtctcgactcctcgcattcgccgctgcgtcaacgtgtcttccttcccgcggtctctccgccgcctcccagatccggcggccatggcaaggaacccgggctgcaccgtcttcataggtaggtcgtgttgtagacctacacatacctcgtgacaaggaaactagccgaccaaaaggctatgcttttgctgagtatgaaacagaggagattgcccaatatgctgttaagctattttctggtcttgttcgacttcataataaaacgcttagatttgcgatctctgggcaagacaaaccctcattaaatggcaatatccctgtaactcctaggttaaactctgtaccacagccaaagcctcatcaacctatgaggtctagtgatactcctttgccacagcatgcagcagtgaatggcaggaatgccgggtatggtatcccaccaaatcattcatacgacacgcacactcaagcactgtcgagtgggttaccgaatagaggactaagcaacggtacatatgaatatagtaggcgtgtatttggttctgttctgaatgatgttagccgtcgagctaccagggaaccaatcccgtacccgtcctactagcatgttgagccccggtgactgtgactctgtgctgacagaaaatatttctgaagatgttgtctgttgtgtcagccacctgtaatatctctgtactcaccatttcatgcctgtaaatatgggttatggtggtaggacatatgcttgtttttttggttctgcttcgcattgtagtgagacttgtccctgcttgttaggtccttctcatcccctagtgtgaaggccatgcctccactagtatggctgcactaggaaataccattcctagttacatgaatgggtggcaatatgctggcaattgtgttttaacattagtgccattagctatttcaatgttacagcagggcgtgtttgtgtttgcgatattagtatttggtggattttgtgcttctcatcatgtatctgggacatctgaaggagaaacattgttttaaaagaaaattgtgaaataagtcccacaatttatgatgtttgagtatatgaatatttggttacatatgactttttgtttgcttgtgctgtatgtctgtcgcagcacaagcattcgtgatccgcccaattggctctcagggtgatcaagttataccgtttctgttacctggctgctgtccggtatttgcaagttgacctgttgtcatttccaagttcattagcgtggaagctggtgctgctggattttcacttaactggtgacttatcttgcattgtgataatgccacttcatcctagtcagaaaccagctggctttctgagtggcaaaccagcaggataccacaaatccaccatattgttggtcaagatgggttagatgcacatttctcatcgggttgtatctggaagccccatgactgcgattatgatgagctcatatatctactgaccgttgtatctgtctgtgatttgagctcgtgtacctgcagtaggccgataaaagaatggtaagatatcaatacttctgaagttcgaacttggccaagtcccgttgggatccaaattacaggttgtcggagttcgtaatagacgctcagactatgaaatcaatccgggacagaaaatatgatagtgcaccatttaccattacgatccattttgtattgtgtaagtaatgaacattcatggtgatctgaaccttctgtcagtttttcttttcacagcacacagcagtgcctcaatttgtgtcactacagaattgaaccatcgtctcgagacaataagacaataagggagtgtttggtttaaggaatcactacatttaaaatgaatgagatggtgcatcatgattttattcatc

SEQ ID NO: 213898 - DNA, 439 bp, Zea Mays
atattaaggtccggcaaaaatgttgccctgggttgtaaagaaggcttctgctgcaccattggatggatcggcactgaactatcagtagctctgctttgaaccatgatagcatcggagttccttttactgctgaacagccagtcttcatcaccaagatctgaaccttcattctctatcaataccggattccagtatcctgcacttgaacagcttctgcattcctaccagagaagcagggctcttcttttgaggaagaggtcctgatctcctgctgcttgatagaaggcaagtccttgggtttttgaagaacagtaggccgggcagcttctggtggaggatcaaatcttctcataactctagcaggcgaagggtccacacttcccgaaaacttcagaggctgggggacaagtctatgcatggtctttgccggggattctgt

SEQ ID NO: 213899 - DNA, 589 bp, Zea Mays
atattaaggtccggcaaaaatgttgccctgggttgtaaagaaggcttctgctgcaccattggatggatcggcactgaactatcagtagctctgctttgaaccatgatagcatcggagttccttttactgctgaacagccagtcttcatcaccaagatctgaaccttcattctctatcaataccggattccagcttctgcattcctaccagagaagcagggctcttcttttgaggaagaggtcctgatctcctgctgcttgatagaaggcaagtccttgggtttttgaagaacagtaggccgggcagcttctggtggaggatcaaatcttctcataactctagcaggcgaagggtccacacttcccgaaaacttcagagacagggatgaacctgatcccatttgttggaccaatggttgctcaagaacccttggtttctccagaacagctgattggggatcttgactacttttaatcttgaagcgaagaatgtttcctgtaaaatcaagttgggatgaataaaatcctgaacaagtgattgatttcttctataataataaatcaatcagaatagcaaaaacaagagaata

SEQ ID NO: 213900 - DNA, 1449 bp, Zea Mays
aggtgctctgactttactagaggcatagaatcttctgttttccacgatgagatgctcttgcgctgctaggtgattgcgacggaattcatggtggacatgaaatgtgagggatgtgtaacagctgtgaaaaacaagctgcaaactcttgaaggaataaaaaacattgaggtggacttgtctaaccaagtcgttagagttttggggtctcttccagtgaagacaatgttagatgcccttcatcaaacaggtcgagatgcacgactgattggccaagggaacccaaatgatttcttagtttctgctgctgtagctgagtttaaagggcctgttgtatttggtgttgttcgtctggcccaagtaaacatggagttggctagagttgaagccacgtttagtggtctatcacctggtaaacatggatggtcaataaatcagtttggggatttgacaagaggtgcagaaagcactggcaatgtctataatccgccagatcatttatctgataagccacttggtgacctgggaacactagaagctggagagaacggggaagcccatttctcaggaccgaaggagaaattgagagtggttgacttgatcggccgctctattgctttgtatgcaaccgaggacagatcagaccctggcattgccgcagccgtgattgcaagaagcgccggggtaggagagaactacaagaaactctgcacttgtgatggtgtcaccatttgggaatcaagctaaacctgctaccagcgaattttccatactatttacttccgtatgttgtacacacacattaacgtagaaacaatcaaagtggcaactgaacatttggaataagcttgaatacattgaggaataaaggctgttctcatgtggagcttggacagtattttttttgcgtcggttagtggacctgttctgcttctgccgctgcgacacaacagatctctggtttgattacccaaaggttcctgctccattgcttgcttggctaaacgcacagtacacaaacgaagttcacattggtggcagccatgtgaggacgagggggctccggacgacgtggacgccagccaggacgccgtggctccacctttgaactctgtaacctaaccttgacacggtaatggtagtatggtacgtcgaggacgacggacccgacgttcgtcacggtgcgacgcaccgtcagcgcagcagatggccggataattcaagtcaccaggcgagctgaaggtgtgcttgcatgtcttgctcgagttcttggtgaaggacctgagctgcaacggcgtcaggttctccacgcagaggaactgcaggtagtcgtcctggaccatatcgtagaccaggccagacttgagaacacgcagctagcgggcgtatgtggccagctccgtgatcgaacggcgtggacgccttgcagttgcaggtggccgcgtcgttcag

SEQ ID NO: 213901 - DNA, 3224 bp, Zea Mays
cagaatcagaagttcagaaccaaaactggtagtatcaatagcagtatcaatagcaatctagcacttgtcaacctaaccgattcccatccaaccaaccccgcacaccgccgcgggaagcagaagagactggaagagcctacaaaagcttgggggcgcggcagcacaacgcaggatggtgggcttcctccgggccttcgccgccgcttccgctgtgcccgcagcagctgccgcagcctatgctctcttttcatcctccgccccttcctcctccaagctccgcttccctcttcctgactccttcctctccgccgccgcctcctcgacctccgggcgcgctcccaacgccgtgcccccgatggccaccgccgctgccacggctgatctctcggctgccgatgataagcagcgggactcggcgcttccggagctcacggtaggtgctctgactttactagaggcatagaatcttctgttttccacgatgagatgctcttgcgctgctaggtgattgcggtaagctgaattagttttgaaggactagtttgaattggtggttgagaggtggaaaatcgaatatatcaattctgtatctaggtttaaatagcttgagatcttggtccgagtgtggtggtatgttcaattcaatggtgctgtaggtggtataattgattggctagattgtttcttcttttctgcagttagtggatgtttttccaatttgtagagctagtaatccactagtgtgcgttagcggtatcctatcatctcatctagctatttagaagaaagaggagttgcatcagtgaattttggttgcatctgcagatgttgtgctaaagatcatgtctgtcttcatgacacattaagatatttgatttataaaaggtatcagcaccagtaatgaatctatcctttgatttgatttctccctgctgccagaagatggctacaagggattaagtaaattgtggatatgggaggtctttgaggagccactatctgatcttcagatcgtgcctttgacaggggcattcaattttactgtgaactaatgacaaaatttcagtatggaagtcagatggtaggtagcataaatcatccaaacacttatatttttcttggacatgtgttacaccatttggatggtatgaggtatcagctccaaattgtctggcttgctatgtcatattaataaagggccataacttagcaccaataactaaagggcattataattttctccaagcaagataagatcttgtgtgcagaagtgatgtattagattcggtaactcgggaactaagttatgtacttcgggagcatatcgtaaactgtgattgttctattttgaaaataattttctggcatgtgggtacttggtgaactcctaaataaattgggttctattgtactgtagaattcctttgaaatatggtctagaaaggcaaggcaacatattcgttttgtaaagggggtagacgtagacctagtgccggaggctcccacatgagtggggtctgagagggataaaccgaggcatgccttctccctgcaagtgtggagaggcttctttgaacccttgatctggtgactcagtgagacaactctcaccgttgcatcgggtctgcctttcaatatattcattttgtatttttttaaaaaaaatatatgaactaggcaatatgtagtctttgtggctcaacattctatgtggcttgttttgttgcacactatgttgatagaaacatcacgtgctggttcacttcatgattctttgtgcattttctttagaaattgtttatgtcccaatgaaacgagttagttaataatcttgtgcttgatatgatctgaagacggaattcatggtggacatgaaatgtgagggatgtgtaacagctgtgaaaaacaagctgcaaactcttgaaggaataaaaaacattgaggtggacttgtctaaccaagtcgttagagttttggggtctcttccagtgaagacaatgttagatgcccttcatcaaacaggtcgagatgcacgactgattggccaagggaacccaaatgatttcttagtttctgctgctgtagctgagtttaaagggcctgttgtatttggtgttgttcgtctggcccaagtaaacatggagttggctagagttgaagccacgtttagtggtctatcacctggtaaacatggatggtcaataaatcagtttggggatttgacaagaggtgcagaaagcactggcaatgtctataatccgccagatcatttatctgataagccacttggtgacctgggaacactagaagctggagagaacggggaagcccatttctcaggaccgaaggagaaattgagagtggttgacttgatcggccgctctattgctttgtatgcaaccgaggacagatcagaccctggcattgccgcagccgtgattgcaagaagcgccggggtaggagagaactacaagaaactctgcacttgtgatggtgtcaccatttgggaatcaagctaaacctgctaccagcgaattttccatactatttacttccgtatgttgtacacacacattaacgtagaaacaatcaaagtggcaactgaacatttggaataagcttgaatacattgaggaataaaggctgttctcatgtggagcttggacagtattttttttgcgtcggttagtggacctgttctgcttctgccgctgcgacacaacagatctctggtttgattacccaaaggttcctgctccattgcttgcttggctaaacgcacagtacacaaacgaagttcacattggtggcagccatgtgaggacgagggggctccggacgacgtggacgccagccaggacgccgtggctccacctttgaactctgtaacctaaccttgacacggtaatggtagtatggtacgtcgaggacgacggacccgacgttcgtcacggtgcgacgcaccgtcagcgcagcagatggccggataattcaagtcaccaggcgagctgaaggtgtgcttgcatgtcttgctcgagttcttggtgaaggacctgagctgcaacggcgtcaggttctccacgcagaggaactgcaggtagtcgtcctggaccatatcgtagaccaggccagacttgagaacacgcagctagcgggcgtatgtggccagctccgtgatcgaacggcgtggacgccttgcagttgcaggtggccgcgtcgttcag

SEQ ID NO: 213902 - DNA, 2372 bp, Zea Mays
gactaattcaacttcgaggggcagaacgacgtggtgaggttcttccagctgatccaggagcacgacatgtacgccatggtccggctcgggcccttcatccaggcagaatggaaccacggaggactgccctactggctaagggagatccctgacattgtgttccggacgaacaacgagccatacaagatgcacatggagacgtttgtgaagatcataataaaaaggctcaaggatgccaaccttttcgcgtcacaaggaggccccatcattctagcacagatcgagaacgagtaccagcatatggaagcggcgttcaaagatgagggcaccaagtacatcaactgggcagcgaagatggccatctccaccaacatcggcataccgtggatcatgtgcaagcagaccaaagctcctagtgatgtgattcctacctgcaatgggagaaactgtggagatacatggccaggtccaacgaacaagagcatgccgctcttgtggactgagaactggacagcacagtacagagtattcggtgaccctccatcccagcgttctgctgaggacattgcattcgccgtggcgcgcttcttctccgtgggcggaaccttggcaaactattacatgtaccatggtggaacaaacttcggaaggacatctgctgcctttgtgatgccaaaatactacgacgaggcacctctcgacgaattcggcctgtacaaggagcccaagtggggccatctgagggacctgcaccaggcgctgaagctgtgcaagaaggccctgctgtgggggacgccgtcgacggagaagctgggcaagcagttggaggcgagggtgttcgagatgccggagcagaaggtgtgcgtggcgttcctctccaaccacaacaccaaggacgacgcgacgatgacgttccggggccggccctacttcgtgccgcgccactccatcagcgtcctcgccgactgcgagaccgtcgtcttcggcacccagcacgtgaacgcgcagcacaaccagcggacgttccacttcgcggaccagacggcgcagaacaacgtgtgggagatgttcgacggggagaatgtgcccaagtacaagcaggccaagatcaggctgcgcaaggccggcgacctctacaacctcaccaaggacaagaccgactacgtctggtacacctccagcttcaagttggaggcggacgacatgccgatccgcagcgacatcaagacagtgctcgaggtcaacagccatgggcatgccagcgtggcgtttgtcaacaacaaattcgtaggatgtgggcacgggaccaagatgaacaaggcgttcacgctcgagaagcccatggacctgaagaagggcgtgaaccacgtcgccgtcttggcatcgtcgatgggaatgacggacagtggcgcttacatggagcaccgtctggccggcgtggacagggtgcagatcacgggcctgaacgcgggcacgctggacctgacgaataacggctggggccacatcgtcggcctcgtcggcgagaggaagcagatctacaccgacaagggcatgggcagcgtcacctggaagccggccatgaacgacaggccgctcacctggtacaagaggcacttcgacatgccgtcgggagaggacccggtcgtgctggacatgagcacgatgggcaagggcatgatgttcgtcaacggccagggcatcggccgctactggatctcctacaagcacgccctcggccggccatcgcagcagctaaggacaacatgctggtgctgttcgaggaggagttcgggcggccggacgcgatcatgatcctgacggtgaagcgcgacaacatctgcaccttcatctcggagcggaacccggcgcacatcatgtcgtgggagcgcaaggacagccagatcacggcgaaggcgaacgccgacgacctcagggcccgggcggcgctggcgtgcccgcccaagaagctcatccagcaggtggtgttcgcgagctacggaaaccccgcgggcatctgcggcaactacaccgtcggcagctgccacacgccgcgcgccaaggaggtggtggagaaggcgtgcctcggcaagcgcgtctgcacgctgcccgtggccgccgacgtctacggcggcgacgccaactgctccggcaccaccgccacgctcgccgtgcaggccaagtgctccaagaggtcgcccagcgcggcgcagtaattcagtcgctcgtcgggacatcctattcgtggctgggcggggaacacattgtcggtactgtcattgtaagcttaaaaaaccctatattgtactcgtggctgggcggggagcatctaacaatatatttatagattgttcattttagtgatgtccatc

SEQ ID NO: 213903 - DNA, 2370 bp, Zea Mays
aggactaattcaacttcgaggggcagaacgacgtggtgaggttcttccagctgatccaggagcacgacatgtacgccatggtccggctcgggcccttcatccaggcagaatggaaccacggaggactgccctactggctaagggagatccctgacattgtgttccggacgaacaacgagccatacaagatgcacatggagacgtttgtgaagatcataataaaaaggctcaaggatgccaaccttttcgcgtcacaaggaggccccatcattctagcacagatcgagaacgagtaccagcatatggaagcggcgttcaaagatgagggcaccaagtacatcaactgggcagcgaagatggccatctccaccaacatcggcataccgtggatcatgtgcaagcagaccaaagctcctagtgatgtgattcctacctgcaatgggagaaactgtggagatacatggccaggtccaacgaacaagagcatgccgctcttgtggactgagaactggacagcacagtacagagtattcggtgaccctccatcccagcgttctgctgaggacattgcattcgccgtggcgcgcttcttctccgtgggcggaaccttggcaaactattacatgtaccatggtggaacaaacttcggaaggacatctgctgcctttgtgatgccaaaatactacgacgaggcacctctcgacgaattcggcctgtacaaggagcccaagtggggccatctgagggacctgcaccaggcgctgaagctgtgcaagaaggccctgctgtgggggacgccgtcgacggagaagctgggcaagcagttggaggcgagggtgttcgagatgccggagcagaaggtgtgcgtggcgttcctctccaaccacaacaccaaggacgacgcgacgatgacgttccggggccggccctacttcgtgccgcgccactccatcagcgtcctcgccgactgcgagaccgtcgtcttcggcacccagcacgtgaacgcgcagcacaaccagcggacgttccacttcgcggaccagacggcgcagaacaacgtgtgggagatgttcgacggggagaatgtgcccaagtacaagcaggccaagatcaggctgcgcaaggccggcgacctctacaacctcaccaaggacaagaccgactacgtctggtacacctccagcttcaagttggaggcggacgacatgccgatccgcagcgacatcaagacagtgctcgaggtcaacagccatgggcatgccagcgtggcgtttgtcaacaacaaattcgatgtgggcacgggaccaagatgaacaaggcgttcacgctcgagaagcccatggacctgaagaagggcgtgaaccacgtcgccgtcttggcatcgtcgatgggaatgacggacagtggcgcttacatggagcaccgtctggccggcgtggacagggtgcagatcacgggcctgaacgcgggcacgctggacctgacgaataacggctggggccacatcgtcggcctcgtcggcgagaggaagcagatctacaccgacaagggcatgggcagcgtcacctggaagccggccatgaacgacaggccgctcacctggtacaagaggcacttcgacatgccgtcgggagaggacccggtcgtgctggacatgagcacgatgggcaagggcatgatgttcgtcaacggccagggcatcggccgctactggatctcctacaagcacgccctcggccggccatcgcagcagctaaggacaacatgctggtgctgttcgaggaggagttcgggcggccggacgcgatcatgatcctgacggtgaagcgcgacaacatctgcaccttcatctcggagcggaacccggcgcacatcatgtcgtgggagcgcaaggacagccagatcacggcgaaggcgaacgccgacgacctcagggcccgggcggcgctggcgtgcccgcccaagaagctcatccagcaggtggtgttcgcgagctacggaaaccccgcgggcatctgcggcaactacaccgtcggcagctgccacacgccgcgcgccaaggaggtggtggagaaggcgtgcctcggcaagcgcgtctgcacgctgcccgtggccgccgacgtctacggcggcgacgccaactgctccggcaccaccgccacgctcgccgtgcaggccaagtgctccaagaggtcgcccagcgcggcgcagtaattcagtcgctcgtcgggacatcctattcgtggctgggcggggaacacattgtcggtactgtcattgtaagcttaaaaaaccctatattgtactcgtggctgggcggggagcatctaacaatatatttatagattgttcattttagtgatgtccatc

SEQ ID NO: 213904 - DNA, 1383 bp, Zea Mays
gtcatgatgaacaatgctctggatcgagaacgagtaccagcatatggaagcggcgttcaaagatgagggcaccaagtacatcaactgggcagcgaagatggccatctccaccaacatcggcataccgtggatcatgtgcaagcagaccaaagctcctagtgatgtgattcctacctgcaatgggagaaactgtggagatacatggccaggtccaacgaacaagagcatgccgctcttgtggactgagaactggacagcacagtacagagtattcggtgaccctccatcccagcgttctgctgaggacattgcattcgccgtggcgcgcttcttctccgtgggcggaaccttggcaaactattacatgtaccatggtggaacaaacttcggaaggacatctgctgcctttgtgatgccaaaatactacgacgaggcacctctcgacgaattcggcctgtacaaggagcccaagtggggccatctgagggacctgcaccaggcgctgaagctgtgcaagaaggccctgctgtgggggacgccgtcgacggagaagctgggcaagcagttggaggcgagggtgttcgagatgccggagcagaaggtgtgcgtggcgttcctctccaaccacaacaccaaggacgacgcgacgatgacgttccggggccggccctacttcgtgccgcgccactccatcagcgtcctcgccgactgcgagaccgtcgtcttcggcacccagcacgtgaacgcgcagcacaaccagcggacgttccacttcgcggaccagacggcgcagaacaacgtgtgggagatgttcgacggggagaatgtgcccaagtacaagcaggccaagatcaggctgcgcaaggccggcgacctctacaacctcaccaaggacaagaccgactacgtctggtacacctccagcttcaagttggaggcggacgacatgccgatccgcagcgacatcaagacagtgctcgaggtcaacagccatgggcatgccagcgtggcgtttgtcaacaacaaattcgtaggatgtgggcacgggaccaagatgaacaaggcgttcacgctcgagaagcccatggacctgaagaagggcgtgaaccacgtcgccgtcttggcatcgtcgatgggaatgacggacagtggcgcttacatggagcaccgtctggccggcgtggacagggtgcagatcacgggcctgaacgcgggcacgctggacctgacgaataacggctggggccacatcgtcggcctcgtcggcgagaggaagcagatctacaccgacaagggcatgggcagcgtcacctggaagccggccatgaacgacaggccgctcacctggtacaagttggtgtgtgtgcgtgcccgcgccattct

SEQ ID NO: 213905 - DNA, 2018 bp, Zea Mays
ccgcgacggcccgacctaccgttagctgtcccggcggtccgctcctctcccggccacctctaccccggacgcatgcatgtggacatgtcccaccgcgtccggctcgcggcggcggcgctcgtcgcggtcgcggcgctggccctggcgctcgcccccggcgccgcggccaagtggcagcggaccaggaacggcaccgtggtcagctacgaccgccgctcgctcatgttcgacggccaccgggaaatcttcttatccgggtccatccactacccgcggagcccgccggacatgtggccggagctcatcgccaaggccaaggagggcgggctcaacaccatcgagacctacgtgttctggaacatccacgagcccgagaagggtgagttcaacttcgaggggcagaacgacgtggtgaggttcttccagctgatccaggagcacgacatgtacgccatggtccggctcgggcccttcatccaggcagaatggaaccacggaggactgccctactggctaagggagatccctgacattgtgttccggacgaacaacgagccatacaagatgcacatggagacgtttgtgaagatcataataaaaaggctcaaggatgccaaccttttcgcgtcacaaggaggccccatcattctagcacagatcgagaacgagtaccagcatatggaagcggcgttcaaagatgagggcaccaagtacatcaactgggcagcgaagatggccatctccaccaacatcggcataccgtggatcatgtgcaagcagaccaaagctcctagtgatgtgattcctacctgcaatgggagaaactgtggagatacatggccaggtccaacgaacaagagcatgccgctcttgtggactgagaactggacagcacagtacagagtattcggtgaccctccatcccagcgttctgctgaggacattgcattcgccgtggcgcgcttcttctccgtgggcggaaccttggcaaactattacatgtaccatggtggaacaaacttcggaaggacatctgctgcctttgtgatgccaaaatactacgacgaggcacctctcgacgaattcggcctgtacaaggagcccaagtggggccatctgagggacctgcaccaggcgctgaagctgtgcaagaaggccctgctgtgggggacgccgtcgacggagaagctgggcaagcagttggaggcgagggtgttcgagatgccggagcagaaggtgtgcgtggcgttcctctccaaccacaacaccaaggacgacgcgacgatgacgttccggggccggccctacttcgtgccgcgccactccatcagcgtcctcgccgactgcgagaccgtcgtcttcggcacccagcacgtgaacgcgcagcacaaccagcggacgttccacttcgcggaccagacggcgcagaacaacgtgtgggagatgttcgacggggagaatgtgcccaagtacaagcaggccaagatcaggctgcgcaaggccggcgacctctacaacctcaccaaggacaagaccgactacgtctggtacacctccagcttcaagttggaggcggacgacatgccgatccgcagcgacatcaagacagtgctcgaggtcaacagccatgggcatgccagcgtggcgtttgtcaacaacaaattcgtaggatgtgggcacgggaccaagatgaacaaggcgttcacgctcgagaagcccatggacctgaagaagggcgtgaaccacgtcgccgtcttggcatcgtcgatgggaatgacggacagtggcgcttacatggagcaccgtctggccggcgtggacagggtgcagatcacgggcctgaacgcgggcacgctggacctgacgaataacggctggggccacatcgtcggcctcgtcggcgagaggaagcagatctacaccgacaagggcatgggcagcgtcacctggaagccggccatgaacgacaggccgctcacctggtacaagttggtgtgtgtgcgtgcccgcgccattct

SEQ ID NO: 213906 - DNA, 3536 bp, Zea Mays
gcctccctctcgcccctgccacgtcagctctcgcctccactctcgcctctgctgctccagtgcacaggctgcagcagactacaacctcaggctatagcacacgtggaccaatcagaagccgccacctcactgtcgcccctcgctctcgcccgcgaagacgccatcgccaacacgtcgccccgctctcgcctgcctatcgtcggacggtggcagtagcacccgccaggtcgctctcgcccgcctcccgccccgctctcgcctgggcgctatcgccgtcactatagctggcaccagccttaccacaccccagcggcccctgccccgcacgccgtcctccctcccgcctgcgtcgccaggtctcggcgacgcaattattgccgcagcgaagcgacaggtgtggcgtcaatggggtgggtctgaccctgactgcccccatccatccgtcgcctacttgtcgcgtactagctagctccgggtggagtggagctagctagtcatggcagccatcatcatagccgtagagccatagccacacttgtcgctcgtcatcaagagctgccgagatagttgcggcagcaggcagcacagtgccgctccgtccgtccacgggctgtggctgtggtgtgcacacatatgcgccgccgccgctgccgctgccgccgccttgtcgtttgccctgtcgcggctctgctcggctgcgtgggctagtttacagccggagttgtacttcgcgttcgcggcggggggaaggagggggggagtaaagaatcggaggcgcgcgcggattggatgctgtgcgtgcgcgcggaggacgcgctggccgccgctgcagccgcggccgcagcgtccgacaagatgcgctccgtgaccctgggcgggacgatccagagggcggtgcggaggatggctggcggcgccggccggaggagaccccacgccttggcggactcggggaccgccgactcgtcggcgtcagcatcggccagctgctccggggatgatatcagcagcactggtagtgccaagagggaagcggtacaaaggtgcaccatgcatcggtacagatcgcagctagagcaggaagtgtgttttccttggcttatgaactctacaattctgaatttcgtagcatgctgttttcagttgaaaggatcccgctttgtttcgagctgtgatgggctctgttcctcttaaatggaagctggctgatgttggccgtggtgggcatgtggttatacgaaagttgaaaattgaagtcctctgatgaaatccattctctaaaatttgttccctgattatacgaaagttcgtcaaaatcatgttcatttttaactcatgccttcccatgtgcctttagtttcatcattaacagcaccattgtagttcaagcagttttccttgggcgccttttctatgacaggagaatatttttttgcaagttcaaaagaacaaaaaagaagatatttcttgatgtggttgtgtactgactgtgtaatgctctactcttgacatacctgtacaggttaacaaattgcaaaggcaactccaagaagagattgatttgcacatggcgttgacagatgccattacatataatgcggcgctgatacttaaggcatctatgaagcttcctgacaaggcacacgagctattgattagcatatcctctctggaaaccgctatcacaaagcttgaagaggatctacatcacctgcactaccagttatgtgatgcgaggaatgaaaggctacttgcagaaaataagccagaatgcttgctacctacagcgtcagattgccaaccttctacagcttgcgattgtacaagggaagagcctgaacaaacattaagatattcgagattcaaagattatcaccaagtggaggacggtttgtcaactgaacctgaagatcaacaagatgacgaaaaagacgccgaagatggagaacatgtatctctaaatatgctgatgcaagaggcatgctctatggaaaatgaaggcaaagaagatcagaagatagatgcattaacatttagtcagcccaatttcaagaaaagcgacatgagtggaaatttgtggaataatccaaaccagctctctgaagagatggtgcgctcgatgaaagatatcttccttcatttatctgcatctcccaagatatcacgagaggagccttttgctaattcatcttcatcagcagaacgtctatctggttcaacattgactactttgtcagattcatctataatcgcctcagtgctgcggagtccttcgattgactggaacaacggcgatggtattattgatgatgttagaaactttgacccgtacaacgttaaaggcaaggaagcacggagagacgttgggagctattgttcagtagctgaagtgtcttggatgtatattggcaatgaacaacttgaatatgcatccggagctcttaaaaagttcaggtttcttgtggagcaactatcaaaggttgacccttcttgtatgaactgtgatgaacagatagcattttgggttaacttgtacaatgcattaataatgcatgcttatttggcatacggtgtccctgaaaatgacattaagctgttcgcgctaatgcaaaaggcctgttacacgatcggcgggcagcctgtcagtgcagccgaaatagagtttgtgattctgaagatgaagacaccggtgcaccggccacagctctccttgatgctggcccttcacaagtttaaaacgtcagagaacctcaggagatattcaatcgatggcactgagcctcgcgtcctcttcgcgctctgctgtgggatgttctcttctcctgcggtaaggatcttctctgctgaaaacgttcgagctgagcttcaggagtccatgagagactacatccgagcgtcagttggcataaacgacaagggagagctcgtagtccccaagctactgcagagctacgccaagggcatcgtggaggactccctgctcgccgactggatctgccgccatctgacactagaccaagtcgccgcgatccaggacacgtcgtcgtcgtcgtcgcataagcagcggcttcttggagtgcgcagcttcagcgtcatcccgttcgactcgaggttccggtacctgttcttgtccaacaacaccaggtgccagaattgaaacaagagtacaagactgcattgctatgcgcagacagccacaggagtgggtgcttgacaagttgacacttttttcgagagctgaaaatattagcttttgctgtacattctgtaaatttttccgttgactaggattcttctttgtacgtaacattcagctaactttttgtacatcaagcgaacccagaatacaagtgtagattcggtgatggttcagtctcaggttagtggcttgattaccgccaaggaacccaaaattacactgcaaattcacagccagtaaaaaaaatctgcatgttgcacatccaacaaactgagctatcgctgctactgaactttacaaggcgatttttccgtgactaggattcttctttgtacgt

SEQ ID NO: 213907 - DNA, 3006 bp, Zea Mays
gcctccctctcgcccctgccacgtcagctctcgcctccactctcgcctctgctgctccagtgcacaggctgcagcagactacaacctcaggctatagcacacgtggaccaatcagaagccgccacctcactgtcgcccctcgctctcgcccgcgaagacgccatcgccaacacgtcgccccgctctcgcctgcctatcgtcggacggtggcagtagcacccgccaggtcgctctcgcccgcctcccgccccgctctcgcctgggcgctatcgccgtcactatagctggcaccagccttaccacaccccagcggcccctgccccgcacgccgtcctccctcccgcctgcgtcgccaggtctcggcgacgcaattattgccgcagcgaagcgacaggtgtggcgtcaatggggtgggtctgaccctgactgcccccatccatccgtcgcctacttgtcgcgtactagctagctccgggtggagtggagctagctagtcatggcagccatcatcatagccgtagagccatagccacacttgtcgctcgtcatcaagagctgccgagatagttgcggcagcaggcagcacagtgccgctccgtccgtccacgggctgtggctgtggtgtgcacacatatgcgccgccgccgctgccgctgccgccgccttgtcgtttgccctgtcgcggctctgctcggctgcgtgggctagtttacagccggagttgtacttcgcgttcgcggcggggggaaggagggggggagtaaagaatcggaggcgcgcgcggattggatgctgtgcgtgcgcgcggaggacgcgctggccgccgctgcagccgcggccgcagcgtccgacaagatgcgctccgtgaccctgggcgggacgatccagagggcggtgcggaggatggctggcggcgccggccggaggagaccccacgccttggcggactcggggaccgccgactcgtcggcgtcagcatcggccagctgctccggggatgatatcagcagcactggtagtgccaagagggaagcggtacaaaggtgcaccatgcatcggtacagatcgcagctagagcaggaagttaacaaattgcaaaggcaactccaagaagagattgatttgcacatggcgttgacagatgccattacatataatgcggcgctgatacttaaggcatctatgaagcttcctgacaaggcacacgagctattgattagcatatcctctctggaaaccgctatcacaaagcttgaagaggatctacatcacctgcactaccagttatgtgatgcgaggaatgaaaggctacttgcagaaaataagccagaatgcttgctacctacagcgtcagattgccaaccttctacagcttgcgattgtacaagggaagagcctgaacaaacattaagatattcgagattcaaagattatcaccaagtggaggacggtttgtcaactgaacctgaagatcaacaagatgacgaaaaagacgccgaagatggagaacatgtatctctaaatatgctgatgcaagaggcatgctctatggaaaatgaaggcaaagaagatcagaagatagatgcattaacatttagtcagcccaatttcaagaaaagcgacatgagtggaaatttgtggaataatccaaaccagctctctgaagagatgaacgtctatctggttcaacattgactactttgtcagattcatctataatcgcctcagtgctgcggagtccttcgattgactggaacaacggcgatggtattattgatgatgttagaaactttgacccgtacaacgttaaaggcaaggaagcacggagagacgttgggagctattgttcagtagctgaagtgtcttggatgtatattggcaatgaacaacttgaatatgcatccggagctcttaaaaagttcaggtttcttgtggagcaactatcaaaggttgacccttcttgtatgaactgtgatgaacagatagcattttgggttaacttgtacaatgcattaataatgcatgcttatttggcatacggtgtccctgaaaatgacattaagctgttcgcgctaatgcaaaaggcctgttacacgatcggcgggcagcctgtcagtgcagccgaaatagagtttgtgattctgaagatgaagacaccggtgcaccggccacagctctccttgatgctggcccttcacaagtttaaaacgtcagagaacctcaggagatattcaatcgatggcactgagcctcgcgtcctcttcgcgctctgctgtgggatgttctcttctcctgcggtaaggatcttctctgctgaaaacgttcgagctgagcttcaggagtccatgagagactacatccgagcgtcagttggcataaacgacaagggagagctcgtagtccccaagctactgcagagctacgccaagggcatcgtggaggactccctgctcgccgactggatctgccgccatctgacactagaccaagtcgccgcgatccaggacacgtcgtcgtcgtcgtcgcataagcagcggcttcttggagtgcgcagcttcagcgtcatcccgttcgactcgaggttccggtacctgttcttgtccaacaacaccaggtgccagaattgaaacaagagtacaagactgcattgctatgcgcagacagccacaggagtgggtgcttgacaagttgacacttttttcgagagctgaaaatattagcttttgctgtacattctgtaaatttttccgttgactaggattcttctttgtacgtaacattcagctaactttttgtacatcaagcgaacccagaatacaagtgtagattcggtgatggttcagtctcaggttagtggcttgattaccgccaaggaacccaaaattacactgcaaattcacagccagtaaaaaaaatctgcatgttgcacatccaacaaactgagctatcgctgctactgaactttacaaggcgatttttccgtgactaggattcttctttgtacgt

SEQ ID NO: 213908 - DNA, 2124 bp, Zea Mays
ttcccttgtgctagttcttcactgatgatatcagcagcactggtagtgccaagagggaagcggtacaaaggtgcaccatgcatcggtacagatcgcagctagagcaggaagttaacaaattgcaaaggcaactccaagaagagattgatttgcacatggcgttgacagatgccattacatataatgcggcgctgatacttaaggcatctatgaagcttcctgacaaggcacacgagctattgattagcatatcctctctggaaaccgctatcacaaagcttgaagaggatctacatcacctgcactaccagttatgtgatgcgaggaatgaaaggctacttgcagaaaataagccagaatgcttgctacctacagcgtcagattgccaaccttctacagcttgcgattgtacaagggaagagcctgaacaaacattaagatattcgagattcaaagattatcaccaagtggaggacggtttgtcaactgaacctgaagatcaacaagatgacgaaaaagacgccgaagatggagaacatgtatctctaaatatgctgatgcaagaggcatgctctatggaaaatgaaggcaaagaagatcagaagatagatgcattaacatttagtcagcccaatttcaagaaaagcgacatgagtggaaatttgtggaataatccaaaccagctctctgaagagatggtgcgctcgatgaaagatatcttccttcatttatctgcatctcccaagatatcacgagaggagccttttgctaattcatcttcatcagcagaacgtctatctggttcaacattgactactttgtcagattcatctataatcgcctcagtgctgcggagtccttcgattgactggaacaacggcgatggtattattgatgatgttagaaactttgacccgtacaacgttaaaggcaaggaagcacggagagacgttgggagctattgttcagtagctgaagtgtcttggatgtatattggcaatgaacaacttgaatatgcatccggagctcttaaaaagttcaggtttcttgtggagcaactatcaaaggttgacccttcttgtatgaactgtgatgaacagatagcattttgggttaacttgtacaatgcattaataatgcatgcttatttggcatacggtgtccctgaaaatgacattaagctgttcgcgctaatgcaaaaggcctgttacacgatcggcgggcagcctgtcagtgcagccgaaatagagtttgtgattctgaagatgaagacaccggtgcaccggccacagctctccttgatgctggcccttcacaagtttaaaacgtcagagaacctcaggagatattcaatcgatggcactgagcctcgcgtcctcttcgcgctctgctgtgggatgttctcttctcctgcggtaaggatcttctctgctgaaaacgttcgagctgagcttcaggagtccatgagagactacatccgagcgtcagttggcataaacgacaagggagagctcgtagtccccaagctactgcagagctacgccaagggcatcgtggaggactccctgctcgccgactggatctgccgccatctgacactagaccaagtcgccgcgatccaggacacgtcgtcgtcgtcgtcgcataagcagcggcttcttggagtgcgcagcttcagcgtcatcccgttcgactcgaggttccggtacctgttcttgtccaacaacaccaggtgccagaattgaaacaagagtacaagactgcattgctatgcgcagacagccacaggagtgggtgcttgacaagttgacacttttttcgagagctgaaaatattagcttttgctgtacattctgtaaatttttccgttgactaggattcttctttgtacgtaacattcagctaactttttgtacatcaagcgaacccagaatacaagtgtagattcggtgatggttcagtctcaggttagtggcttgattaccgccaaggaacccaaaattacactgcaaattcacagccagtaaaaaaaatctgcatgttgcacatccaacaaactgagctatcgctgctactgaactttacaaggcgatttttccgtgactaggattcttctttgtacgt

SEQ ID NO: 213909 - DNA, 710 bp, Zea Mays
ctcggccgcacgcctaacatccctgatcaactttgcatcgtgttgttgcaatcggtaaagagcggtattcggtggctttctttcttgatccaaatcctgacacactggtgcagtgtttggaaagttgttgcagtgaagcatgtccaccaaggtttccacctatcaagagttgggactacatagccgggcgactaaattcaacttacaaataatcaccaccacgtttgtaatgctatgctcgtttacaacagcttgacaccacagtaatgtttgaacccaggattaaagatagttttcaagaaaggcggagctatgtatgtgagctggatctccatgtctcccctccccctagtgtctggaggagtgcactttctggatcacgcgtcgtcaggaagcaagcaagcaagcatacgcgcaattcccgctgcgcaattcccgatcgtaccctgctccaaatctttgtgcaagtctctgctcccttgaatgcaactgatgccaatcccatcaatctctttctttgaaaggagacatactgcttcctctagtttcatacctgctgaacacgatcaatggtttgcatgtactctaagatatacatgacccgcatgattgctatagtaaagactattaaaaatgaatttagctgacttcatttccctggtcaaagaaattgttgacattttgagtcagtttaatttcctcattagaag

SEQ ID NO: 213910 - DNA, 710 bp, Zea Mays; identical to SEQ ID NO: 213909

SEQ ID NO: 213911 - DNA, 2289 bp, Zea Mays
atttcaagtcgcaaagcgcgacgtccgacgagagagagcggcctcagaacaggagcgaagggatccgccagagtccccctgagtccaaccaagctcggtccggcccagtcccaggcccaggcccaggcccgagcggtagcctgtaggtcgccggcgatgccgttcctgtcgacgccgtcgttcgacctatccgccggcgcagagccaaccctgggcccgcgctcagcggccccgccgcctccacccacggcggccgcgcatcatcagccgccggtgtccgaggcggcggcccggcggcttcgggaggcggaggagcggctgcgggaagccatcgaggagctacaccggcaccagggcggtggcgttaagggagatggggacgagcagcgggagggagagcgggggtgcggtcacgacggggagtcatgcgcggcgcacgccgcggggaacctgtgccagagcttcctgctttcgtacggtgtccgcgtcggcatcggcatcctcctccgcgccttcaagctcgtgcgccgcaggtcctatggctcgctcctcgaccttaagtgtgcatataattctgcaaaatctaagaacaaatttcatttttggggaagccattggagacatggagatgcattgcttttttcattagcatgtgcccaggttatgtatgcttttgttatgaggcctgaaagcttacctaagtcgtaccaagaatttatccttaagacaggaccagtagcagaacctgtctacaaggttgtcaaagaatgctgcagaggtggtcctgtggatctaactgccctctcagcccatttatcaaacaagaggaatccggatttgataaatttaacaacaaatccatccattatcccatgttctgtgatccaccctgacagagcatcatgcttggctcaaaatgttaatgttgtttcatcaacattcaagaagacattccctctatatttctcattgacatttgtgccctttgttgtcctacgtcttcaaaagttcttggaatcgccaacgacaacttgttggcgtgctcttgtgggtgcagttcgctccaccacctttttgtctgccttcgtcactgtattccaggctgctatatgtttgcaccgaaaagttgcgaacaaagaccacaaacttgtgtattggtttgctggtttgatgtcgggtctttcaattcttttggaaaagaaagctagaagggctgagctagccctctatgtgcttccacgtgctggagattccctatggtatatattgatcaaccgccacctgctcccaaatattaaaaatgctgaggtggctcttttctgcatgtgcatgggaggaatcatgtattttctggagtacgagccagacacaatggctccattcctcagagggctcatcaggcgcttcctggcaagcaagatcagcaatccaagccccccgcctcccaatcggaatgcctcctactcgtaccttcagacgctgaatgctctggatcaatcaagaacccaaccaggggtggataacggactgacgacatcggagaaatacaacctcgaatcaattcctggactttagagacctcatctgtggtattagtaaattgggtcttgtagcttgggaagatcacgaaaactcgaacacccattacatgtgccatcctgtgatgggtttatactctgttatacgtgtttgtcttgagtgcaaaataaatggataagcagagatggtttgtgcgggagtatggactgatacgaagcaatttgctcgttcttgtacatgcccaagtccacaaggtcaggatttgaatcggtcaccaggggcacgaaggtatttttttcgttgcatcacaacgtcgaagacatgatcctgaattcctgacaaaccgaaaggtcgccccgagcagcctcgcaagggtgtgccgaagctcttgcaatttcgtttttatccctttttaattttgttgtgattttacctctgttctacaaacgaagctcagtcgtattcttgtgttgttacagttgacaatgttaaatctgatatgaaaaaacaaaaatttgcacacaatttattactattttactcgtcattgtattacgtatttgcgattttactcccgtaggatgcaccgtacagaataggagggtcgtttggatctttcgcatattatattttcatatttttatttttctaatcactaattatgatttttcacttttaaaatggatgcataaaatcataaagtagcttcgcttttaaaatggatgcataaaatcataaagttaaaaacag

SEQ ID NO: 213912 - DNA, 265 bp, Zea Mays
atgggttacccgcgggttgcagatttcgggttggccaaataccaagcagctgaagtcacccctgtttctacgcgtgtgataggaaccttcggatatctggctccagagtacgctgccacaggcaaaattagcgaccggtccgacgtcttctccttcggtgtgatgctgctggagctcatcaccgggaggaaaccaatcatggcatcttcagagtttcagtctgtggcattggtttcttggcgacagttcctctgctcctcaacag

SEQ ID NO: 213913 - DNA, 1141 bp, Zea Mays
caccacaccgtcaaaatatatatatatgcgctgctgggccagcaggggaacatgtcggcggcgcccgcagtcgcagcgcgcgacggcgaaaggagtagccccgccgacaaggaccgcgccgactccgcggcggtgtcagccaggcccagggcggcgcggagcggaaaggccggcggcgcgccctgcacgccggagcgggaggagccggccttcaagacggtggtgtacagcgccagcagcagcgtcggcggtggccggggccggcgcgcgctcgccgagttctccagctacgtggtgcgcaaggcgccgccgctggagcggagggtggagtgcaccctcgaggagctctgcagcgggtgccacaaggaggtcaggtacacccgcgacgtcgtcaccaagaacggactggtcaccaaggaggaggcgacgcggacggtccgggtgaagcccgggatgaggaaaggcgcgacggtgacgctggagggcgccggcgacgagcggccgggctgcctgacgggcgacgccacgttcgtcgtatccgagaggaggcaccggcggttcaagcggctcggcgacgacctggtgctcagggcccgggtgccgctggtcggcgcgctcacggggtggcagctctcgttcaggctgctcggcggcgacaggttccggtgcgcgttccgggacgaggtcatctgccccgggtacgtcaaggtcgtcaggggcggcggcatgcccgtcgccggcggggccaagggcgcgcgcggggacctcgtggtcaagttcgacgtcgtgttccccgaggacctcacggacgagcagcggaaggggctcgccgagattctgaggggctgcggatgaagcttgcaggtcaactcaaactgcggcctcgtcctgtgacggcttcgtgccgtgtaaaaatttttgttaggcgcttctgttgatagacagctcgggacaggaggactctacagcgcacgctgacagcgtgtacatagattacagaggttctgtttttgaaccgataatatacgtggttgtaacctgcaagaactgtatacggcgattttttgtagtttctcttttatttattacgtggatctaaatatttatcggttaccacaccagctagcaaaaatatctcgtc

SEQ ID NO: 213914 - DNA, 1190 bp, Zea Mays
gtaaccggaaactcactgcagaccatcgcttcacggcatctttcttgtgcgacttgtccgttgaccacaggcggagaaatttgttctcggcacacattctctgccacaatggacgatggagctgacctcccctgccaactgctcttctcccacccggagatgcctgacagcttcgacgagttcttcaacagcgccacgacgacctgcacccacacgcacagctgcaacccgcccggcccctcggtcgccatgcacacccacacgtgcctgcacgcgcacaccctggtcctgggcagcggcggggaggacgacgacgacgccagggaggactcggcgaagccgcgcagaccgctggggaacagggaagctgtgcgcaagtaccgggagaagaagaaggcgcacgcggcctttctggaagaggaggtcaagaagctccgcgccgccaaccagcagctccagagacggctgcagggccatgcagctttggaggcggaggtggcgaggctccggggtctcctgctcgatatccggggcaagatcgacgccgaggtcggcggcgtgctcccttttcagaagccgtgcagtgtgggctccgtggcgtgtgccgatcctgctctgtgcttcaacggcaactcggaggttggaggcggctgggaggagagctcaagaccggcagccgcggactgcaggatcgatgaagtgcgagggatgtcacgggaaattgatgtcccagaaggcttgcgtcattccatggatgttgttgcgagcttcgtgagttctgatcccctggctgaatgagcgcgtttgcctgattggcagttttttttttttggggcctctgccagtgccagcttcttttggcttgcttgaaaggtcaaattttcatgtaattagaagaattgaggaactgataatgagtggaactacctccactgtggtccatgcttcttgtgctggtgttcagtgtgtatagctgagattatattgaactaatataaatgcactgaacactgtttacatctgaaaaaaggtcatttctgtgggtgcaagattttttattttatttttctgcaattacaggacgactacaaaatcgtcagattgtttgttcattctgcagaacgtagaggattttttttccgcccagagtttctctggaataccactagcccgattgtactttgttcatg

SEQ ID NO: 213915 - DNA, 256 bp, Zea Mays
gtaactacatcggcaacctctcacaacccttgccgccgccggctgctccaccctgctgtcgccatgggtaaattccgcaagctcgaccgcggttactcccaccgcctctccatgctcaggacgatggtgtcgcagctggtgaagcacgagcgcatcgagactaccgttgccaaggcgtaggaggtccggcagaaggtggatcagatggtgcagctagggaaggaggttcgtggacagggagaatgagcttcgagag

SEQ ID NO: 213916 - DNA, 531 bp, Zea Mays
ggtaactacatcggcaacctctcacaacccttgccgccgccggctgctccaccctgctgtcgccatgggtaaattccgcaagctcgaccgcggttactcccaccgcctctccatgctcaggacgatggtgtcgcagctggtgaagcacgagcgcatcgagactaccgttgccaaggcgtaggaggtccggcagaaggtggatcagatggtgcagctagggaaggaggtgatttgaacacaagtcccctgacactaattaaattccaacgtgaaatgtcaggccatttcgtggcatccattaatctatgcagggcagtggcagtaaacaacctagcggacatttttgcgaagtatgctcataggttagaagtatttgcaagaaagaaattagtgttcctacttcctatatttagtaggattcacctctacaattcagattgcttctccacatggcctgtatgcattgctacctgaactggagttggacactattggccactgattgtctgattaccacttcagaaataatgc

SEQ ID NO: 213917 - DNA, 283 bp, Zea Mays
atctcaacaatccccgtcccatcgccgtgcgtctcggctgtcatcttccctaccggaagcagcggctgggggcaagatggtgcggcttggggcaagatggtgcggtggctcacctaccggaagcggcacagctacgccaccaaatcgaaccagacccgcgtcgtcaagacacctggtgggaaacttgtgttccagtacaccaagaagcgcgcgagcggaccgaagtgcccagtcaccgggaagaagatccaaggatggctatgatgcatgattatcatcccag

SEQ ID NO: 213918 - DNA, 1362 bp, Zea Mays
gtggacaccacacgccagtccgtccgtctccgccagtcgatggcacgcacggcacgatatccaaaccggccgcggatagctgtggccgccgtgccacctgctgctgcagaggctctctctctctttctctccagcttcgcgccgctgccgcgacctaccatggagctctgcctcgccgcgcgcgccgggacgacggcggccgcgtgccggaggagggcaccgacgactacaggcgtgccgaagaagaagaggcacggcggcggcaccgtgcgcgtacggtgcgcggcgacggcgcccatgggggagaagacggagtaccgggacggcccgctggagcgcgcgttcatggggctgttcgcgcgcaagatggagaagtacgcggcgaagaagccggcggcgcaggcgaaggaggagagggcggtgtgggagtgggactacgagagcttcgtggacgtgtcgcggcgggtgatgctggggcgcacgcgcgcgcagcagcagcaggcggtgcgcgaggtgctgctgtccatgctgccccccggcgcgccggcgcagttccggcggctgttcccgccgacgcggtgggcctgcgagttcaacgcggcgctgaccgtgcccttcttccgctggctcgtcggcccctcggaggtggtggaggtggaggtcggcggcgtccggcagcgcagcggggtgcgcatcgagaagtgccggtacctggagagcagcggctgcgtggggatgtgcgtcaacatgtgcaaggtccccacgcaggacttcttcaccaacgagttcgggctccccctcaccatgaacccaaacatgagctgcgagatgatatacggccaggtgccgcctccgttggaagaggacccggcgtcgaagcaagcttgctacccgagcctctgttccatgtcgacgccatctgccccggcctgtccgaagcttcagtaggtccatacatgcatgtgcagagtttgccggccggacttgggatggaaaaagtatcattagtatttttttatacagaaatgtagcttgtaaactattagtaaagttacatacaatttgttctgagccaggacagagcactctgtaataaagaatacttttctcaaacccttggtatgagagggtacaatgacgccactacatattggagcctttggtatgtctgggtatgtgtttgtaaacgggtgccgatggagtgggctgggcctggattgtacgtactcaaacatattggaggcccaactcctcgtcgcatttgtatgtagtgggctcaaaaaccgttaggtacaacaaggccgtcgctgcatcctcgattctttctttctttctttctttttgcatcttttcagtgacaag

SEQ ID NO: 213919 - DNA, 1291 bp, Zea Mays
tgtctgccggatttgttggatatatcgctgcaggtttccaggactccgacgtgttcatccactgccacaaggcaacgaaatgtcggattgttaatggtgcaaacgctaccgtgatatggaaggggatggttgttattttaccaatcttgtgaattgaggatttgaaccttttgaagacatctctcaatcaccagttcacttgcaacagccaatctgtacaaaggataagaacacctcatccaagccaaccctaaagcacataggtaaaaatttcagtgaagaagaagatagacacaagggactaatcaaacaagaggcacgttttggaaaagaatatatttgttctctgaggcgaatagagaaaattgtcccaaacgtactgaaaattctttgctgcatcgttggagttgtatccaagatgctgtaagttatgtggatgttgcaatagtattgagactagaaatcaaagcggtttggctgttcatgatagggtggagcaagctgagaagctttttaaagaacaagatccccacaacaagtcttttcaattcaagcattgctggctgttgttgaggaaccaaccaaaatggcatgacaagctaaatcaattagttaccacaaaaaactagtaacaagaagcagaaaacaaccagaaaaatcaagtctaggccttgttgacctatcaatgaaggaggttaatgatgctgctcctaatgcaattgagattccagagatagaaccatcacaaagacctttgggtaagaagaaggcaaaagaggcggcacgtcagggtggcaatgatgcttgcaaagaagcattgaagtttctgtaggcaaaaaagattgaggatgatgcagagaaggagatgaagagagaagaaagacatgcaaagtcatttgctctggacaaagagatgcttgaactagaaaaggagaggattgcgctaaagaaggagaaggttgccaacgaggcaaacaataatttcttgaagaggattgcagaagaagatagaataatgaccattgatctcagtgccatgaatgagatgcagcagcaatattacctgagcattcaagctgagattatggctcgtcgcatgaattagatcatagctcactgctagccttgttcttaatttagtttctagaggcattctattgtacgaactattgtcattgttaattttaattgcatgaactatgtgtcttgagttatcagcattgtaagaactatttcggttgtgatgttaatttaaagaatattaagttcctaattctgtacaaggtcagtg

SEQ ID NO: 213920 - DNA, 1407 bp, Zea Mays
ctggttccaacctgtgtgctgaaggaacaatatgtccaatagggccacccattggtgttatgcctgtcagcgcccaattcgtcttcgcgggcaggatatcatatgtcccaactgcagtgatggttttatccaagaaatcagtgagatgggtggcgtactgaacacttatgggctaactgaaccggactttgaagagcgccaggccagaagatttggaatgatggatgccatatcttccctcatgcggcaacggctgtcagaaataggaagggatagtttgtttgatattcacggtagacaagggacaggtactgaatatggaaggaggtcaactgctattcctacgctggtatttggtggcatcccttctcctgcagttggtagcagtgatatcaatgttgtcatcagggaaggccgcagagctggcgctgcccgtccgaatttcagtagcttagttgttggtcccagtctggaagctctatttgagcagctactactccagaacaaccgtcaaggcccaccacctgctccacagtcagctattgactccatgcctgtggtaaagataaatcgcaggcatcttgacgaagatccacagtgtgcagtttgcaaagacaaattcgaggttggagcagaggcgcgggagatgccgtgcaagcacttgtaccatactgactgcatcatcccctggctggttcagcacaattcctgccctgtttgccgtcatccgctgccatcacagcgatcaggcagtagtaccagcagcgcccgtgtgccttcagcatactacaacgaaacagcttgccctcctgcggtcgccagggcagatttcgatcctgtgccttcagcatactacaacgaaacagcaactgatcctcctgcggtcaccagagcagatttcgatcctgctccaggaaactacggcagcgaaagccaggaaagtcacgtccccttctcctttctctggccatttggcccgtcgagttcttaccaatatgaagaaaatgttgatgaacctgcagtatacgatccaaaccagatagcatattctgcgtggcactatgaccactgactgaaaccctgagttaaaatcaagatatctgcaattcgtgccttgagctctcagctttggtgaggcaaagggctgcttgccgtataaaaaatggatggttattgtgttcagtgcatacccttgctacgcatgtccgttgtggagatatcagctgtgtatagaactgggcgcaataaactctgctgtaatgcccgtatatattccttttcggtatatcaagtctaaagctacataatcctgtatgtgcagtaatcggtgaactgagtgcatccagaatatcatgtcatgataaacatgattataattacatggttgtctttttagactgaacacag

SEQ ID NO: 213921 - DNA, 1076 bp, Zea Mays
ccctacacctcttcgcgaaaagacaagctccaagacaattaagaagcttgccaaccctaatgcacctcttggttacacattgtgcttcctcaacttagcttttgatggatatactaactcgacccaagatttaataaagtcaaggtacccaaaaacaaacccatgggatataatgcttggcatgaacctctgggggaccatatataatgctgtaattatgtttgttgcgccattactattcagtaactggccatatgcaaatggttttgaggcattgagattttgccaggagaacccagaggtggcctgggacattttcctattctgcctatgtggcgccgtggggcagaacttcatcttcttaaccatcagccggtttggctctcttactaacacaacaatcactaccacccgtaaattcatgagcattgtggtttcatccgtcatcagtggcaatccattatctttgaagcaatggggtagtgttgtgatggtcttcttaggcctctctatccaaatatatctcaaatggaagagaaagaaaggcagagagcacaaggagtaagcttgattcttcaaccttttctgatttgtaacttcaattggacagatctcttgtgaggttgaccaggataacgttaatgcagtctgtttgaaattaggaacttttacatggattattatgagtgataccaagtgtgaggctgagctattggtaacagctctaatttatgttctagagggaggattcatgtgtttcacttaaatgttgatctcgtggatttgtcttatgctactagaagaaaatacccacctaaacaatataaggaatatacgaatagtccttaactcaggagcctaactcggtgaacatagcagtttttttcttacttgtggagcataaatttaactgatgattcctttttttatcttttaaatttgaatttgattttaaaattcgaacctgaaaactatattgaaatgctcattgaatgaagtggagaagatggcagaagcacaggacttaaaatcagcataggacttcaaattagatcatatggtcgtctgctttcttc

SEQ ID NO: 213922 - DNA, 1691 bp, Zea Mays
gttacgttgggctcctacataacacgcgcccccgcttccactcggcgaccaccggtccaccgcgcatcgaacccccacttgtgctgattctgctgatccctcgccgacaacggccggagaatcgacaccatggccgctgcgcgccggggccgtggcgacggcgccaacggcgtcgtccgtccccgcccccgcgaccgcggcatcggcggcgggagcatggcggggcgcgtggccgtcctcgccttctgtgtcgcagggatctggtccgcctacatctaccagggcgtcctccaggagactctatcgacgaagcggttcgggccggatgcgcggcggttcgagcacctcgcgttcctcaacttcgcgcagaacgtcatctgcttcgtctggtccttcataatgattaagctgtggtcgggcgggagtagctccaatggcagcgcaccgatatggaagtactggggcgtcagcgtcaccaataccatcgggccgaccatggggatcgaggctctcaagtacatcagctacccggctcaggtgttggcaaaatcttctaagatgattcctgtacacacttccagagtatttatgcacctttcttgttgccggcggtgtgtcctcctttgcgttgttgaagacaagctccaagacaattaagaagcttgccaaccctaatgcacctcttggttacacattgtgcttcctcaacttagcttttgatggatatactaactcgacccaagatttaataaagtcaaggtacccaaaaacaaacccatgggatataatgcttggcatgaacctctgggggaccatatataatgctgtaattatgtttgttgcgccattactattcagtaactggccatatgcaaatggttttgaggcattgagattttgccaggagaacccagaggtggcctgggacattttcctattctgcctatgtggcgccgtggggcagaacttcatcttcttaaccatcagccggtttggctctcttactaacacaacaatcactaccacccgtaaattcatgagcattgtggtttcatccgtcatcagtggcaatccattatctttgaagcaatggggtagtgttgtgatggtcttcttaggcctctctatccaaatatatctcaaatggaagagaaagaaaggcagagagcacaaggagtaagcttgattcttcaaccttttctgatttgtaacttcaattggacagatctcttgtgaggttgaccaggataacgttaatgcagtctgtttgaaattaggaacttttacatggattattatgagtgataccaagtgtgaggctgagctattggtaacagctctaatttatgttctagagggaggattcatgtgtttcacttaaatgttgatctcgtggatttgtcttatgctactagaagaaaatacccacctaaacaatataaggaatatacgaatagtccttaactcaggagcctaactcggtgaacatagcagtttttttcttacttgtggagcataaatttaactgatgattcctttttttatcttttaaatttgaatttgattttaaaattcgaacctgaaaactatattgaaatgctcattgaatgaagtggagaagatggcagaagcacaggacttaaaatcagcataggacttcaaattagatcatatggtcgtctgctttcttc

SEQ ID NO: 213923 - DNA, 2430 bp, Zea Mays
cgcgtgcgtgatggtttttttcttgttagcacctctatttgctctcctcccgacgagtgtgattaacggaaagcactgtttgactagtccttgctagccctcctctctctctctctctcttacttatctactcgtttcctcttcctttccgtaaagattgcacacaaaaactattggatcttttcccctttcgatgtgctcatctcatgtgtggttctgtgactgttgagagagaggtgggcgaggcagccatacgaagttggtggtcggagccagatctgcttggatgcatagtgaaagggccggagatcggcacggcacctacctccggcggcgggcgacggctgcttcttctagatctggaaactaatgtttcttctccgatccagcaggtatcatctgaagaaagagaaagacaggttcttggaagccaaatcaagagttgatgatgccttcagaagaaaggaataccttgcattagtggattcttacatgaaggtaactaagatggaatgattttcccacaaagaaagagcacaaaataaattgaattctagaagttaattttgtacaatttaatttttctgcatgtaataatgattaacatgcatattttcctttggggggaggcaaaggacctgtttgttgaagttgatgtgttcttttagttgggtttgtttcttcaatgctgtgttcgtgaagatcaacaaggcttactattaacatgcttcgcagggttgagccatatgttgcacactggtaagttttcttagctaatttagttcatgtcttcctgcttattctggtagatcatcccctgcaagtacccagctgaaaacagattatgctgttgtacttgtgtcttgtatgtgaatttacaatagaatttgtctccttttgtttgtttaaatgcatgagtagtattgatccagggtttcagagaacctgaactaataaataaataaataaataatcctagtgaaagtaggccttttggaatttctttcaaaggatagaaatgcctgcaggctgcagctatatatccaagccagtgggtaaggtgagtccatatacttttaattgattttgacgttgttctgatgagcgcactatgctctttcttagcttgcatgcagaatgagctgttatgtgctgaacttgaatatgtgcaaatagggaacatattaggtgcaaaccaattatttggtgcaaatcgtgtaaacaattatgataatttttttaaaacaactctcccaccatcatcagttttcaaaatgacccttccatctttcacctccaccaacgtgtttgtttttgtacagtttgcaccaagtggttgatttgcacataatatatatgttctctaaacatgttagtctttacttattttccctgctagctagtttgctcttgttggccgtgtcataaattttgttctcaggagatagatctacacagtgacaacatgtacctcaggagcacaagatatatatgcagatgtaatagcttgttcctgaccaattcctcgctgtattatgctgattgtgggagcacagtgttctgtagtggtcaggcgctaaagaacattgcgccaaccttattcatgaaagcatgccaagcccttacaaataatcgctggatgcacttttgttctccttacacacatgaggaagagataaaagaattcatttccctccggcaagacaacctacaaaagcgaggatggccttgcaatccaatttgttgtctttgcaacttatcacaagaaactatgcctcatttaggcaaagactgcccgtttttgtagagttgtatgattggtggaagagattaaggaatcgttgctgcaaggagtcaaagaagattttcgatggactcctcatctctttctggtggaatatatggttagaaagaaataacagaatctttcatagacttcaaagatctgctatccaggttatgcaattggtgaaagatcaaattagaaacgtcatattcacaactgcaactagtgcgtggtgatctggatgaaaacagtcaggggaaggcagaggtttttgtctaacatggagtttttttcagtgattttagatattcttacaagctgtaacacaatcaagcagataagatcctgctgatatatatgaattaagcttcttatctttttagttccagtagcaaagtacgtttacttgcagtttgttggagggacttgtgatggcttttgatattacttcatgagtcaattgctaattagcaattggctactatatataatctgatgccatgtatgatatatataagaccacaatttttttttcttttgttttttaatttgtcatcacaggcgcgcgttgtctttgcactgtctgtgatacgtgctcatcacaggcgcggtgttttttgcacgtatgtgataggttgcggtcc

SEQ ID NO: 213924 - DNA, 3122 bp, Zea Mays
ctttctgtcagctctctctctcatccttgggacttgttccgccgtatacatccatcaccgccgtcccacttccgtccatcgctgcgcgccgatgatgcgtcgccgtcgtcgtgcagtgcaggctgtgcagcctcacatcggtcgccgtggtggcactgtttgctctgaggcgcctgccggcctggtcgtgtccctacctgaaaccttatcttgtgccctgctcggattacgatgagctctgctagctctttggaataagagaggtgggcgaggcagccatacgaagttggtggtcggagccagatctgcttggatgcatagtgaaagggccggagatcggcacggcacctacctccggcggcgggcgacggctgcttcttctagatctggaaactaatgtttcttctccgatccagcagttttagcaaacaccatatatagcaatatgtggacatgctcattgtacctttccccctactaatcatgcaaaggtatcatctgaagaaagagaaagacaggttcttggaagccaaatcaagagttgatgatgccttcagaagaaaggaataccttgcattagtggattcttacatgaaggtaactaagatggaatgattttcccacaaagaaagagcacaaaataaattgaattctagaagttaattttgtacaatttaatttttctgcatgtaataatgattaacatgcatattttcctttggggggaggcaaaggacctgtttgttgaagttgatgtgttcttttagttgggtttgtttcttcaatgctgtgttcgtgaagatcaacaaggcttactattaacatgcttcgcagggttgagccatatgttgcacactggtaagttttcttagctaatttagttcatgtcttcctgcttattctggtagatcatcccctgcaagtacccagctgaaaacagattatgctgttgtacttgtgtcttgtatgtgaatttacaatagaatttgtctccttttgtttgtttaaatgcatgagtagtattgatccagggtttcagagaacctgaactaataaataaataaataaataatcctagtgaaagtaggccttttggaatttctttcaaaggatagaaatgcctgcaggctgcagctatatatccaagccagtgggtaaggtgagtccatatacttttaattgattttgacgttgttctgatgagcgcactatgctctttcttagcttgcatgcagaatgagctgttatgtgctgaacttgaatatgtgcaaatagggaacatattaggtgcaaaccaattatttggtgcaaatcgtgtaaacaattatgataatttttttaaaacaactctcccaccatcatcagttttcaaaatgacccttccatctttcacctccaccaacgtgtttgtttttgtacagtttgcaccaagtggttgatttgcacataatatatatgttctctaaacatgttagtctttacttattttccctgctagctagtttgctcttgttggccgtgtcataaattttgttctcaggagatagatctacacagtgacaacatgtacctcaggagcacaagatatatatgcagatgtaatagcttgttcctgaccaattcctcgctgtattatgctgattgtgggagcacagtgttctgtagtggtcaggcgctaaagaacattgcgccaaccttattcatgaaagcatgccaagcccttacaaataatcgctggatgcacttttgttctccttacacacatgaggaagagataaaagaattcatttccctccggcaaggtatcaacagcactcaatgatctcgacgatactattttatggaggtggagttacagttcaagtagtgcatacaaaattcagttcacaacgaatttttgtaaaatcaaaatttctcctatatggaaagcgagaattgagccaaaatgtcgttttttcgtatggaccatgttgtataacataattttgactgcagacaacctacaaaagcgaggatggccttgcaatccaatttgttgtctttgcaacttatcacaagaaactatgcctcatttaggcaaagactgcccgtttttgtagagttgtatgattggtggaagagattaaggaatcgttgctgcaaggagtcaaagaagattttcgatggactcctcatctctttctggtggaatatatggttagaaagaaataacagaatctttcatagacttcaaagatctgctatccaggttatgcaattggtgaaagatcaaattgtgagttttagtgtatgcaattggtgaaagatcaaattgtgagttttagtgtatgttagattgagttagtgtatgtttttctctttttttgttttttcttttgctcagtcttcagtatctatttctcttctaatatattgatgaggcaagtcttttgccgcttcctttaaaaaaagagtaattctaatcttcatacactagttttcagtgtagcctttttcctatgtggttaactgtccatagattatgccatacctctcctaaactggacttcaacgatgtgaggtccaatcttattcatctcgagcggctagattttcatatcatagaagtgatgatttatctcaagtttgctcttactcatcttttgtttatttatattttttatttttggattcagagaaacgtcatattcacaactgcaactagtgcgtggtgatctggatgaaaacagtcaggggaaggcagaggtttttgtctaacatggagtttttttcagtgattttagatattcttacaagctgtaacacaatcaagcagataagatcctgctgatatatatgaattaagcttcttatctttttagttccagtagcaaagtacgtttacttgcagtttgttggagggacttgtgatggcttttgatattacttcatgagtcaattgctaattagcaattggctactatatataatctgatgccatgtatgatatatataagaccacaatttttttttcttttgttttttaatttgtcatcacaggcgcgcgttgtctttgcactgtctgtgatacgtgctcatcacaggcgcggtgttttttgcacgtatgtgataggttgcggtcc

SEQ ID NO: 213925 - DNA, 3659 bp, Zea Mays
tcccgctccccgatcccgcacaacagtcccgctccagatcgcgccccgaaaccgtcgcccccggcctcccctcgcctcactcgattctggctggccacaaactccgccccctgcccctaccccgattatgccgccgtcgtccgatcccacccgcaaacgctgctccccgcctcgaggctcgtcggaacggacgcctggatgtcgcggctgcaacccaccgccgcgcagggaggctccgccaccagcaactcagaggatgcgcggaggccggagggcatgggagatccgccacctcctcctcggcccacgacaaaaatggcgtgggagatccgccacctcacctcctcccattcccgcgcccgcgcccgcgcctgatatggaaggtccgccgaagggactcggacgtcgaggccatggctgagccgcaccacttctccccctgcctcgcgcgcggcggccgagatggtgatggctgggttgttcgggatggtggtcctacctgccctccctgctatcctcgccccaaatcgacgagaatcatgcagcccaaatctaaggtggaggcgcctgcactgtcgatggaggtgtcgagtctgcgatggtgtctgtagatgggaaggcatggtgtgcagcggcagcggccaggtggtgtcgctgagcctgccctcctacaggctcactggcacgctctccacggccatcgggggacctctcgttcctgcgtatgctgaacctgagctccaatcggttccgcggggaggtcccagcgaccatcgttcgccttgcgcatctgcaggcgctagacctgagctacaacgccttcactgaattccagagctgcgattcccgaggccatggagcagcagaaaatatcaattgccaaaagcagccattacaatagtactcattttagggacttcatttcttgcagctgccaatccaattgcaggatgctatgactctcttaagtgatcatgaacttacacattgaaatactggtgggcctcgagaggccaggaggtggagaggagttcaacaagtactacatcatgtctgctctcctatccgtggattggtgagttagtttggatgtttgcactgggtattgttatccatcaaccccaaaccaattgcagttccctttagtcatgtcatgtttaatttccctataaatttcgtactgcatttcatatatatatgtatcaaatatggacccctgaaactgaagtaggcattccttttcaattcgtgttgcttcttcatttcctttatcagtaagggcatgtccagatccattagcactaaaatttagcagctaaaattagtacgagtgggtctaaacggacctgctaattatttgttgaagggcgtgaagggctgatattagtttcattagcagatttggagttgctaatatgtgataataattcgtatgcatcttaaactcactatctaattacctattagcaggtgagtgcaaacagcttcctgctaaaagttagcacggaatcggttgatacttattgatggtgcctgaaatatcctatagatgtctttagtagaggatccaaataatggcctgcaagggtttcttgaatcggatcgcacaaaactccatctgcttcagaattgagctaagcgcatcctaacatcttgactcctatatcgatcaattatttctgttactcatttgattctttagtttcgtagagggaggaacatcgtgccatcgtgggatgcaggccccaaggaacaccagatattttgaggaaatatttatgggtcatttgattttacttatgaggtttagatcaaatgatagatgatgtcccgcatgattttggaattgcatttgtattgtataaacctgaatataaatgtcattcttaaatttgtgaagtagtctgaatgtctgatagcatcaaaaattggtgaagtagtctgatagcaacataaactataattaattgagatcttattactcacactagatcttgctattattaatcatggtacaacactgtcctcgatgtggttatgatcttctattgtaatggcactaacttcttatcaggaaaacatcaaaaacaatttggaaacaatttatttggacagggagaacctgggtgggttttcggattgtgcaaactgattatatgttgctaagtgcaggacatttgggaatttttctgagggtgaaatggtgccttttggaccctaaactatggagagattagtaggatgttgcacatatgttccaagcgctaggactgaaaggatgccacttgctattttgctgaattataacctatgcttaatatagatgattcttcattaagtgaacaggtagctgacccacattcttgctgaattataacctatgcttaatcttggatccaatcaacaaacaaataagtgccacaagcaaacccaccctgagaaaaatacagtgcttttctttggttccacattcttggtttccaatgcatgtttctcttcttttgatatactgttttcttttaccgacacatctctatctttatatgtgtccaaagctccaaaatgaaatgatttagtgcttgcactgaaaaaggaacattctgtatgctaattctctaaaatgtgtatggctgaaatcgatatatttgcaacatacgaatgaccttttttaacaatttgatggagcagaatggaggataatctaccagttaatgtccgggaatatcaagaacttgctaagaaattaattctaaaaaaagtcattacacgctaagaaaaataatgtgcaagctactgaatttacaatcaagcaagggtcgaggagtgggagggagggtactgggccctaaaggagaagtaccgaaccgggctaaacccgcaggagaaggtgaagctagagaaggagcccatggggcagttcgtggatgacgacatcagggacctgccaagatctccatggaggagatcgacgccgccaagcccaccaaggacaacgtcgacgtccgcctcaagtggctcggcctcttccaccgctacaagcaccagtgtacacccactgattctacaccccctgcaatggttgttgttgctgttggtaggagcgaccccgcgagcgtgacacagacaaagcagccttcggtgccagttcagaccacttatctggtctcaaggttcttcatggccttgactctcaaagatcagagtattcttgtcaatggggatatcaatgaaggcttgcttcgcctttgtcacaagcttcatcgtttaaggaaagaatatgcatacacatttgaaagcacaagcttatcttatcagtgttctgaggttagcaggatcttgcaaggctagggacccaggggctacacatcttataactgaaaaacacatgagcagtatgttgttaacacttttttttcttgttcgtgtttcatagatagaggtatataatatggagacgaataatatttaaaccattagagacccatgtaacaataaaacagattgtttagctattatgctcactcaatatggagatcctcaagtatcttagaatcagttgggcaaacacaaatttacagtcatagttttctttgatggtttttacaaatacttggtttgcactattgatgaaaacatggtattgtttcaagccaaccttg

SEQ ID NO: 213926 - DNA, 3791 bp, Zea Mays
tcccgctccccgatcccgcacaacagtcccgctccagatcgcgccccgaaaccgtcgcccccggcctcccctcgcctcactcgattctggctggccacaaactccgccccctgcccctaccccgattatgccgccgtcgtccgatcccacccgcaaacgctgctccccgcctcgaggctcgtcggaacggacgcctggatgtcgcggctgcaacccaccgccgcgcagggaggctccgccaccagcaactcagaggatgcgcggaggccggagggcatgggagatccgccacctcctcctcggcccacgacaaaaatggcgtgggagatccgccacctcacctcctcccattcccgcgcccgcgcccgcgcctgatatggaaggtccgccgaagggactcggacgtcgaggccatggctgagccgcaccacttctccccctgcctcgcgcgcggcggccgagatggtgatggctgggttgttcgggatggtggtcctacctgccctccctgctatcctcgccccaaatcgacgagaatcatgcagcccaaatctaaggtggaggcgcctgcactgtcgatggaggtgtcgagtctgcgatggtgtctgtagatgggaaggcatggtgtgcagcggcagcggccaggtggtgtcgctgagcctgccctcctacaggctcactggcacgctctccacggccatcgggggacctctcgttcctgcgtatgctgaacctgagctccaatcggttccgcggggaggtcccagcgaccatcgttcgccttgcgcatctgcaggcgctagacctgagctacaacgccttcactgaattccagagctgcgattcccgaggccatggagcagcagaaaatatcaattgccaaaagcagccattacaatagtactcattttagggacttcatttcttgcagctgccaatccaattgcaggatgctatgactctcttaagtgatcatgaacttacacattgaaatactggtgggcctcgagaggccaggaggtggagaggagttcaacaagtactacatcatgtctgctctcctatccgtggattggtgagttagtttggatgtttgcactgggtattgttatccatcaaccccaaaccaattgcagttccctttagtcatgtcatgtttaatttccctataaatttcgtactgcatttcatatatatatgtatcaaatatggacccctgaaactgaagtaggcattccttttcaattcgtgttgcttcttcatttcctttatcagtaagggcatgtccagatccattagcactaaaatttagcagctaaaattagtacgagtgggtctaaacggacctgctaattatttgttgaagggcgtgaagggctgatattagtttcattagcagatttggagttgctaatatgtgataataattcgtatgcatcttaaactcactatctaattacctattagcaggtgagtgcaaacagcttcctgctaaaagttagcacggaatcggttgatacttattgatggtgcctgaaatatcctatagatgtctttagtagaggatccaaataatggcctgcaagggtttcttgaatcggatcgcacaaaactccatctgcttcagaattgagctaagcgcatcctaacatcttgactcctatatcgatcaattatttctgttactcatttgattctttagtttcgtagagggaggaacatcgtgccatcgtgggatgcaggccccaaggaacaccagatattttgaggaaatatttatgggtcatttgattttacttatgaggtttagatcaaatgatagatgatgtcccgcatgattttggaattgcatttgtattgtataaacctgaatataaatgtcattcttaaatttgtgaagtagtctgaatgtctgatagcatcaaaaattggtgaagtagtctgatagcaacataaactataattaattgagatcttattactcacactagatcttgctattattaatcatggtacaacactgtcctcgatgtggttatgatcttctattgtaatggcactaacttcttatcaggaaaacatcaaaaacaatttggaaacaatttatttggacagggagaacctgggtgggttttcggattgtgcaaactgattatatgttgctaagtgcaggacatttgggaatttttctgagggtgaaatggtgccttttggaccctaaactatggagagattagtaggatgtatggactctttgtttcaattatgtggtaaatcagtttagctgaaaatagagtacttttaaaggcataaatactcctatttctgtacttgagatcacatttatcctgatataggttgccattcatgatatttctaggttgcacatatgttccaagcgctaggactgaaaggatgccacttgctattttgctgaattataacctatgcttaatatagatgattcttcattaagtgaacaggtagctgacccacattcttgctgaattataacctatgcttaatcttggatccaatcaacaaacaaataagtgccacaagcaaacccaccctgagaaaaatacagtgcttttctttggttccacattcttggtttccaatgcatgtttctcttcttttgatatactgttttcttttaccgacacatctctatctttatatgtgtccaaagctccaaaatgaaatgatttagtgcttgcactgaaaaaggaacattctgtatgctaattctctaaaatgtgtatggctgaaatcgatatatttgcaacatacgaatgaccttttttaacaatttgatggagcagaatggaggataatctaccagttaatgtccgggaatatcaagaacttgctaagaaattaattctaaaaaaagtcattacacgctaagaaaaataatgtgcaagctactgaatttacaatcaagcaagggtcgaggagtgggagggagggtactgggccctaaaggagaagtaccgaaccgggctaaacccgcaggagaaggtgaagctagagaaggagcccatggggcagttcgtggatgacgacatcagggacctgccaagatctccatggaggagatcgacgccgccaagcccaccaaggacaacgtcgacgtccgcctcaagtggctcggcctcttccaccgctacaagcaccagtgtacacccactgattctacaccccctgcaatggttgttgttgctgttggtaggagcgaccccgcgagcgtgacacagacaaagcagccttcggtgccagaccacttatctggtctcaaggttcttcatggccttgactctcaaagatcagagtattcttgtcaatggggatatcaatgaaggcttgcttcgcctttgtcacaagcttcatcgtttaaggaaagaatatgcatacacatttgaaagcacaagcttatcttatcagtgttctgaggttagcaggatcttgcaaggctagggacccaggggctacacatcttataactgaaaaacacatgagcagtatgttgttaacacttttttttcttgttcgtgtttcatagatagaggtatataatatggagacgaataatatttaaaccattagagacccatgtaacaataaaacagattgtttagctattatgctcactcaatatggagatcctcaagtatcttagaatcagttgggcaaacacaaatttacagtcatagttttctttgatggtttttacaaatacttggtttgcactattgatgaaaacatggtattgtttcaagccaaccttg

SEQ ID NO: 213927 - DNA, 3627 bp, Zea Mays
tcccgctccccgatcccgcacaacagtcccgctccagatcgcgccccgaaaccgtcgcccccggcctcccctcgcctcactcgattctggctggccacaaactccgccccctgcccctaccccgattatgccgccgtcgtccgatcccacccgcaaacgctgctccccgcctcgaggctcgtcggaacggacgcctggatgtcgcggctgcaacccaccgccgcgcagggaggctccgccaccagcaactcagaggatgcgcggaggccggagggcatgggagatccgccacctcctcctcggcccacgacaaaaatggcgtgggagatccgccacctcacctcctcccattcccgcgcccgcgcccgcgcctgatatggaaggtccgccgaagggactcggacgtcgaggccatggctgagccgcaccacttctccccctgcctcgcgcgcggcggccgagatggtgatggctgggttgttcgggatggtggtcctacctgccctccctgctatcctcgccccaaatcgacgagaatcatgcagcccaaatctaaggtggaggcgcctgcactgtcgatggaggtgtcgagtctgcgatggtgtctgtagatgggaaggcatggtgtgcagcggcagcggccaggtggtgtcgctgagcctgccctcctacaggctcactggcacgctctccacggccatcgggggacctctcgttcctgcgtatgctgaacctgagctccaatcggttccgcggggaggtcccagcgaccatcgttcgccttgcgcatctgcaggcgctagacctgagctacaacgccttcactgaattccagagctgcgattcccgaggccatggagcagcagaaaatatcaattgccaaaagcagccattacaatagtactcattttagggacttcatttcttgcagctgccaatccaattgcaggatgctatgactctcttaagtgatcatgaacttacacattgaaatactggtgggcctcgagaggccaggaggtggagaggagttcaacaagtactacatcatgtctgctctcctatccgtggattggtgagttagtttggatgtttgcactgggtattgttatccatcaaccccaaaccaattgcagttccctttagtcatgtcatgtttaatttccctataaatttcgtactgcatttcatatatatatgtatcaaatatggacccctgaaactgaagtaggcattccttttcaattcgtgttgcttcttcatttcctttatcagtaagggcatgtccagatccattagcactaaaatttagcagctaaaattagtacgagtgggtctaaacggacctgctaattatttgttgaagggcgtgaagggctgatattagtttcattagcagatttggagttgctaatatgtgataataattcgtatgcatcttaaactcactatctaattacctattagcaggtgagtgcaaacagcttcctgctaaaagttagcacggaatcggttgatacttattgatggtgcctgaaatatcctatagatgtctttagtagaggatccaaataatggcctgcaagggtttcttgaatcggatcgcacaaaactccatctgcttcagaattgagctaagcgcatcctaacatcttgactcctatatcgatcaattatttctgttactcatttgattctttagtttcgtagagggaggaacatcgtgccatcgtgggatgcaggccccaaggaacaccagatattttgaggaaatatttatgggtcatttgattttacttatgaggtttagatcaaatgatagatgatgtcccgcatgattttggaattgcatttgtattgtataaacctgaatataaatgtcattcttaaatttgtgaagtagtctgaatgtctgatagcatcaaaaattggtgaagtagtctgatagcaacataaactataattaattgagatcttattactcacactagatcttgctattattaatcatggtacaacactgtcctcgatgtggttatgatcttctattgtaatggcactaacttcttatcaggaaaacatcaaaaacaatttggaaacaatttatttggacagggagaacctgggtgggttttcggattgtgcaaactgattatatgttgctaagtgcaggacatttgggaatttttctgagggtgaaatggtgccttttggaccctaaactatggagagattagtaggatgttgcacatatgttccaagcgctaggactgaaaggatgccacttgctattttgctgaattataacctatgcttaatatagatgattcttcattaagtgaacaggtagctgacccacattcttgctgaattataacctatgcttaatcttggatccaatcaacaaacaaataagtgccacaagcaaacccaccctgagaaaaatacagtgcttttctttggttccacattcttggtttccaatgcatgtttctcttcttttgatatactgttttcttttaccgacacatctctatctttatatgtgtccaaagctccaaaatgaaatgatttagtgcttgcactgaaaaaggaacattctgtatgctaattctctaaaatgtgtatggctgaaatcgatatatttgcaacatacgaatgaccttttttaacaatttgatggagcagaatggaggataatctaccagttaatgtccgggaatatcaagaacttgctaagaaattaattctaaaaaaagtcattacacgctaagaaaaataatgtgcaagctactgaatttacaatcaagcaagggtcgaggagtgggagggagggtactgggccctaaaggagaagtaccgaaccgggctaaacccgcaggagaaggtgaagctagagaaggagcccatggggcagttcgtggatgacgacatcagggacctgccaagatctccatggaggagatcgacgccgccaagcccaccaaggacaacgtcgacgtccgcctcaagtggctcggcctcttccaccgctacaagcaccagtgttgttgttgctgttggtaggagcgaccccgcgagcgtgacacagacaaagcagccttcggtgccagttcagaccacttatctggtctcaaggttcttcatggccttgactctcaaagatcagagtattcttgtcaatggggatatcaatgaaggcttgcttcgcctttgtcacaagcttcatcgtttaaggaaagaatatgcatacacatttgaaagcacaagcttatcttatcagtgttctgaggttagcaggatcttgcaaggctagggacccaggggctacacatcttataactgaaaaacacatgagcagtatgttgttaacacttttttttcttgttcgtgtttcatagatagaggtatataatatggagacgaataatatttaaaccattagagacccatgtaacaataaaacagattgtttagctattatgctcactcaatatggagatcctcaagtatcttagaatcagttgggcaaacacaaatttacagtcatagttttctttgatggtttttacaaatacttggtttgcactattgatgaaaacatggtattgtttcaagccaaccttg

SEQ ID NO: 213928 - DNA, 3344 bp, Zea Mays
caaccatccgttctaccattctataatcttagtcgttcgatcctacatttcagtcccgctccccgatcccgcacaacagtcccgctccagatcgcgccccgaaaccgtcgcccccggcctcccctcgcctcactcgattctggctggccacaaactccgccccctgcccctaccccgattatgccgccgtcgtccgatcccacccgcaaacgctgctccccgcctcgaggctcgtcggaacggacgcctggatgtcgcggctgcaacccaccgccgcgcagggaggctccgccaccagcaactcagaggatgcgcggaggccggagggcatgggagatccgccacctcctcctcggcccacgacaaaaatggcgtgggagatccgccacctcacctcctcccattcccgcgcccgcgcccgcgcctgatatggaaggtccgccgaagggactcggacgtcgaggccatggctgagccgcaccacttctccccctgcctcgcgcgcggcggccgagatggtgatggctgggttgttcgggatggtggtcctacctgccctccctgctatcctcgccccaaatcgacgagaatcatgcagcccaaatctaaggtggaggcgcctgcactgtcgatggaggtgtcgagtctgcgatggtgtctgtagatgggaaggcatggtgtgcagcggcagcggccaggtggtgtcgctgagcctgccctcctacaggctcactggcacgctctccacggccatcgggggacctctcgttcctgcgtatgctgaacctgagctccaatcggttccgcggggaggtcccagcgaccatcgttcgccttgcgcatctgcaggcgctagacctgagctacaacgccttcactgaattccagagctgcgattcccgaggccatggagcagcagaaaatatcaattgccaaaagcagccattacaatagtactcattttagggacttcatttcttgcagctgccaatccaattgcaggatgctatgactctcttaagtgatcatgaacttacacattgaaatactggtgggcctcgagaggccaggaggtggagaggagttcaacaagtactacatcatgtctgctctcctatccgtggattggtgagtgcaaacagcttcctgctaaaagttagcacggaatcggttgatacttattgatggtgcctgaaatatcctatagatgtctttagtagaggatccaaataatggcctgcaagggtttcttgaatcggatcgcacaaaactccatctgcttcagaattgagctaagcgcatcctaacatcttgactcctatatcgatcaattatttctgttactcatttgattctttagtttcgtagagggaggaacatcgtgccatcgtgggatgcaggccccaaggaacaccagatattttgaggaaatatttatgggtcatttgattttacttatgaggtttagatcaaatgatagatgatgtcccgcatgattttggaattgcatttgtattgtataaacctgaatataaatgtcattcttaaatttgtgaagtagtctgaatgtctgatagcatcaaaaattggtgaagtagtctgatagcaacataaactataattaattgagatcttattactcacactagatcttgctattattaatcatggtacaacactgtcctcgatgtggttatgatcttctattgtaatggcactaacttcttatcaggaaaacatcaaaaacaatttggaaacaatttatttggacagggagaacctgggtgggttttcggattgtgcaaactgattatatgttgctaagtgcaggacatttgggaatttttctgagggtgaaatggtgccttttggaccctaaactatggagagattagtaggatgtatggactctttgtttcaattatgtggttgcacatatgttccaagcgctaggactgaaaggatgccacttgctattttgctgaattataacctatgcttaatatagatgattcttcattaagtgaacaggtagctgacccacattcttgctgaattataacctatgcttaatcttggatccaatcaacaaacaaataagtgccacaagcaaacccaccctgagaaaaatacagtgcttttctttggttccacattcttggtttccaatgcatgtttctcttcttttgatatactgttttcttttaccgacacatctctatctttatatgtgtccaaagctccaaaatgaaatgatttagtgcttgcactgaaaaaggaacattctgtatgctaattctctaaaatgtgtatggctgaaatcgatatatttgcaacatacgaatgaccttttttaacaatttgatggagcagaatggaggataatctaccagttaatgtccgggaatatcaagaacttgctaagaaattaattctaaaaaaagtcattacacgctaagaaaaataatgtgcaagctactgaatttacaatcaagcaagggtcgaggagtgggagggagggtactgggccctaaaggagaagtaccgaaccgggctaaacccgcaggagaaggtgaagctagagaaggagcccatggggcagttcgtggatgacgacatcagggacctgccaagatctccatggaggagatcgacgccgccaagcccaccaaggacaacgtcgacgtccgcctcaagtggctcggcctcttccaccgctacaagcaccagtgtacacccactgattctacaccccctgcaatggttgttgttgctgttggtaggagcgaccccgcgagcgtgacacagacaaagcagccttcggtgccagttcagaccacttatctggtctcaaggttcttcatggccttgactctcaaagatcagagtattcttgtcaatggggatatcaatgaaggcttgcttcgcctttgtcacaagcttcatcgtttaaggaaagaatatgcatacacatttgaaagcacaagcttatcttatcagtgttctgaggttagcaggatcttgcaaggctagggacccaggggctacacatcttataactgaaaaacacatgagcagtatgttgttaacacttttttttcttgttcgtgtttcatagatagaggtatataatatggagacgaataatatttaaaccattagagacccatgtaacaataaaacagattgtttagctattatgctcactcaatatggagatcctcaagtatcttagaatcagttgggcaaacacaaatttacagtcatagttttctttgatggtttttacaaatacttggtttgcactattgatgaaaacatggtattgtttcaagccaaccttg

SEQ ID NO: 213929 - DNA, 1517 bp, Zea Mays
aattatttctgttactcatttgattctttagtttcgtagagggaggaacatcgtgccatcgtgggatgcaggccccaaggaacaccagatattttgaggaaatatttatgggtcatttgattttacttatgaggtttagatcaaatgatagatgatgtcccgcatgattttggaattgcatttgtattgtataaacctgaatataaatgtcattcttaaatttgtgaagtagtctgaatgtctgatagcatcaaaaattggtgaagtagtctgatagcaacataaactataattaattgagatcttattactcacactagatcttgctattattaatcatggtacaacactgtcctcgatgtggttatgatcttctattgtaatggcactaacttcttatcaggaaaacatcaaaaacaatttggaaacaatttatttggacagggagaacctgggtgggttttcggattgtgcaaactgattatatgttgctaagtgcaggacatttgggaatttttctgagggtgaaatggtgccttttggaccctaaactatggagagattagtaggatgtatggactctttgtttcaattatgtggttgcacatatgttccaagcgctaggactgaaaggatgccacttgctattttgctgaattataacctatgcttaatatagatgattcttcattaagtgaacagaatggaggataatctaccagttaatgtccgggaatatcaagaacttgctaagaaattaattctaaaaaaagtcattacacgctaagaaaaataatgtgcaagctactgaatttacaatcaagcaagggtcgaggagtgggagggagggtactgggccctaaaggagaagtaccgaaccgggctaaacccgcaggagaaggtgaagctagagaaggagcccatggggcagttcgtggatgacgacatcagggacctgccaagatctccatggaggagatcgacgccgccaagcccaccaaggacaacgtcgacgtccgcctcaagtggctcggcctcttccaccgctacaagcaccagtgtacacccactgattctacaccccctgcaatggttgttgttgctgttggtaggagcgaccccgcgagcgtgacacagacaaagcagccttcggtgccaggttcgatttggtttctgcaaagtttatcactcctacattttcacaattagtttctacaaattatatcactccatttcactcctatgaaattactgtgacttaatttcaatcgaggtcattcttcttgctccttcgctttgcttagcagtaaagacaataacttcctttaccttgctcaatagtttgccttttaatttgaacaaaaatctaatcacttgacattgcatgggaggtaagctcctgtttttcacaaactttatcggtggacagttcatagtcctaacagacccattagtccgatagaacagttagcattaggtaattattttggcattggcaattttgatctactcctatt

SEQ ID NO: 213930 - DNA, 3640 bp, Zea Mays
caaccatccgttctaccattctataatcttagtcgttcgatcctacatttcagtcccgctccccgatcccgcacaacagtcccgctccagatcgcgccccgaaaccgtcgcccccggcctcccctcgcctcactcgattctggctggccacaaactccgccccctgcccctaccccgattatgccgccgtcgtccgatcccacccgcaaacgctgctccccgcctcgaggctcgtcggaacggacgcctggatgtcgcggctgcaacccaccgccgcgcagggaggctccgccaccagcaactcagaggatgcgcggaggccggagggcatgggagatccgccacctcctcctcggcccacgacaaaaatggcgtgggagatccgccacctcacctcctcccattcccgcgcccgcgcccgcgcctgatatggaaggtccgccgaagggactcggacgtcgaggccatggctgagccgcaccacttctccccctgcctcgcgcgcggcggccgagatggtgatggctgggttgttcgggatggtggtcctacctgccctccctgctatcctcgccccaaatcgacgagaatcatgcagcccaaatctaaggtggaggcgcctgcactgtcgatggaggtgtcgagtctgcgatggtgtctgtagatgggaaggcatggtgtgcagcggcagcggccaggtggtgtcgctgagcctgccctcctacaggctcactggcacgctctccacggccatcgggggacctctcgttcctgcgtatgctgaacctgagctccaatcggttccgcggggaggtcccagcgaccatcgttcgccttgcgcatctgcaggcgctagacctgagctacaacgccttcactgaattccagagctgcgattcccgaggccatggagcagcagaaaatatcaattgccaaaagcagccattacaatagtactcattttagggacttcatttcttgcagctgccaatccaattgcaggatgctatgactctcttaagtgatcatgaacttacacattgaaatactggtgggcctcgagaggccaggaggtggagaggagttcaacaagtactacatcatgtctgctctcctatccgtggattggtgagttagtttggatgtttgcactgggtattgttatccatcaaccccaaaccaattgcagttccctttagtcatgtcatgtttaatttccctataaatttcgtactgcatttcatatatatatgtatcaaatatggacccctgaaactgaagtaggcattccttttcaattcgtgttgcttcttcatttcctttatcagtaagggcatgtccagatccattagcactaaaatttagcagctaaaattagtacgagtgggtctaaacggacctgctaattatttgttgaagggcgtgaagggctgatattagtttcattagcagatttggagttgctaatatgtgataataattcgtatgcatcttaaactcactatctaattacctattagcaggtgagtgcaaacagcttcctgctaaaagttagcacggaatcggttgatacttattgatatgtctttagtagaggatccaaataatggcctgcaagggtttcttgaatcggatcgcacaaaactccatctgcttcagaattgagctaagcgcatcctaacatcttgactcctatatcgatcaattatttctgttactcatttgattctttagtttcgtagagggaggaacatcgtgccatcgtgggatgcaggccccaaggaacaccagatattttgaggaaatatttatgggtcatttgattttacttatgaggtttagatcaaatgatagatgatgtcccgcatgattttggaattgcatttgtattgtataaacctgaatataaatgtcattcttaaatttgtgaagtagtctgaatgtctgatagcatcaaaaattggtgaagtagtctgatagcaacataaactataattaattgagatcttattactcacactagatcttgctattattaatcatggtacaacactgtcctcgatgtggttatgatcttctattgtaatggcactaacttcttatcaggaaaacatcaaaaacaatttggaaacaatttatttggacagggagaacctgggtgggttttcggattgtgcaaactgattatatgttgctaagtgcaggacatttgggaatttttctgagggtgaaatggtgccttttggaccctaaactatggagagattagtaggatgtatggactctttgtttcaattatgtggtaaatcagtttagctgaaaatagagtacttttaaaggcataaatactcctatttctgtacttgagatcacatttatcctgatataggttgccattcatgatatttctaggttgcacatatgttccaagcgctaggactgaaaggatgccacttgctattttgctgaattataacctatgcttaatatagatgattcttcattaagtgaacaggtagctgacccacattcttgctgaattataacctatgcttaatcttggatccaatcaacaaacaaataagtgccacaagcaaacccaccctgagaaaaatacagtgcttttctttggttccacattcttggtttccaatgcatgtttctcttcttttgatatactgttttcttttaccgacacatctctatctttatatgtgtccaaagctccaaaatgaaatgatttagtgcttgcactgaaaaaggaacattctgtatgctaattctctaaaatgtgtatggctgaaatcgatatatttgcaacatacgaatgaccttttttaacaatttgatggagcagaatggaggataatctaccagttaatgtccgggaatatcaagaacttgctaagaaattaattctaaaaaaagtcattacacgctaagaaaaataatgtgcaagctactgaatttacaatcaagcaagggtcgaggagtgggagggagggtactgggccctaaaggagaagtaccgaaccgggctaaacccgcaggagaaggtgaagctagagaaggagcccatggggcagttcgtggatgacgacatcagggacctgccaagatctccatggaggagatcgacgccgccaagcccaccaaggacaacgtcgacgtccgcctcaagtggctcggcctcttccaccgctacaagcaccagtgttgttgttgctgttggtaggagcgaccccgcgagcgtgacacagacaaagcagccttcggtgccaggttcgatttggtttctgcaaagtttatcactcctacattttcacaattagtttctacaaattatatcactccatttcactcctatgaaattactgtgacttaatttcaatcgaggtcattcttcttgctccttcgctttgcttagcagtaaagacaataacttcctttaccttgctcaatagtttgccttttaatttgaacaaaaatctaatcacttgacattgcatgggaggtaagctcctgtttttcacaaactttatcggtggacagttcatagtcctaacagacccattagtccgatagaacagttagcattaggtaattattttggcattggcaattttgatctactcctatt

SEQ ID NO: 213931 - DNA, 2172 bp, Zea Mays
atgattctggcaaaaatgtgctgcaagtatttctaagtccaccaagtaaaaaagaacatagacttgcagcatacgttctgccctacatattctcaatcgcttcagtcagtcagtcttactagtagccagccattggcttcattttttagccaaagacaaacaggaggagggaggagggatggttctccttcgtccctggcacatcctcttcttcctcacatgcttctccccatcctttgttcatcctatggaaccaggcacctaccgttgctccaatgtttccatcccatatccttttggcgttgctgttgacacaaaacctcaataccgacatgttgtgctcgagtggtctgtgaacggcagcagctgtgaagaggcgaaactgtccggatcatacgcctgcgcagagaatgcctactgctacaactcatcaaacggaatcggttaccgctgcaattgctccagtggattcgaggggaacccatacctgcaagggccaaatggatgcacagatattaatgaatgcatcaccagaaatccgtgcaccaataggtgctcaaacacaataggtggtttccagtgcacgtgcccagcagggatgagcggcgacggcctcaaggaaggaagtggttgcaatggagtaagcacactagtgattgcaatagttgcaggattagctctgctagtgcttctcctcatccttggcttctggactcactggcttgttaagaagaggaaacttgcaaagacaaggcaaaggtacttcatgcaaaatggtggcctgatgctgaagcagcagatgttttctgaggaggcgccgctgcacatattcacctccagtgagcttgacaaggctaccagcaacttcagtgatgacaatattgtcggcagaggagggtttgggactgtgtacagaggcattctgtccaatcaagtggttgtggcgatcaagaaggcgcagcgagttgatcaaacccagacggaacaattcatcaacgagatgatcattctttcacaggcgaaccacaaaaacgtggtccagctattaggctgctgtctcgagactgaggttcccttattggtctatgagttcatcaccaacggggcccttttccaccatcttcacaatacgtcggtccccatgtcatgggagagccgtctaagcatcgcggttgagactgcgtcggcacttgcatacttgcacttagctgcaaagatgccaattattcacagagatgtcaagtcgtccaacatactcctagatgacaacttcactgccaaggtgtccgatttcggtgcctcaaggccaataccgcacaaccagacccatgtgacaacattggtgcaagggacactagggtacatggaccctgagtacttccagacaagccaactgactgagaagagtgatgtgtacagctttggcgtcgtactcatcgagctactgacaagaaagaagcctatcatggatgatatcgcggaagacattagaagcctagcgctgcaatttagtatgctattccatggaaataagctgttggaaatcgttgatcctgtagtagctgaagaagctggagtcagacatgttgaaacggtttcgaagttggcgttacgatgcttaaggttgaaaggggaagaacgcccaaggatgatagatgttgcgattgaacttgaagcactgagaaggctgatgaaacaacacttcatcttgaagaacgagtctttgcttcaggagtcatgttgcaatgaagaaatgagcatcgacgcaccatcaagtttgttccttggcgttgatggcatttctgacgatgaaggcatggagatcattccacttacatgtccatccaaaattctcacatcctatccctaactcgcaactatcacaaataaaaaggattttagctgacttctaccttctcaattgccaattccgtcttagtaatctcttcgtcttatgattagcttccaacgtaactacccggttaatggaatatgactgagttatttggcttatcgtcattcagctatgttctctttttgttcctcttgcagttcaaaaggcgatggtagtttcgctatgttggtatctctactgtatcgactgtcaacaaagaaatcaagacacatatgtaccattctagttcttcattctcatacgttctatcatacagt

SEQ ID NO: 213932 - DNA, 2117 bp, Zea Mays
atgattctggcaaaaatgtgctgcaagtatttctaagtccaccaagtaaaaaagaacatagacttgcagcatacgttctgccctacatattctcaatcgcttcagtcagtcagtcttactagtagccagccattggcttcattttttagccaaagacaaacaggaggagggaggagggatggttctccttcgtccctggcacatcctcttcttcctcacatgcttctccccatcctttgttcatcctatggaaccaggcacctaccgttgctccaatgtttccatcccatatccttttggcgttgctgcagctgtgaagaggcgaaactgtccggatcatacgcctgcgcagagaatgcctactgctacaactcatcaaacggaatcggttaccgctgcaattgctccagtggattcgaggggaacccatacctgcaagggccaaatggatgcacagatattaatgaatgcatcaccagaaatccgtgcaccaataggtgctcaaacacaataggtggtttccagtgcacgtgcccagcagggatgagcggcgacggcctcaaggaaggaagtggttgcaatggagtaagcacactagtgattgcaatagttgcaggattagctctgctagtgcttctcctcatccttggcttctggactcactggcttgttaagaagaggaaacttgcaaagacaaggcaaaggtacttcatgcaaaatggtggcctgatgctgaagcagcagatgttttctgaggaggcgccgctgcacatattcacctccagtgagcttgacaaggctaccagcaacttcagtgatgacaatattgtcggcagaggagggtttgggactgtgtacagaggcattctgtccaatcaagtggttgtggcgatcaagaaggcgcagcgagttgatcaaacccagacggaacaattcatcaacgagatgatcattctttcacaggcgaaccacaaaaacgtggtccagctattaggctgctgtctcgagactgaggttcccttattggtctatgagttcatcaccaacggggcccttttccaccatcttcacaatacgtcggtccccatgtcatgggagagccgtctaagcatcgcggttgagactgcgtcggcacttgcatacttgcacttagctgcaaagatgccaattattcacagagatgtcaagtcgtccaacatactcctagatgacaacttcactgccaaggtgtccgatttcggtgcctcaaggccaataccgcacaaccagacccatgtgacaacattggtgcaagggacactagggtacatggaccctgagtacttccagacaagccaactgactgagaagagtgatgtgtacagctttggcgtcgtactcatcgagctactgacaagaaagaagcctatcatggatgatatcgcggaagacattagaagcctagcgctgcaatttagtatgctattccatggaaataagctgttggaaatcgttgatcctgtagtagctgaagaagctggagtcagacatgttgaaacggtttcgaagttggcgttacgatgcttaaggttgaaaggggaagaacgcccaaggatgatagatgttgcgattgaacttgaagcactgagaaggctgatgaaacaacacttcatcttgaagaacgagtctttgcttcaggagtcatgttgcaatgaagaaatgagcatcgacgcaccatcaagtttgttccttggcgttgatggcatttctgacgatgaaggcatggagatcattccacttacatgtccatccaaaattctcacatcctatccctaactcgcaactatcacaaataaaaaggattttagctgacttctaccttctcaattgccaattccgtcttagtaatctcttcgtcttatgattagcttccaacgtaactacccggttaatggaatatgactgagttatttggcttatcgtcattcagctatgttctctttttgttcctcttgcagttcaaaaggcgatggtagtttcgctatgttggtatctctactgtatcgactgtcaacaaagaaatcaagacacatatgtaccattctagttcttcattctcatacgttctatcatacagt

SEQ ID NO: 213933 - DNA, 1191 bp, Zea Mays
caggctgtcaggcattcgccgaagacacacttgacagcaatggctgctgctctggccgccatggtcgtcctcgcgcttcgaacagtcgccggcgcagcctcgacgccggctgctgcggcggcgacgacgtccaggagtccggtcatctacattttcggggactccatgtcggacgtgggaaacaacaactacctcctcctctccctcgccaagtgcaactacccctggtacggcatcgattacaagaacggctaccccaccgggaggttcactaatggcaggaccatcggagacatcatggccgccaagtttggctccccgccgccggtgccgttcctctccctgtacatgaccgacgacgaggtcctcggcggcgtcaacttcgcgtccggcggcgctgggctcctcaacgagactggcatctactttgtccagtacctgtcgttcgacagccagatatcgtccttcgagcagatcaagaacgcgatgatcgccaagatcggcaagaaggccgccgaggagactatcaatggcgcgatcttccagatcgggctcggaagcaacgactacgtcaacaacttcctgcggccattcatggcggacggcatcgtgtacacccacgacgagttcatcggcctcctcatggacaccatcgacaggcagctgacgagactgtacaagctcggcgcgcgccacatctggttcagcgggctggcgcctctcggctgcatcccgtcgcagcgcgtgctctcggacggcggcggcgagtgcctggacgacgtgaacacgtacgccatccagttcaacgccgcggccaaggacctactcgaggggctgaacgctaaactgcccggcgcgcgcatgtacctctccgactgctactccatcgtcatggagctcatcgaccaccccgagaaacacgggttcaagacgtcgcacacgtcgtgctgcgacgtggacacgacggtggggggtctctgcctgccgaccgcgcagctctgcgccgaccgcagggacttcgtgttctgggacgcgtaccacacctccgacgccgccaaccaggtcatcgccgaccgcctcttcgccgacatggtgggctccggcgccgtcgtcccgaggaacggcacgtccccaccccgagtggttagcgcgccggcgccggcgcacgcctcgcctgcacgcatgccgtga

SEQ ID NO: 213934 - DNA, 2217 bp, Zea Mays
accgccgacagaataatcactcagatccgagcgacatcgccgcggccgctgcctgctccccaactcgcaacccttccttcccatctgatggccttggccgcggacaagcgcctcgccgccgcggctccgtacctaccggcggagctcataccggatatcgcgcggcacttgacgacgctccaagacttcttcgccctccgcgccgcctgccgctcctaccgcaccgcgctgccaccctcccgcgccgtcctcgcgtcccagccgccgcaccttctcgtgccccaccacgcctcctccccgtgctcgctggccctcatccaccccttgtgtcgccgcctcctccgcttccgtgcgccctcgccccctttccccagcgctgtcgttgcatccgacggcgcccgcgtcgtcacctttgaccactttgcccgcgagctctccatcatccacctcctttccggcgatcgggttcgcgtccccgacgctcccttcctattctcccgcgcagtccttgccggcgacctcgtcctcctcatcgcacccgggtgggttcagtattgccgcctgggggacggtcgatggcgggaggcgtattgccggctcgggggctgcggcggcagcctcttcggtggcctgtacatgatggtcggcatgctcgctgtcaatggcgtcctatatgcgctcctcaacacctgccaactcgcagtggcagagctgatggacaataaggtcgaattaaagctgcttggaggggaagtgggtgaccatgtcagagatgcttggatggaaagcaaggatttcatgcttggggcgtgtgctggtgtgcccatactcatcttcaaggtatcagtcaagcctgagtacaaggttttccgctgggaacctgcagagcaaaggtgggtgagagctatgaccctgggaaggcggactcttttcatgtctggcaatggctttgatgcttgggttggtccagattcacctggaattcgaggggattgcatatatgaggctctgccacgggcagcaggttggagtgagtactcattagttgatgacacttatgaactcgtcactattgactaccaaggtgcaccagatctagatgccttaaggaagcaggtttgggtgcttccgagcttgtgctaatattggaatatgaagattaaattctgatgttgaatccatcgacatcacctaaaggatgcttgctacttgccaattcagggatgagctactgcaagattctggcttgatttacagattttgttgctttgaattggtcttttccacatctcttttcttttggagaaaaaaatgaaagctttaggcgctccagtttctgttgcaaaccaaatggttcattgacacatgttattgaagctttggctcagcttacaaatctgagtatgctcgaggccttcactttgttaagattacaaggatagttgggtcctatatatgaaataaaattctttgctaaacagtcctacaaaatattgttgggatctttacatggctgatccagactttgcttggtcatttaatcctgttgccatggcaagggcaagttcttgtttttgacttcttttgaaagatagattgaacatgctcaagttgcttatcactaaaaacgtctacctggacaaatttgtaacacctgcagtcctgcactctatctcaagaaggttcctgtgttcatctctccttcccatgctctttcagcaggaattgttggtgcttcaggacctgtgacctatatctatactctctctttgacatgttggctgagggccagggccttggactgtgcacatcatcaggaaggtttgatcacatattggtcaatctgtttaaagcaagaaattgtttccaccaatgtatactggccttccaacattggaagaagggtttgaaggaaactcaatattatagattggtcaatctgttcagagcatgttatcatttccaccaatgcatcctggccttctaacattggaagaagggtttaaaggaaaacttcaatattggctagagtcatgctctctgtaaacagtgtaatatccctctttggacctaagtccacccatttacatgtactttttttccttattaacgcaaaaacataatatgcgactcgtgcaaaacactgttttatattgtagactgcactattcgtagagtgaagtttgaaatagagatgatataagagataggatgggt

SEQ ID NO: 213935 - DNA, 1141 bp, Zea Mays
gagacaaacgctacattccgccacctcctctcccaaaggctcgccctccccggctccccctcgtatcttcgccgtcggcgatcaaaatggcggtgcccatgtccgccatcgagtccgcgtggcagctcctgatcgccaacttcaccgagttccagctcgccaccgtcatcaccttcctgctccacgagaccgtcttctttctctctggccttccctccctcctcttcgagcgcttcggactcttcgccaaatacaagatccagaagaggagcaacacctctgcttaccaaaacagatgtgtcttgcgtcttattctgtaccatgtctctgtgaacctgcctgtcatgattttgtcgtaccctgccttcaaattcatgggtcttaggagctctcttcctctaccacattggacggttgttgtatctcaagttcttttctactttgtccttgaggattttatattctactgggggcacagggcactgcatacgaaatggctatacaaacatgttcacagcgtccaccacgagtacgccacaccctttggtttaacttccgaatatgcccacccagctgaaattttgttcctgggattcgccacagttgttggtcctgctcttactggccctcatctgttcaccctgtggctgtggatggtgttgagggtattggagactgttgaagctcacagcggctatcacttcccatggagcccatcaaatttcctgccactgtacgctcggacttccatgactaccatcaccgagtgctgtacacaaagtcagggaactatgcctcgacatttgtttacatggactggttgttccggacggacaatggttatcgcaaggcaaagagaccattgaggagcaagaagtgaagaagaagaagaatctgtaaagtgttgaagctgctcatcaacaggactggcgatagagttgcgcctcagcatggaaggagagaaaatggacgcagtcagttattgcctcattgcctgacgaccgatactataggctcctgagatgttgatttctctgtgttttctatgatcaagaacgaggtcctggcgaccttggtctgtcatgaactgaatttgataaaaaaaattgtcatattttctcgggggttttgatctgcgttt

SEQ ID NO: 213936 - DNA, 1235 bp, Zea Mays
aaaagaccaacataggggacctgagcgcgagcagagacaaacgctacattccgccacctcctctcccaaaggctcgccctccccggctccccctcgtatcttcgccgtcggcgatcaaaatggcggtgcccatgtccgccatcgagtccgcgtggcagatctctgtctctctctgctcttcctcgccgggcgaaacgtaacggaaatgaatgcagctcctgatcgccaacttcaccgagttccagctcgccaccgtcatcaccttcctgctccacgagaccgtcttctttctctctggccttccctccctcctcttcgagcgcttcggactcttcgccaaatacaagatccagaagaggagcaacacctctgcttaccaaaacagatgtgtcttgcgtcttattctgtaccatgtctctgtgaacctgcctgtcatgattttgtcgtaccctgccttcaaattcatgggtcttaggagctctcttcctctaccacattggacggttgttgtatctcaagttcttttctactttgtccttgaggattttatattctactgggggcacagggcactgcatacgaaatggctatacaaacatgttcacagcgtccaccacgagtacgccacaccctttggtttaacttccgaatatgcccacccagctgaaattttgttcctgggattcgccacagttgttggtcctgctcttactggccctcatctgttcaccctgtggctgtggatggtgttgagggtattggagactgttgaagctcacagcggctatcacttcccatggagcccatcaaatttcctgccactgtacggtggctcggacttccatgactaccatcaccgagtgctgtacacaaagtcagggaactatgcctcgacatttgtttacatggactggttgttccggacggacaatggttatcgcaaggcaaagagaccattgaggagcaagaagtgaagaagaagaagaatctgtaaagtgttgaagctgctcatcaacaggactggcgatagagttgcgcctcagcatggaaggagagaaaatggacgcagtcagttattgcctcattgcctgacgaccgatactataggctcctgagatgttgatttctctgtgttttctatgatcaagaacgaggtcctggcgaccttggtctgtcatgaactgaatttgataaaaaaaattgtcatattttctcgggggttttgatctgcgttt

SEQ ID NO: 213937 - DNA, 1285 bp, Zea Mays
aatgccgtcattcctgcaatctgccaagatcaagatcgggatcaatgggttcggcaggatcggaaggctggtggccagggtggctctgcagagtgacgatgtcgagctcgtcgccgtgaacgaccccttcatcagcaccgactacatgacctacatgttcaagtacgacactgtacacggacagtggaagcaccatgaagtcaaggtgaaggactccaaaacccttctctttggtgagaaggaggttgctgtgtttggctgcaggaaccctgaggagatcccgtggggttcggttggtgctgaatatgttgttgagtctactggtgttttcactgaccaggagaaggctgcagctcacttgaagggtggtgccaagaaggttgtcatctctgctcctagcaaggatgcccccatgtttgtcgttggtgtcaacgagaaggagtacaagtctgacattaacattgtctccaatgctagctgcacaaccaactgccttgctcctcttgctaaggtcatcaatgacaagttcggtatcgttgagggtctgatgaccactgtccatgccatcactgctacccagaagactgttgatgggccctcatctaaggactggaggggtggaagggctgctagtttcaacatcattcccagcagcactggagctgctaaggctgttggcaaagtgcttcctgtccttaacggaaagttgactggaatgtctttccgtgtcccaaccgtcgatgtttctgttgttgatttgactgttaggcttgaaaagtcagcaacctatgatgagatcaaggctgcggtcaaggccgaggcagaaggtagcctcaagggcatcctgggttacgttgaggaggaccttgtttccaccgatttccagggtgacagcaggtctagcatctttgatgctaaggctggcattgccttgaacggcaacttcgtgaagctcgtgtcctggtacgacaacgagtggggatacagcacccgcgtggtcgacctgatccgccacatgaacagcaccaactaagatgaagaactcaagtcaaggtctggtgatacgagcgagttgtcttcttcccccccgggagaaaagtgcttccgagaataaattttttccatcggaatgtctgaaactatgttgggtgtatcctagtggttggttgagcattaatggctcatattttgtcaggtctatgtgtcgccgtgaaacttttaatcaaatcagttcactcttttgcctctcaggacatattaagttccatgaaaaaaaacaaagaga

SEQ ID NO: 213938 - DNA, 1642 bp, Zea Mays
acatccagatccgtccagatccagattcacccgtctggcacttcacttggcatcacccccgccgtcgcgccgcggccggccgggcctgcaccaaggggtccaggtgaataggtgatgcggccgactcacccgcggcgcggcgcggccctcgtgagaactgcaaaaccaccggccgtatacagtaggcctgcctgcctgcctgcctgcctgccagcaaaccctcccgatcggccgcactgaaatgatcagagtgagtcccctcctcctcgcccgcccgctccgtgttcattgccccactccctcacgcctctcgcgcccgccgctccaccaccccaacccccacccacgctcaggggaagggggtctgggttgcgtacaggcgaaaggcacgcgccgccgctgccgcgcgagcctctccgtccccatcgccgcgcagatggatccgtcgtcggagcccctgtacgcgcaggtcgagccgtacgactccgggttcctcaaggtctccgatgtccacaccatctactacgagcagtccgggaacccgcagggccatgcggcggtgtttctccacggcggtcccggagccggcacgtcgcccggcaacaggaggttctttgacccgcagttctacaggatcgttctgtttgaccagaggggtgcaggcagaagcactccccatgcttgtttagagcagaacactacttgggacttggtagctgacattgagaagctcagggagcatcttggcatccctgaatggcaggtgtttggtggttcatggggaagcaccttggcacttgcctacagccaggagcaccctgataaggtcactggccttgttctgagaggaattttcttgcttaggaaaaaggagtttgattggttctatgagggtggtgcagcagccattttcccagatgcatgggaaccatttagagattttattcctgaggatgaaaggaattgtttcgtagatgcttataacaaaaggttaacttcctctgatcctattgttcaggttgaagctgctaagcgctggacgatgtgggagatgatgactgcgcaacttatccaaaacaatgataacattaaacgaggagaagatgatgaattttcactggcatttgcaaggattgaaaaccactactttgtgaataagggatttttaccctcggactcattcctattggacaatgttgataagatccgacatattaaaggttttattgtacaggtggtagcagatgcagggcactcggccaatgaagttggcatcgctgccgaactgaggtcagccaccgataaactgagagacttgctgcgcaaatgagccggcgaaaggcaacctgcacctctatctgatcatggaactcagaggcccataataattacatagctgtgtaacggttagcactgtgccgttaaacaatgtcattgtcaccatcgatatgttgtttgtttgctcgctggagtgtatgaggaattgaagtttcaagacgggaccagaatgggtggggcgtgtttggtttgcgtttttagacctggtctgtctagccagctatgccagggcaacacaccctggctctcacctagatcctgtttggttgcttaaaagaagaagaagaagaagaagaagaagaaa

SEQ ID NO: 213939 - DNA, 1737 bp, Zea Mays
gagaattggaattacagcaaaccagttagatgaagctgcaccaatgttggcagggttgagtgagcccattgttgttgccaaagttaatgctgataaatacaggaaacttggatcaaaatatggagttgatgggttccctaccctcatgctttttatccacggtgttccaattgaatacactggttcgaggaaggctgatcagcttgtccgcaatctgaagaagtttgttgcgccagatgtttctatccttgagtcagactctgcgataaagaactttgttgagaatgctggtacaagctttcctatgttccttggttttggggtgaatgactcattgattgctgaatatggaaggaaatacaagaaaagagcatggtttgctgttgctaaagatttctctgaggacgtcatggtagcctatgaatttgacaaggttccggcgctagttgcaatccatccaaagtataaggaacaaagcttgttctatggcccatttgaagaaaatttcttggaagattttgtacgacaatcccttctccctttggttgtcccaatcaatacagagacgataaaaatgttgaatgatgatcagaggaaagttgttctcacaattttggaggatgattcagatgaaaattctacacagctggtaaagattttgagatctgctgctagcgcaaaccgtgatttggtgtttggatatgttggaatcaagcaatgggatgagtttgtggagacttttgatgtttccaaaagctcacagctgccaaagctacttgtgtgggatagaaatgaggagtatgagctcgtaagtacagtatcctcagtaattaattctattttctaataccaccatccatataaagtgttactggcatgtttctgactaatgatgcaaaagtttttctatcaataaaggtattgcttttataggttcctgtttgttgaccctcataattccctgagaaagttaatacttgattaagaaagaaactgctaccatctctccgataatcatcaaataagaatttgttattttctgggattgaattaaaatggttcttggtgaaggtggatggttcagagagattagaagaaggtactgaccaagcatctcaaataagccaatttcttgagggatacagagcaggaagaacaacaaagaagaaaattagcggcccttctttcatgggtttcctgaattctctggtcagcttgacctcgctgtacatccttatattcgtcattgcccttctgtttgtcatggtgtactttgctgggcaagatgatactccacagccaagacgaattcatgaagagtgatggaagcttggggagcttcttgcacctgaagtgtaaagatggctaatgtaccaggagatgtagctcagaggttatagatttcaaactttcaacggacgcaagtcttgaagagtggatttggctattgatgctgagattcttcaatttctattggccacaccaacttctacatcctgcctatttatgtttctgttttgtgcccttcaatttgttctttaatttagagcttagaaattagcctctgcctgtgtattttagaaattgtccattccagagtccatttctgtgaaaatatatttattatcatactctgctactgaacgtttgtacaattaatacatgatgtatagactgttctggtgctatggtactcgctagttgtgaagttgtcaccaaaaagtaaaacaaaacaaa

SEQ ID NO: 213940 - DNA, 4254 bp, Zea Mays
agcttccagccttcaaaacaaaaggcagccatccccgagcggccgagccccacagcaggccagcacagaaacggtcccagaatggccgccacagaagatgcacgcccattgtcaaaatttctcagtggacctttctctccaagtctcaaagatgacggccgctttgagccgcccacccactgtcttcggctcccctctttctcttcccaaaccattgcctactcttcctcttcctcttcccaacccatcgccgtccccgtccggccgtccttcacaaaccatctttctcctctccatcaagtgaagtcctatccctccccttccctcttccttccttcccccgcctcccttcctcccccagttcacatcacctttgctttgctttgctttgccttgctttcgtgccgcccttcaacgcaagaagccaacaagcacaagcaagcctccagtatcagcaagacaagaacgtcgcgagagaaaccgttgatcccaacaagccaaggagaaatccggctgaggattaagctgcgagaagcgaagaaacacaggaactcgccgcccccgtcgctgaagaagaaagcagcagccaccagccatggtgcggagcaaggaggcgccgaaaaagaagcccaaggacccgctcctgacgcccccgtccaagcccaggggcggcttcctggacgagggctgcccgtggaaccgcggcggcgcggccatgtccccggcgccggcgtcggtgcccagctacatgcggggcaccagcagctctgacgccaaggccgagcgccgtgggcggcctgcggcgaccgtttcggcgtcggcgtcccccgcgaggtggaggcccgcggcgtcggtgtcagcgtccgcgtcgcccgcgccgcggcggaggcccgcggtgcgggtgctgaccaaggggaaggttttgttcgcggaggaggaaccttgctctggctccggcatgggccgcgccacgtgctcctcaaccatgaaggacaccaagttccccgaagcgctcgacctcgcaccgggctccaccgacgccgagggccccgcggcgctgcgggtgtgcccctacacctactgctccctcaacggtcacgtccatgcgccggcggtgccgctccggagcttcctcgcgtcgcgccgccggctcatcaagacgcagcagagcatgaagctcaagggcgtctcggccttccgcaagaaatccgaggagaggaccagcggcggaagtggcagtggtggaggtgcaaagatcgcgcctttgatcgacgaggaggcggtcggcgacttcttcgtcgaggtgtacggcggcccgagggtgagctcggacatgagctgcagcgacatgtctctcgacgagatggatgccacggtgcggaggatggagttcgtcgtgttcgatcggtgcggcgcggacgaggacggtgagaagggcaaggatcttgcggtttgcgatgatggtgaacctgagcctcgcccggtgttgcaacagaagcatggtgccttcggggacagcttgtcggagtgcagtggggtacacatcgacaacgatttcgtcgaggagttgccatggttgaagtaccatggatacgagtatgatgatagcttggacgatgagatcttggaagaacagagaattggggaacaggaggttgttggagcagagttttctgtggagcaagaagcagagcaaggaacgtccggtagatcctctgatgaatacaaagaggatgctgctgatgaggagaatacaacgaatttggtccgtgaccaggagatcctctcagatcaaggtgttgcttgcagagtggaggcatgcgaggagctgggtggaagagatgaagacaacatcctggaggcgtctgctggacaagggaaggcagaagagaagctctctgatgatatctacaaatctgagatacctgatcaagaaataacagcaaggacatgtgctactctggaaggtagcttcgaagaggatatttcatcggaccaagaggcaaatgatgatgatgaagatgagtgccatgtgaaatctgatggcgaatcagaggacactgaggagcaagatctggaggatcaacagagcatgccagatgatgtctctaaaatggagatttctgaggacactatctctggtgatggatgcaaagaggatttttctgaggaagtaacctcggcagctgtgttagcagatgatgtgtttgaacaatatgagaagactgtggatgatgtgcatgaacaagatagcagccctgctaaggctcaaatggaattgggtaatccaacaagcaaaaaggaagacacttctgaagaaactgctattttgcaacaaatcaatcaagacagcaatgtggatactcaaagggaattggagattagggcatccatattggaagaatctggtattgctcagcaaagcaaccttgatggtgataaaatggaaccagagattattgtgtgcaagctggaagatgtttctgaagaatctggtgcctgcactgaaagcaacctacatgataatacagagtatgttatagacgatgctgaaatgagacaagaaattactttatgcaagcgggaagatgcttctaaagaaactggaattgatcaagaaaccttagaagatgatagctcaacatgtggtattgttgatgacagaaacaatctggagatcaataactgcaaatcggaagatgtttccatagaatctgttggcactcaggaagctgatcataatgataactttgcaaatttcagtaatgatgttcaagggactgcagaagatcatgactcacatctcattgatgatgctcaaaatgatatccaaatccctggaggcaaatcagaagacacttgcaaagaatttgataccatgaaagaaactgatcagagtgatagctctgcaaatgtcagatatgatgctgaagaaactgtagaagatgatgattctgtgtgtgtcagtgatgatgctcaaaatgatctgaagaataccaagtgcaaattggaagatgcttccaaagaatcttctactgctcgcgaagctgagcggagtgatagttctgcaaatgtcattgctgattctcaaaatggatctgaacttaccacaaatgagttggcagtcattacgatcagtaacgacaaggaaaatgaatccatgcttttcacatgcaactcagaagatggtttcaaagaatctattattggtcaacaagctgaccatgatgatagctctgcatatatcagttatgatgatcaaaatgaatgtgaagttactgcatgtcattcagaaggtgctcaaggggaatcaaatgtagttcaagaagaatgtacggatgcaaaagaaccttctattgatgacatatgtggcgcgttcagcggaatgaacctcaagggtgatgtatattttgatcctgctgagtctgccacatgcccgaggaacaagttgatcatctccaggaggagaagaacacctgaagaggaggaatacttgcgaggtttcaatccacgggcaccgaattttcttcctctggaactggatccagacgcagagaaggttgacctcaagcatcaaatgatgggtgagcggaagaatgctgaagaatggatgattgattacgcgcttaggagggcggtgacaaacttagctcctgctcggaagaagaaagtggagctccttgtccaggccttcgagactgtcctaccacatgacgaagatgacaagaaaaatgtctcaccctcaaggcctgtccaagcctgcaactgataacattagagttagtggttacactgatgttgatgtcgacgcgcaagctactaactcggaggttgctgcaatattatcgcgagtgacctgctccaagtttgaatgagagagcgctacttactaatttgctagaggtaactagagaattagagatctctagctgagctgtgacagaggagctcactcctgctccacaaggaaggataactactcattagtcattactgatcaaggtatccctatccagttgctgagttgcaaagaggatgctcccggcttgagttatgtaatttaaaagtgtgtatacatgtctcgtgtgctaatgttgtctgatattgtgctggtggatctgtgaggattggaaaatgtcaatggtgatgaggtccatgctcctttggcaaagatcaataaaactcttcttgagtgctcaattgttgttactgaggttgaatctgcgtcacaatagcacccatgcacacatgttt

SEQ ID NO: 213941 - DNA, 2431 bp, Zea Mays
cgcacgactttcattggcaggccggctggaacagcggaacgcaggaagattcccagctcgttcctgccactttcccgccatcttctcgcccggcatctataacagcgcgtactcctcccgttgctttgttcttgttcatcacccgtcttcccccaatggctccgccttcctccgccaggcgcttcccatggtcagggacgaccgacgacactggcggcagcgagctctccctgccccgcaggcgctggcagtcagttgggctgttaggagaacgaggaggaagccgacggaggggctgtttggattcagacggatcatggaggcggagttcatgggcatgttcctcccggtctttgggtcgatgcttcggagagtggtctcagaggaggtagagaaagcaatgttcagacaattcagtgcacaaccagcacctcgaaggttactggtggacaggaatcagcaccctcggtatcagctgatgttcttgaatggactgagacccgtttacacaatgacaaagctagaaccagatgacggaaaggcgctgaaggtagctgtagtcgaaaggctcgaaaacggtcggacggacatcgtcagatacggccctctttcttctgctagggttgaagtcgtagctctccatggcaacttcaacgctaaagacgaggaatcctggagccctgaggagtttcagaagcacatcgtgtccggtcgagagaaaagcgcccagctcctcactggcaacctggcactcaagctcagtggaggcgaggctgtccttgagaatgcaaccttcaccgataactccagcttcaccagcaccaagatgttcaggctggggctgaggcttgtcggttcttctggagagagagttctcgaaggtgtcaccaagccttttcgcgtgaaagagcgcagggtagaaggattcgaaaagcactaccctccaatgctggacgacgaagtgtggcgtttgaaaaagattggtaaaatcggcgcttaccaccaggcattgtcagacaatggaatcgattcggtgcaagagttcttacgggcttacatgaaggatgaacagaagctcataaagattttcaacaagatgccacagtcgacatggaaatccatcgtagagcacgccatgacgtgcagagttggcgacagtctttacctctacgaagctcaggacaaggatgcgggtcttttctttgatgagttataccagctcgttggggcgaagtttggtgactgttacaagcccattgaccagcttaatgaaatagagaagaatctagtggaagccctgaagcatggggcctaccagaatatagatggcctgcagcctaactacaagatggtgaacaactaccctgtgctcagcagtttccctgctgctcagggtacttccctgtttagcgctcttcatccaaatcagcaggcactcagctatggtgacagctcgactggtgtagggtttggaacaaggccttcaagggagactttcaacacatcccttggatccagtaatgagccacaaacttccaactatatggagttaagacatgagcaaacaataaacagggttctaccatatgatccaagcaatggaaccttgttacccagaccgagaatcacccagttgcagataccaaactctgagagaacattttttggtcctcctgctgttattccaaacaacattctggttggtcacggtgttgcgctctctgaaggatcacacagtggttttcctgtccacagtttatcgtctacggatgtggtcatgtcactgatgcaatccccattccagcttccgacaaacagtgaccattctgaacagcaatgcaatggtcaaacatcaacgcagttacaacagtttgtcactggatgccagccatcaagaacaaacagtttcgacttgaactcgtgcgacgaactcatacagaacttcatttcccagatttctaacagtggaggggcatctacgccactttcaccccgcaaatgggtcaagatcagagctgcgttgaagctggcatctgtagggaggctctcaaggaggggtccgcattgcaacccaccaaggccaaggcttgtaccgataccatgagcactcttaagaggcatcgatagttttttttttttgtaaaatatacaatctaggatcaaagatccatcaagatattgaactctatagtattgttaaatagatactccagagaaatctgtttaacttggagtagaatggatgttgtcgaacaattaggtatttgcacgtaaaggagctagtagtagtactttacatttataagtttagggtatttgcatgctgaagaatccatgtatctttgttactaactatgaaagtatgaattcaggataatgtagagcctatatcgtttcttcatctctgttagaaattgagatttcacacata

SEQ ID NO: 213942 - DNA, 1113 bp, Zea Mays
gacgcgcgtgggctcggtgttcccagacggccagacggctctcgtcgtgccccaactcggcaactccccatcagctcaccccgatctagggtttgtgcaccctccgcttacgcgcctccccaccaagcaactacccatggcggctacagggcaggagggggatgacgtcgaccactacgaggcccagcggatggccgccgacattgagcgcgagctcgcagcgttccgcgccgccaagcaggcttctgcatttggtgccacatcgacttcggcacatggagataagaagggtggaaccccacaggatggggtgaaaacggacaagggaaaaatcttgaaggtttcatgggatgggagtgctgattcgtacagtgcggcaaagttggaggagatcttccagaaatttggcaaagttgaagacattgttatcaagacaaggaaatcaaggagtaagggctcagcaattgtagtaatgggctccaaagaagctgcattattagcaatacagaaccatttctctctgtttccgttaaatgttgctcctgttcaagaatctggtggattatcaacaagaccaacagaaacatatgaatcaaggacaaacaatactgatggaactggatttaacgatttggaagcgtcggtgttccgtaaacttcgagaggcccagaaaaggaaacattttggttaattgctttgttctgatgcatgatttggtactatgtatatgacgtcacacagctgaaaaatatctgaggatcgtgatggtagctgagttacagaaatatgaactacacatttgtttagttcgagtcttgtcgcagataaaattctctgaatcatagcaacgtcagatcaatttttctgtcactgtacaagctgtaccatgtatctatgaatagtttgtaaccacaaattcatgcatgacatggcgctacacatctttttgctggaaattgggaacacaacccctttcaaaattcttatgcaagcaatcaaactggaatatttggagttctcattctctcaaccttgcaattactcaggtcttataataacactcttaaggctgtgataactgtgatatacacgatctgttgcggatgacctaag

SEQ ID NO: 213943 - DNA, 3281 bp, Zea Mays
caaaaacccggcggccagcgcacagaaatatccccatctcgcttccctctcccctacgaccgcccccacccatggccacgcctctcctcctcccctcccgcgcagcccatgccgcctccgctaccacctgcgcctcccagcacctcaaagccaccacctccaaggagcctccgccccgcgctcgcccgaagcacggcgagggaggggctccccgccccgtccccgttcccagctccgccccccgtcccaagtccctcgtcctctcccacatcgcggcgggccgaatggacgaggccgcggacgccttcgcgggcgtcagcagccccggcgcgttcctccacaacgtcatgatccgcggcttcgcggacgcgggcctcccgctcgacgcgctcgcggcgtaccgcgccatgctcgccgccagcgctcgccccgaccgcttcaccttccccgtcgtcgtcaagtgctgcacgcgcgccggcgcgctgggcgagggccgcgccgcgcacgcggccgtgatcaagctgggcctaggcgccgacatgtacaccgccaactcgctcgtcgcgctctacgccaagctcggcctcgtcggggacgccgagcgggtgttcgacggaatgccggcgcgggacatcgtctcgtggaacacgatggtggacgggtacgtgtccaacgggatgggagcgctggcgctggcgtgcttccgggatatgaacgacgcgctgcgagtgcggcatgacggcgttggggtaatcgcggcactcgcggcctgctgcctggagtcggcgctggcgcaggggcgggagatacacggctatgccatcaggcacgggctcgagcaggatgtgaaggtggctatgcgctgaacgagcggcctgtggatgcgtttgattgcttcatgcaaatgagagcggaggggttccaggtggaagccgtcactgctatcaatttgcttgccgcctgtggtcaaactgaaagctcactgtacggaaggagtgttcatgcttatgtggttcggagacattttcttccccacgtagtgcttgagactgctctcctggagatgtatggcaatgttggcaaagtggaatcatctgaaaagatatttggtcagatgacagagaaaactgtggtaacatggaataatatgatcgctgcctacatctacatggaaatgtaccaggaagccatcgcattgttcctggagctactgaatcaacctctttatcctgattatttcaccatgacaacagtagtaccggcgttcgtcttgctaggctcactaagacagtgcaggcaaatgcacagctacattatcaagttaggctatggagacagcactctgattatgaacgcagttatgcatatgtatgcaaggtgtggtgatattgtggcctcaagggagatctttgacaaaatgccaggcaaggatgtgatctcctggaatacaatcattataggatatgcaattcacggacaaggaaagactgcattggaaatgtttgatgagatgaagtgtaacggtattgaaccaaatgagagcacctttgtctctgtgctgactgcatgcagtgtttctggcctggagactgagggctggaaggagttcaattcaatgcaacatgagtatggtatggttccacagattgagcactatggatgcatgactgatcttctgggccgtgcagatccttttgcctcagggaaaactgtacttcccaataagcatagtgtaaggctggctgttgcctttggtctgatttcatctgagcctgggaccccaattcttgtcaagaagaatgtgcgtgtatgcaaccactgccatcgtgcactgaagttgatatcaaaatattcaagacggaagattgtagttggtgacacaaagatatatcacatattttcagatggctcttgttgctgtggtgactactggtgaactgttaagattgatgacgaaatgcctgaatgagattctgcaagagcaggatacctggatctggatgtacacccgggttttcaaaatctgacacaaggtaaactgcaaggaattacatcacgtatccaagttgaggacacataccgccataccggagatatccattcccaggactcgtagtcatagtagatgctccgagaaggaaccaacaatttgggggagaattctaacctacaactgattacacacattggacaagaacgcaccaccacatttttgtagcaattggagcaggatgatgtacaaagttgttttttcccttcataagcaatgtaaaaaaggctgagctgattgtattcattgtatgacacatcatacatggatcaaatgcaagaaattgaagtgtttctctctcagattcttgtgaagtgaaaatcaaacatgcatagtagtactgcttgagctagcctaatccttgaaaccatttttataccagacattgagaattagagatcgtcgcttacaacaagattaagcaaatgctagcacatgacgcgtaagtttggaatacccgactccaaatctacgctccgccacggcgcttggcctcctcggtctcgatcgcgcggcgtgaggcgtcggcaaggcggtcgagcgcctgttgcacggcgtcgcggccgccgatgaggaggcgcgccaccacctccgggtcgcgctccccgcgggcatcctcgaactcgcgcctggcgttggcgcgcagcacctcccgccacggcaccccgcggtcgtcggtccacgcgaagagccgcgccgcccggaggatgtcccggtacagggccagcgcctcccgccgggagctcgtcagccgccgccgcgcctccgccgactcctcgtccgggcccgccgcgggcttcttcacgaggtgccggtccagcagctcctcgatggtgtccgggccctcgtggatgcaccgcgcccccgagccggcgggctgccaacgggcccgcaggaggagcgcggtgccgcggccgccatgtctggctacggccatagtcctccgctcctggcctctctgtttgggtcgcgattcgggattcgggaacacgggggaagggtctgtgcactgtgcagagtgcagaccaaaacgaacgatctagcactagagcttaacccaaggtcccagctcccagagacaaaataaactcctcagcagcgaaaagagaactgcatgaattccgtagactttcctatcccttggggcgcttcatgaaatcctccatgcggtgcgccactgttcttgcgacgctgttctccatcttgggctcaatcagaagcctaactcgac

SEQ ID NO: 213944 - DNA, 1602 bp, Zea Mays
gaaatttatggctgctgctatacggacgcttcccaaaattacatgtgtatgcgtatggagctgcaccatgtgtggattatgtggtagcagatgcctgctcactatttgttaccagtatagtccataatgatgaattctctgcacggttatccatgaattcagtaattagattgcgtagctcagctgtgaaagctctttcaaagggtacttcccccaattcagctaaagttggtaaactagttggtggaatcatgagtgcccaaacagatgataaagacgcactagatcattgtgcttccgctgatgctctgcagacggttagtgaggctgagctaagtaatgatcaagcgcatggaaggaatccagtgcatacaattaaaggtggtttatttctctttgggcaagcaatatcttgcttgataaatactccaaagcatcgagttaactccacagcagcaattaactatgagttgggcagatctagaattactactgttagtgacggaaggaaatccgtggttgcttcctgtggttttatggatgtttcgcaccgtggagaaggtaatccgcacataaacagtcactttctagaagatggtttgtttgaatgtggtgggggacacatatcacctcattcaaatgatggtcctggactcacgtctgcttctgatggttgcatcattacgataagctcatctgaagggcagtcaccagaggtttatcttcctggtcttgttgttcatgttgttccagtaaagaaaggtgcttctccattgcagaatacaattgtaacacgccaaaagaacaagagttacaaagcgctaattgctcgtcgaagagattttatggaccttgttgtgacacatcacatgttccttgatcatctcccttggaggtgccactatgccatgcaaaaggtcatagaaacacgaaaacgggatcagctcgccagtgatctgtccaccgcagaggaagctgtataattctattagtgcatttcttctttgttgtacatacgttaagaaattgagatcacatggattatgggtcaatgcgggttgatggttacatataacattattgtctgtatcagtagagctttaggagagtttaggacgatcgaaacaggacgtttgcccatctgatgaggattatctgaatctcagcattgttgtacgcagcctttgacataggctggctctctgtgagatcaacccagatgccgttgttgtttatggaaccagtgtggtagatggcagagcctatggtaaattggtaatctccaagtagtgttgtaagttggtacctatccgcagccacgcatgtgcctgttgatgaagtttccttgacactctgctggtccgaagtctgaaagaattccagcctttttcttccaatgaaagtcatgctagcagtatgcatttgaattcattgacgaggaggagcattttgacttgtttgtgttgagtttgtgatccaaattctgaagaaggcggccaagttagcgagcgaagcggaggcccgtcgccgggaggcttgggccggagcgcagcgaggccaactggccttcccgcggcccagggacgcctgggggggtgcggg

SEQ ID NO: 213945 - DNA, 3772 bp, Zea Mays
gccggcctcgtgcgcccccgcctcgtcgcctccgctagccacctgcccgcttccgccctctctgcctcgcagcagcagcggcatggccgccggcgtgctgtctaccgtccggtggtccaccgcttgcgcggtgctgctcaacgccatcgccgcctccacgggcgccgccgtcgcggccgtcgcgttcggccgctgcggcgggggcgccataggcccggccgccgccgccgcgtccgccgcgttggcagctaggctccttgcttccgcggtggcgggattcgcgcagggcgctgccgcctccgctatcgccgccggtgctatcggggcccacgtcgacagcgagcgcgaccttcgccaactctctcggctacgatacaagagatggctttggtggacaagatttggaatgatcattacagtgctacaatttgtgttggcaatttatttgatgtgtatcatcttaagggatgtcttggctggagggtctccaacacagtgcttttcaggtcaaaatcaaaagagtgatgggaggcgcatcttgttaatagcttttcttgtcactatgtgggtgtcaactatagttcagtgtgctactggttctgatgtactaaggtggagatcattttatgcatcccatgattttgcgtggagggctcactaccgggaggtgtttgatcatggaatccgtgaggtcttatgctgcctagggcgtgttaaatattcgagtgtgttggaagatgatgatatatgtattgtggcaaagttattgggtgatcttatggcttatcgcgcatctggaactggccatcttgaactcgtagcagaaatccaagtcatccacaattatttcaaaagaactagtggaggctcctcaaaatctcatccaagaggctcttctctttcatccatttgctgaagctgcctatacaggcccactgcttgattttggaaggaatcctcttatgtttccctgtgtgtggctcaataggcaaggtgttttgaccccatggactcgtgctagacgaccagttcttgaaggcgataactggtggagagggcatgcagctgctttcctaaaatatgccaatgtggccccagaagtccttcgaaaaggtcgtgttaaccagacaaaacgcgagaccgcctattttgttgttgtcttacactatttgagtacagtagtcattgctgtccgtggaactgagacaccagaagatgttataacagatggcttgtgtaaggaatgttcccttaatatagatgatctggatgggttgatcaattctgatcatctgtctcctcaagtgaagaatgctgttctctcatctccacactatggacatgcaggaattgttgaatcagctcgagagctgtacacagaacttgagggtcatcccatacatgaagataagtcaggtacaatgaaaactggattcttatcttctcttcttggggatggttgtgagtgccatggatacaatattcaaattgttggacattctttaggaggttctgtagctgcacttcttggtattaaggtaagtttatttttttcaatgtacagggaaattgtcttaagtcacctgatgaggtttgacgtatttagttataacatttagtgtgtccttttatgtgtttcacttgaatatagacacatgcccgttgggaatattcactgttgagttcaccttggaaatttatggctgctggtatgagcccactgctaatttgaaattatctcaagccacctgatgaggtttgtcgtatttagttataaaattgagtgtccttgcccattggaaatatggaccgttaagttcaccatgggaatttatgtctgctgggatgaattcactgctaataatgttttaggatactttcttggatgaggtgacggaattgcagggaaactagatgaggtaacaccagaacaggaaaattctataggggtttcgtgtggtttcttctactgaaatgcatattagattagacaaaaaagccttgcttgtcagaacaaaatagcccctcaagtttaaacgtttaggtaaaatatgcaaaattctcggtgattgggcagtaaatgaagcatggaattctgaaggtgtttctggaatgtgtagcttggttcttgtattatttcctgaaatatatttttcatctaaatgagtcatttcttgatcataaaaacacagctatacggacgcttcccaaaattacatgtgtatgcgtatggagctgcaccatgtgtggattatgtggtagcagatgcctgctcactatttgttaccagtccataatgatgaattctctgcacggttatccatgaattcagtaattagattgcgtagctcagctgtgaaagctctttcaaagggtacttcccccaattcagctaaagttggtaaactagttggtggaatcatgagtgcccaaacagatgataaagacgcactagatcattgtgcttccgctgatgctctgcagacggttagtgaggctgagctaagtaatgatcaagcgcatggaaggaatccagtgcatacaattaaaggtggtttatttctctttgggcaagcaatatcttgcttgataaatactccaaagcatcgagttaactccacagcagcaattaactatgagttgggcagatctagaattactactgttagtgacggaaggaaatccgtggttgcttcctgtggttttatggatgtttcgcaccgtggagaaggtaatccgcacataaacagtcactttctagaagatggtttgtttgaatgtggtgggggacacatatcacctcattcaaatgatggtcctggactcacgtctgcttctgatggttgcatcattacgataagctcatctgaagggcagtcaccagaggtttatcttcctggtcttgttgttcatgttgttccagtaaagaaaggtgcttctccattgcagaatacaattgtaacacgccaaaagaacaagagttacaaagcgctaattgctcgtcgaagagattttatggaccttgttgtgacacatcacatgttccttgatcatctcccttggaggtgccactatgccatgcaaaaggtcatagaaacacgaaaacgggatcagctcgccagtgatctgtccaccgcagaggaagctgtataattctattagtgcatttcttctttgttgtacatacgttaagaaattgagatcacatggattatgggtcaatgcgggttgatggttacatataacattattgtctgtatcagtagagctttaggagagtttaggacgatcgaaacaggacgtttgcccatctgatgaggattatctgaatctcagcattgttgtacgcagcctttgacataggctggctctctgtgagatcaacccagatgccgttgttgtttatggaaccagtgtggtagatggcagagcctatggtaaattggtaatctccaagtagtgttgtaagttggtacctatccgcagccacgcatgtgcctgttgatgaagtttccttgacactctgctggtccgaagtctgaaagaattccagcctttttcttccaatgaaagtcatgctagcagtatgcatttgaattcattgacgaggaggagcattttgacttgtttgtgttgagtttgtgatccaaattctgaagaaggcggccaagttagcgagcgaagcggaggcccgtcgccgggaggcttgggccggagcgcagcgaggccaactggccttcccgcggcccagggacgcctgggggggtgcggg

SEQ ID NO: 213946 - DNA, 2447 bp, Zea Mays
tagggtcgcaagccgagccaaaagcagctgcactgcagaccgaccaccacgcgacgctcctgctggctgctgccgcggaacccgggacaagcgacctcctccacctccccagctagctatagcttcctgcttgcagctgcaggtgccagccgagccgcctaccgggtacagccgcacaggcaggcggcggcatgcgctccagcctccagcagtgagggagggagctgtcccgctcccgccccttctacttctacccctccccccccgcgggccgagagggagtccgcccgccggcgccgcgcgactcaccgatgcccagccatgaggcctgctgcggcaccatgttctgggtgtacctcatgtcctgcgtcggcctcgtcgtcttcgccggcctcatgtcgggcctcaccctcggcctcatgtccctcagcctcgtcgacctcgaggtgctcgccaaggccggcacgcccaaggacaagctcaacgccgccaggatcctccccgtcatgaagaaccagcacctgctcctctgcacgctcctcatcggaaactcgctcgccatggaggcgctgcccatattcctcgacacgctcgtgccgccctacgtcgccatcctcatctccgtcacgctcatcctcgcgttcggggagatcatgccgcaagccatctgcacgcgctacgggcttagcgtgggggccaaggcggcgcccgtcgtccgcctactgctcatcctcttcttccccgtcgcctacccgatcagtaagttgttggaccgcctactgggaaagggacattttgcactaatgagaagagctgagctgaagacgttagttgatatgcacggcaatgaggctggaaaaggtggagagctcactcgtgatgaaacaactatcattacaggagctttggagctgactcaaaagattgcaaaagatgccatgactcctatatctgaaaccttctcacttgacataaatgctaagctggacttacacacaatgggtatgataatgactagagggcatagtcgtgttcctatatactctgggattccaagcaatattattggccttatattggtaaaaaacttgattacttgccgagctgaggatgaagtgcccattcgtaatgttactatcagaaaaattccaaggctcatccccttcttatgctaacaacactgctggaagtcgtagatttaacatagagaagcatggagacgggcgctcatgtaataagaaatcagaaaagaagcgggaaaatattcttgattttaacacagatccacttccaagctattcaatggatgaggcggcagtcggaataatcacgatggaagatgtaatggaagaacttctacaggaagaaatctatgatgaaacagatgagtatgttgatgtacataacaagatcaggataaacatgttacctccaggcaaagcactgtcacctaccatatctcctggtggtggacccttacctcaggggctccgaaagactcctatgacatctccgttctcaccatactaccattgtaattcagtgttacgttccccagcttccaaccattgtcagtcacctgggactctaccgacaatactttcccctggaagatcacctactgcacaaacacctgggcaaagttcaccaaatggaagtcaggtttcaataaattccaacggtcaacataaaaaggacggtgagaactaacataccagaagattgttttccagacggtctcgtctcaagacgggatgcatgattaaaaatcatgaaattgctagcgtaggattaagctgcgaatataagtagcacagctctcttgaatggttagtggcccatgtatttattgattgtttgcttgtacatatatgcttcggcatccggaccttagtatggcctaatcctcactatgtatcatacataggaagtgaatggaagccaatataattttgctctagacaattttagcttgctttctggacccttatgtaagccttcaagatagtgaaaatgttaagtgagtagctcacgagctaaataatggctagatattctcggtaatgaccaaaatcgatcaagtacaacaccaaaagcaaataaaataaaaaacaacgctctcaattccaatcaagatgaaataagagcgaaaaatgggacaccagaagaaaaagaaatcaaaactctaaataagagtctggtcgccatcaagaaaaccatagaacaagaaggtgtatcaagggagacgggtttgagatccacttgaagtcattctatagtggtaacctattctatatgattggagatgtcgtgaagtagaatagtgaaacaagcgaatggttgactggtggagagaattccttataataacgtcgtctagatcgttagagatgctagtttcgtcattattgtatgatagattggttaagttgttaatgtgattcaag

SEQ ID NO: 213947 - DNA, 2821 bp, Zea Mays
tagggtcgcaagccgagccaaaagcagctgcactgcagaccgaccaccacgcgacgctcctgctggctgctgccgcggaacccgggacaagcgacctcctccacctccccagctagctatagcttcctgcttgcagctgcaggtgccagccgagccgcctaccgggtacagccgcacaggcaggcggcggcatgcgctccagcctccagcagtgagggagggagctgtcccgctcccgccccttctacttctacccctccccccccgcgggccgagagggagtccgcccgccggcgccgcgcgactcaccgatgcccagccatgaggcctgctgcggcaccatgttctgggtgtacctcatgtcctgcgtcggcctcgtcgtcttcgccggcctcatgtcgggcctcaccctcggcctcatgtccctcagcctcgtcgacctcgagccaggatcctccccgtcatgaagaaccagcacctgctcctctgcacgctcctcatcggaaactcgctcgccatggaggcgctgcccatattcctcgacacgctcgtgccgccctacgtcgccatcctcatctccgtcacgctcatcctcgcgttcggggagatcatgccgcaagccatctgcacgcgctacgggcttagcgtgggggccaaggcggcgcccgtcgtccgcctactgctcatcctcttcttccccgtcgcctacccgatcagtaagttgttggaccgcctactgggaaagggacattttgcactaatgagaagagctgagctgaagacgttagttgatatgcacggcaatgaggctggaaaaggtggagagctcactcgtgatgaaacaactatcattacaggagctttggagctgactcaaaagattgcaaaagatgccatgactcctatatctgaaaccttctcacttgacataaatgctaagctggacttacacacaatgggtatgataatgactagagggcatagtcgtgttcctatatactctgggattccaagcaatattattggccttatattggtaaaaaacttgattacttgccgagctgaggatgaagtgcccattcgtaatgttactatcagaaaaattccaaggctcatccccttcttatgctaacaacactgctggaagtcgtagatttaacatagagaagcatggagacgggcgctcatgtaataagaaatcagaaaagaagcgggaaaatattcttgattttaacacagatccacttccaagctattcaatggatgaggcggcagtcggaataatcacgatggaagatgtaatggaagaacttctacaggttgcacatatttgtaatcaagttcccatggtttggaacaagtatttacattgctcacagcataaaatgtctaccatgctttcaaaatatgcactaagatcaccagctaatgatgctgtatgagtgttctccatatcccattaaaacatcagttgtttgcaacattttagccatcataaggagtgcttgtacctgggtcattatggccctttattttccctctactttaatatatgggtgcgcagtcctcctgcgctctttcgaaaaaaaaaacattttagccatcataagtactagtattcaattaggagagaaactaggggggaaaatcagttgcacttgaattgtggtaatttgtttgtcttctcaagtttggcttctctcagatattgtaaactgacacggctctgttcgcaggaagaaatctatgatgaaacagatgagtatgttgatgtacataacaagatcaggataaacatgttacctccaggcaaagcactgtcacctaccatatctcctggtggtggacccttacctcaggggctccgaaagactcctatgacatctccgttctcaccatactaccattgtaattcagtgttacgttccccagcttccaaccattgtcagtcacctgggactctaccgacaatactttcccctggaagatcacctactgcacaaacacctgggcaaagttcaccaaatggaagtcaggtttcaataaattccaacggtcaacataaaaaggacggtgagaactaacataccagaagattgttttccagacggtctcgtctcaagacgggatgcatgattaaaaatcatgaaattgctagcgtaggattaagctgcgaatataagtagcacagctctcttgaatggttagtggcccatgtatttattgattgtttgcttgtacatatatgcttcggcatccggaccttagtatggcctaatcctcactatgtatcatacataggaagtgaatggaagccaatataattttgctctagacaattttagcttgctttctggacccttatgtaagccttcaagatagtgaaaatgttaagtgagtagctcacgagctaaataatggctagatattctcggtaatgaccaaaatcgatcaagtacaacaccaaaagcaaataaaataaaaaacaacgctctcaattccaatcaagatgaaataagagcgaaaaatgggacaccagaagaaaaagaaatcaaaactctaaataagagtctggtcgccatcaagaaaaccatagaacaagaaggtgtatcaagggagacgggtttgagatccacttgaagtcattctatagtggtaacctattctatatgattggagatgtcgtgaagtagaatagtgaaacaagcgaatggttgactggtggagagaattccttataataacgtcgtctagatcgttagagatgctagtttcgtcattattgtatgatagattggttaagttgttaatgtgattcaag

SEQ ID NO: 213948 - DNA, 1407 bp, Zea Mays
cagccacatggctgtggtagttaaacgaacaaaggaagcaggagtatccactgaaaaccaaaagagcacaactgcagattataaaataaaccccaaagatgctcatgctgatggctcatccccttcttatgctaacaacactgctggaagtcgtagatttaacatagagaagcatggagacgggcgctcatgtaataagaaatcagaaaagaagcgggaaaatattcttgattttaacacagatccacttccaagctattcaatggatgaggcggcagtcggaataatcacgatggaagatgtaatggaagaacttctacaggaagaaatctatgatgaaacagatgagtatgttgatgtacataacaagatcaggataaacatgttacctccaggcaaagcactgtcacctaccatatctcctggtggtggacccttacctcaggggctccgaaagactcctatgacatctccgttctcaccatactaccattgtaattcagtgttacgttccccagcttccaaccattgtcagtcacctgggactctaccgacaatactttcccctggaagatcacctactgcacaaacacctgggcaaagttcaccaaatggaagtcaggtttcaataaattccaacggtcaacataaaaaggacggtgagaactaacataccagaagattgttttccagacggtctcgtctcaagacgggatgcatgattaaaaatcatgaaattgctagcgtaggattaagctgcgaatataagtagcacagctctcttgaatggttagtggcccatgtatttattgattgtttgcttgtacatatatgcttcggcatccggaccttagtatggcctaatcctcactatgtatcatacataggaagtgaatggaagccaatataattttgctctagacaattttagcttgctttctggacccttatgtaagccttcaagatagtgaaaatgttaagtgagtagctcacgagctaaataatggctagatattctcggtaatgaccaaaatcgatcaagtacaacaccaaaagcaaataaaataaaaaacaacgctctcaattccaatcaagatgaaataagagcgaaaaatgggacaccagaagaaaaagaaatcaaaactctaaataagagtctggtcgccatcaagaaaaccatagaacaagaaggtgtatcaagggagacgggtttgagatccacttgaagtcattctatagtggtaacctattctatatgattggagatgtcgtgaagtagaatagtgaaacaagcgaatggttgactggtggagagaattccttataataacgtcgtctagatcgttagagatgctagtttcgtcattattgtatgatagattggttaagttgttaatgtgattcaag

SEQ ID NO: 213949 - DNA, 312 bp, Zea Mays
ctttttccccgaaaccaaaacagaaaaaaagtaaagtcctgctggcagctgtcaaccacccgtggtcccgtggaagagaagagagcatcgccggacccggggacggcgcgccgagaaggaacaaaagaagacggcggcggggcggagatggggagccctctgggcgggtggccgtcatacaacccgcacaacttcagccagttggtccctgccgacccctccgcgcagccctcgaatgtcacaccagccacttatgttgcgacccacaggacagatccgccacccaatcaagactactgcggactgaatcgc

SEQ ID NO: 213950 - DNA, 3869 bp, Zea Mays
gccaaggggccctaaaccccctgcgcccgcccgctcttcttccctttctttcattctccagagaccaaacttgccatgccagcgcagtagccagtccagtgaacacaacgcagcgcagagcagaaaagggccaggaagccaccaaaacctgatccttaactgccctccgaacgccaactcatcccctcccccatcctcccctgccatcctcgacgccacgccatctctctctctgccctgccttgcgttgtcttggtcggtttcgtttcgatcccgctcctgaacagtacgtcggcaacttggagggggcgctgcctgcttcttcttcctcccgtgaagggaaggcggggtagccgatctcggcccgagttgatccggttgcgggggcttttctctcgcgtggtcctccagcgcgccgcgccgcgccgtgaatcgacaaccggccaccatgttcgtcaagaagctcgtggagagggcctccaagaagcaacatatcggcagcatcagctcccttcgccccgagaacgtcagcccgcggctagccttccactacggcgtccctgcggacgccgccctccttgcctacgaccccgttctccacgtgctcgccgtcgccaccaggaatggacagatcaagctgttcggccgcgacaacacgcaggcgttgctccagtccccctcccctctcccttccaggttcttgcagtttgccgagggccaaggggttctgctcaatgtcaatacccagaaccagatcgaggtttgggacattgatgcgaaaaaactctgttatctgcacccggctgaaaaggcgatcactgcattctctgtgctgcagaagagcttctacatatatgttggagatagttctggaagtgtgtccccattgaagcttgatttggctcagagatgtctagctgacctgccgtactggattccttttactgaatcttatggttccactaccagtgccggtaatgatgtggaagtagtatttgtttcaccccagcctttgtctgaatcgaacagggtgctcattatcttcagagatggggttatgagtttgtgggatattaaagctagcaaagcagtatccatatctggtaaaactacgcagcagcaatcacagaaggaggctaaaaatgtaacatcagcatgctgggtttgtgccaagggaagcaaaattgctatcggatacgataatggcgatttatacatttgggccattcctgaggttacaagtacacaaaattcctcatctatgggtggccagaatctacctattcagaggcttaacctaggatacaagctagacaagttgccaatagtctctttgcaatggatccctagcgatggaaaggcaggccgtttgtatatcaatggtttcaatgatcatggacacctatttcaggttctgattctgaatgaagagagtgagtcgcgaattgtaaagatggttttgcctatcgctgaatcttgccaaggaatggaacttgttacagggcttagtgacccaaataagcacagacaaagtgcccttgcactcttgttgaaatctggtcacatctgtttatatgatgattcagaaattgagcgctatctccttcactctcagtctagatcccctccaacacttccaaactgttcatatgtgaagcttccttatggtgattcaggcatcagtgttgcaaagttctatacaagtaaccctgcagcgttagcttctttggacgaggattatttttcatcagctaccaaatatccatgtctgttttcaatgaagggtaaaggtcagactttaacaagttttaccaacattcataagacccggaacctctatataactggacatctagatggaaccataagcttttgggatgcatcttgtcctcatttgctgcagatttttatgataaagcagcagaataaagacgatacatcaactggtaaccctatcacatcattacagtttgatatgtcctctagcattctattgtctggagaaaggagtggaatggtccatattatcacattcaaaaaggactccagcgacaacatattctcctttttaaatgcaaagcaaggagacaactatgatgtcagaagtataaagctcaaaggtgctgtaaccacaatgtcttctatctcaaaatcaaagcattttgctgttgggacagaaaaaggaattgtatcagttatcaacgtagaagatgctacaatattatatcaagaacagtttgagtgtcgactgcctggtggaatcgcctctttgcaatttgaaatctatagccataatggatatgacaaggacattttgataatagcgatggaagattcatctatttttgttatcgaggaagaaacggggaaacttttgaaccccaacccagttcagacagacaaaccctctaaagccatccttctgcagatgttggagttatcgcccattgacacaccagcagtttcagataaccaagatacagtatcgaaggaatcattgctgctactttgcactgaaaatgcgatccgtttgttttccttgggccacgcaattcagggcacaaagaagataatcaataagaagaaattgagcagctgttgttgtttcgcctctcttattcatagttcttctaatgacattggacttatactcgtcttctccaatgggaaacttgaaataagatccctgccagacttgtccttgttgaaggatgcctttttacgaggttttgtgtactcaagaaacttgaattcaagtagttccataacatgttcatctgatggagaagccatcttgattaatggagaagagacctattttttctctacgctctgccaggatgagatatacaggcacgtagacagcattagtacagtgtacagaaaagagaactcaaccagggaagactcttcttttgtagtgaaatctcctaaagaaaagaaaaagggtctgtttggaatgattatgaaagataacaaaggaagcaaatcaaaagaaagtgatgcaattggcagcgaacaatgtattgcaacgacttctgaagagctggcttcaatattttcatcaactaactttgctccgccatctgagggaaggaacagttcactacgagatgatgaaaatgccgagctggacatagatgatatcgacattgatgacaacccacagaagccaaaaggtccacatttccctggtctaagcaaagataaaatcagcaagggactccaaacccttaaaggaaagttgaagcccaagactgaagaaaagataagctcgggaaacaaaaaaactgaagatgaaacatcagtgagtcaagtcgatcagataaagatgaagtatggatatgcaaatacaacaaatgatgactcaaccagtgtcacaaaaatgattgggaacaagctgcaggaaaacatgaaaaagttggagggcattaaccttcgagctgccgatatggcgagcggcgcccagtcattctccacaatggcaaaagagctactccggacaacaaagaacgagaaggggacctcataatcacctacaccaatttcccctcctttgtatagttcgtcttttcctttttttttcatccctggatcgtggatctgacgatctggacctccccgttgtcagactctaaatagtgaatggagtgtaagtgactgaagtaccctttacatcttggtatagggtaacagcagggacttcacatagttattttttgccgcggcaatgtcgactctaccgtctacactcgaatgaggattgataccaaatatttgttataaagaaaggtgttttcaaaggtaacacgaagaagcttatgcctttttgaagggctctggctccgatttcacctgctaaggctgag

SEQ ID NO: 213951 - DNA, 3862 bp, Zea Mays
agccagtccagtgaacacaacgcagcgcagagcagaaaagggccaggaagccaccaaaacctgatccttaactgccctccgaacgccaactcatcccctcccccatcctcccctgccatcctcgacgccacgccatctctctctctgccctgccttgcgttgtcttggtcggtttcgtttcgatcccgctcctgaacagtacgtcggcaacttggagggggcgctgcctgcttcttcttcctcccgtgaagggaaggcggggtagccgatctcggcccgagttgatccggttgcgggggcttttctctcgcgtggtcctccagcgcgccgcgccgcgccgtgaatcgacaaccggccaccatgttcgtcaagaagctcgtggagagggcctccaagaagcaacatatcggcagcatcagctcccttcgccccgagaacgtcagcccgcggctagccttccactacggcgtccctgcggacgccgccctccttgcctacgaccccgttctccacgtgctcgccgtcgccaccaggaatggacagatcaagctgttcggccgcgacaacacgcaggcgttgctccagtccccctcccctctcccttccaggttcttgcagtttgccgagggccaaggggttctgctcaatgtcaatacccagaaccagatcgaggtttgggacattgatgcgaaaaaactctgttatctgcacccggctgaaaaggcgatcactgcattctctgtgctgcagaagagcttctacatatatgttggagatagttctggaagtgtgtccccattgaagcttgatttggctcagagatgtctagctgacctgccgtactggattccttttactgaatcttatggttccactaccagtgccggtaatgatgtggaagtagtatttgtttcaccccagcctttgtctgaatcgaacagggtgctcattatcttcagagatggggttatgagtttgtgggatattaaagctagcaaagcagtatccatatctggtaaaactacgcagcagcaatcacagaaggaggctaaaaatgtaacatcagcatgctgggtttgtgccaagggaagcaaaattgctatcggatacgataatggcgatttatacatttgggccattcctgaggttacaagtacacaaaattcctcatctatgggtggccagaatctacctattcagaggcttaacctaggatacaagctagacaagttgccaatagtctctttgcaatggatccctagcgatggaaaggcaggccgtttgtatatcaatggtttcaatgatcatggacacctatttcaggttctgattctgaatgaagagagtgagtcgcgaattgtaaagatggttttgcctatcgctgaatcttgccaaggaatggaacttgttacagggcttagtgacccaaataagcacagacaaagtgcccttgcactcttgttgaaatctggtcacatctgtttatatgatgattcagaaattgagcgctatctccttcactctcagtctagatcccctccaacacttccaaactgttcatatgtgaagcttccttatggtgattcaggcatcagtgttgcaaagttctatacaagtaaccctgcagcgttagcttctttggacgaggattatttttcatcagctaccaaatatccatgtctgttttcaatgaagggtaaaggtcagactttaacaagttttaccaacattcataagacccggaacctctatataactggacatctagatggaaccataagcttttgggatgcatcttgtcctcatttgctgcagatttttatgataaagcagcagaataaagacgatacatcaactggtaaccctatcacatcattacagtttgatatgtcctctagcattctattgtctggagaaaggagtggaatggtccatattatcacattcaaaaaggactccagcgacaacatattctcctttttaaatgcaaagcaaggagacaactatgatgtcagaagtataaagctcaaaggtgctgtaaccacaatgtcttctatctcaaaatcaaagcattttgctgttgggacagaaaaaggaattgtatcagttatcaacgtagaagatgctacaatattatatcaagaacagtttgagtgtcgactgcctggtggaatcgcctctttgcaatttgaaatctatagccataatggatatgacaaggacattttgataatagcgatggaagattcatctatttttgttatcgaggaagaaacggggaaacttttgaaccccaacccagttcagacagacaaaccctctaaagccatccttctgcagatgttggagttatcgcccattgacacaccagcagtttcagataaccaagatacagtatcgaaggaatcattgctgctactttgcactgaaaatgcgatccgtttgttttccttgggccacgcaattcagggcacaaagaagataatcaataagaagaaattgagcagctgttgttgtttcgcctctcttattcatagttcttctaatgacattggacttatactcgtcttctccaatgggaaacttgaaataagatccctgccagacttgtccttgttgaaggatgcctttttacgaggttttgtgtactcaagaaacttgaattcaagtagttccataacatgttcatctgatggagaagccatcttgattaatggagaagagacctattttttctctacgctctgccaggatgagatatacaggcacgtagacagcattagtacagtgtacagaaaagagaactcaaccagggaagactcttcttttgtagtgaaatctcctaaagaaaagaaaaagggtctgtttggaatgattatgaaagataacaaaggaagcaaatcaaaagaaagtgatgcaattggcagcgaacaatgtattgcaacgacttctgaagagctggcttcaatattttcatcaactaactttgctccgccatctgagggaaggaacagttcactacgagatgatgaaaatgccgagctggacatagatgatatcgacattgatgacaacccacagaagccaaaaggtccacatttccctggtctaagcaaagataaaatcagcaagggactccaaacccttaaaggaaagttgaagcccaagactgaagaaaagataagctcgggaaacaaaaaaactgaagatgaaacatcagtgagtcaagtcgatcagataaagatgaagtatggatatgcaaatacaacaaatgatgactcaaccagtgtcacaaaaatgattgggaacaagctgcaggaaaacatgaaaaagttggagaaatatagaatgcttgctactgtcacctgataaaagaagcaacagacggacagttaacgtggaccagtgtgctttcttcagggcattaaccttcgagctgccgatatggcgagcggcgcccagtcattctccacaatggcaaaagagctactccggacaacaaagaacgagaaggggacctcataatcacctacaccaatttcccctcctttgtatagttcgtcttttcctttttttttcatccctggatcgtggatctgacgatctggacctccccgttgtcagactctaaatagtgaatggagtgtaagtgactgaagtaccctttacatcttggtatagggtaacagcagggacttcacatagttattttttgccgcggcaatgtcgactctaccgtctacactcgaatgaggattgataccaaatatttgttataaagaaaggtgttttcaaaggtaacacgaagaagcttatgcctttttgaagggctctggctccgatttcacctgctaaggctgag

SEQ ID NO: 213952 - DNA, 742 bp, Zea Mays
ccggtccaggctgcgctcctgctcaactacgacccctccgggccatctcgcctccttcccgtcgtagcaagagggaacacaactttcagctcttgatatgcaaccactcctggactttgtcaagaggggtaatctgcagactgaattgttctctgttgggctgaaccaacatttggtcacctcaatccatgaaaactggttttgcgcccgctgcattaacagcacaaaaccagaaggtgaaggagtaatagttatgcagattggagcttgcttattagtcactatgtatgctggttctcttgctgcagcttcgcaagcaatggtggctgctgatcagtttgcaatacagtttaaccggaggagtcactaatttccagtatagtttcatgagtgatgttgatcgcaatttgttagtgtttgggatgatagtgctggaatgccgtagatgaccttatgtaacttgtaatgttacgatattctcggccgtagttatgctaatataatagcgaatattgactaatactgatgttcctagtgtgaggttgaagaagctcatgttgaatttgtggaaagtttccaaagcatccaaaagcttaaaagggacattagtttttcatcatttctcaatgtgagctcatgcaaaacattgaaggtttgaaatactttgaatcacgattcacagcaaaatgtatatagaaaaatactgcatatgtatcaagctaaaatctgattgtaatgagat

SEQ ID NO: 213953 - DNA, 2321 bp, Zea Mays
atttgcttgagtttcttcaagttagattacgtcattttgggaaaagaattaactatttgccactctgtttggaggtgggtggaaaatcctttgccatgactcatgggtcagtgacacatgattaaggggttttggactttcacatgtcttttgatatcacagaaaaggattgcccctgccttcactgctgtgaatgccagggacgtttctgtcgccctacaatatatggacattggacttgatagttggcaaactttcttctatatactggacgttccagctttcgccaacctgctgctttaaccacatcttttccttctttcccgattttgcctctcactatcatcaattaccgctaaaagtgaaacaagtgttctccctatggccaagacatcacttcctcctggattccggtttcatccaactgatgtagaactcacagtctactatttaaagaggaaactactgggaaaacacttacgctgcaatgctatcactgagattgatctatacaagttcgccccttgggatcttccaggctggaggacgaggaaatagctgcttctggtgttaaactggatgcctgcgttctatgcaaaatctttcagaaaagtggcccagggcccaagattggcgcacagtatggtgccccattcaatgaagaagactggaacgatgccagtaatgtagagtgttctccatgtgtgccttctgtggccccttgcgcacctgaatcaagtcgtggtgggttgaattctgctggtcaacgcctggctgtgagttatgatgtcaaggtttccttgggctcctcggcagaaggtatcaacagacctgctgtcaatggagttcatcctgtcagaccttctcctgatgctcctaatgactgcatacacattcaattgctggctgaggttatgagatgttcctcaacctcaatgcatgttttacgtactgctggtgacgatggtttgctggctgattcaactgctgactacagtagtgataatagaatatctttggatgctattgaaactatattctgtgaagtggatgagcttgggccccaggctatggtgaacaatactaaccattgtgactcatgcggtgagtatttgattcaccctacgatggtggcacgaggagctgaacagtacttagagctaaatgacctgtccttttcgctcaccgatggtcctgattcctgtggcgtgcttttctctaatggtgtatctgttgagcaactaccggatcttgagctcaggtttgagcagttctctcctgaccacatctccaataccgctattgcttccacatcaacaacggttggttcatctgcttcagtgcccttattggaggatcacaggacctgattcagaattggagtcatctggcgcacatgttaattgaatctaggaggatctgcaggacaaagctggacaagagaggtttaggaccttgaccagctcttactacagaggggcacaggggatcattatggtgtatgatgtcagtcgacgagagacgttcaccaatctttctgatatatgggccaaggaaattgacctgtattcaaccaaccaggactgtgtaaagatgcttgttggaaataaagtagacaaggaaagtgagagggctgtcacgaaaaaggagggaattgaatttgccagggaatacggttgtttgtttctagaatgcagtgcgaaaacaaaagtaaacgtagaacagtgttttgaggaactggttctaaagatcttagacacgccaagcctcctggcggatgcttcctcagcaggggtcagcaagaagaacatcttcaagcagaaggctccagaagctgacgccgccacaggcagctgctgttaacatggttttggtcctgtatattgctatatgtggtgaagacaattggcagcagctatataatgatgtatcaagttaaacttacctgacaatatgtagtcttgcctcccaaccgcagctaagtagcagaggcacgggtgggtggcatcaataccggcatgatacagtatcagacactgtcatctatataagaaacagccatacttcggttcgttggttgcctaagctcgctactccaagtatctcggtggttggccttgcgcttctactggtggacagcaatatcaacatgtctatatgtgacagaaaacagcctcacttctatttatttgtgccgtgcagtcgtgcagatgatatttcatctcaatccacaataacacatcttgtggaagcagattacgtttgagctaattgtggacgaataaagattaatggactctaaccatcaattagctattact

SEQ ID NO: 213954 - DNA, 2100 bp, Zea Mays
aactgccccgctccgatcctgtcgacggcggcggccacctgttcgaaccgcgcgctcctgctgccgtcgcccctcgctgcggcggcgaccttggcatcggccgcggggcgcggcggcggcgggtacacgtccggagcgccgacgacgccgaggtggaagcgaaacagaccccacgctgccgcggcgggctgcgcggacccggtgctgcggcgcgggcgcgccgagcgcagccgcgacgacgggctcggatgcgcgtagaacaggctgctcgacagcgagcgccgcggcggaggcgccccggcgccgtggtcggaggaggcgctcttggacgactggctccggctcacgcacccgctgctgctgctgctcgagctcgagctcgcgctgcggctgccggaccgtgacaccaggcccacggtggaggccactgactccgacctcggtagcgtggcgacgttggcatcgtcggcggccgcaaccgaggaggcgcggagcgggaggagcttgccctagcagaagacctcgtcggccgcgcacatgtccgtccccgcgctctctccggctggtacgatgtcgccggacgacaggatgcagaactcgaagtcgtcggccgagtccgaggcgcgacactctcagatcccgtgctcatcaccatcctgcccctcgctcgccgcccccacctcaccaagagccttagccgtccctagagaagacacggaggtgcagtgccagtgctttcctcaagtgcacctcggattttcggtaccggccagattgggacgaattcaacattcatcggctccaccaaaacactgccactatgatgtgtatgcttgcgtcaggacaggagacccaaaagtacttcacagatgaatgtgacattttccacaagaacgagatacgaaatggccaaggactgctgacgatgatgacgacatggccaccatcgctgccctcagattcggatatgaggccttggaattgaggaatggtggatctgattattttggcaaaggtgttcttaagaaatgactgtgaatgggaaagtaactctcaaagacaaatattcagttactgttgtatatgacaatcaattctttgcactccgaaaaaagtgttgcccatccgagcttgcatatattacttctttaagccgctgcaagaagtggaatgctcaaggtggaaagagcaaggcctattttgtaaagacaacagatgacaggttcatcattaagcaaatcaataaaacagagtttgagtcatttattaaatttgcacctgattactttaagcatgtttaccattctctggacactggaagccaaacttgtctcgccaaaatattaggaatctatcaggttaagcaaattaagcatggcaaagagatcaaaattatgttgaggacatgagcttttctccaatctatattggtggaagaacaaagcatcttttgcagcgtgcaatctggaatgacacgtctttcctcacttcggtgaatgttatggactattctctacttgtgggagtggacaaagagaagcatgaacttgtgtttggcatcattgattatctgaggcaatatacttaggacaaacaactggagacatgggtgaagacttctctggtagtacccaaaaatgttttaccaactgtaatttcccccaaggaatacaaaaaaaggtttaggaagttcatggcgaagtactttctgtcagttccagacacatggagtcttgataatccgtctaagccatgcaaatcccttggtcagagcaatcgcaagttggcggaagtccagattggtgataacctgtcagagcacccaaatgaagttgaggggtgtgcctaatcatgtgcaagatttcctggcaattttgttgaaccctatcatgttgttgtttggctatatttcactttgtaaaatggtgtacataggaggaccttgcggtttttaggcaaattgttgggcaagtgaggtccacatgacgtgtacctatacaaatgttcattgttgatttcacaattattatagtgaaattaagaattcatatgatcatttttttggacctaccacttgtgagactgaagcagtctattctt

SEQ ID NO: 213955 - DNA, 4614 bp, Zea Mays
ggtggatcccgcgtcccgcggccatcaccgcccccacctgctccgcgtcctccgatccccacccggccaccaccaccacgcccgagaagaaaaccgtaagaaacggtggaaaaataattgggaaaacaaaatttcaaatcgaagtcttcctacacccagcgacgaaaaggctgcgacaattcgaatcaaaaatccatccgagtcgaatcgagccagcggaaactccgcggccgatctcctgtgctctcaccgcccgcctcccccgattctgcagcccctcgctgcgaatctggacgcgatttcgaggctagggtttgggaggctccggatcgcgagcccgtgcggaggcaagggtttggattcgggggttgctgctgcatgtcgggggtgctggattgagctactccgcgccggcttgtgatggtggtgaccggcggtggaagacgagtagacggcggcggtgagtagggtttgttgactgagttggggtcgagggtgcgccggccatggtgcggcttctcgggctgcggagcctgagcttcggcccggaggactcgccgcgggagatcccctccactgccgacgtggccccgcccgttggcagcagcggctggctcgtgcgcttcttcgactccgccttcttctgcgagtggattgccgtcagctatctctacaagcacgaccatgctggagtgcgcgactacctctgcaaccgcatgtacacgctcccgctgccggggctcgaggcctacctcttccagagcttgagctggaggatgctgacgatctcgacgggatcgataaggtgcaggagcagtgccaggttgcagcgaccgtgcagggcgagtggccaccgcttgtccggccttcacctccatcccctgctgccagtccgcgaggtaaccccatgctcagcagaatacgatcgtccaagcagcggctactgtcccttgcatcgtcaccttcgcttggactgagccccccagcaggtggtggggtcaatgtcgctgaggatgctatgggtactggagggaagcagccagccacaccgtcatcagaggataacaagttactcaagaggctgagcattggtccaaaaatgcgcgatgcactgctcttcagacgatcaggagagaaggatgaagaacaagaccgggatggtttttttaaaaggcttcttagggacagcagagacaaggaggaggaggatggtgacagagaaggatttttcaaaagattacttagcagggagaaggataatgaggaggaagaaagtgatagagatggtttcttccgcagattactcagggatagcaaagaggaggacatggaactgacaccaagctcagatggtttgttgaagcgactttttcgtgataaggaggacaggcaaggtgaggatgatgagaaggaaggattttttcgcaggatgttcaaggataagaacgaggagaggagagatagtagtcatgcaagacatgggaatgaggaaagactgggcaagagtgtggaagatgatgacagagaaggtttcttccgcaaaattttcaaagataagaatgaggagaggaaagatgaagggcatcaaaagccagatgagagggaaaaggttggtgcgaacatagaagatgataagagagatggttttttcaggcaactctttaaggagaaaaacgatgagaaaaaggaaggcagcacaccaagcaagaaagaggaagatgataaaggccataaaaatgcagatgatgataatttctttcgcaggcttttcaaggataagaatgaagaaaagaaagggattgttcatgacaggaatgaagatgacaagtgtgaggaaggttgtttagagtgcacccagaagattctaagagtgggcacatagaaagcagtcaatctaacaatctttctgaggggagcccaggatcagaaagcttttttaagaggctattccgtgatagagaccgctcacttgaagattctgagatttttgggtcaaaaatggcaaaagagaaacaccctggtactacaggaatcaatgagaagcaaagtggaaaaccaccattaccaattaatgcagtagcagagcttcgaaaaggttcttactatgcttcgttggaacttgttcaggctttatgtgatacatcgtatggcctggtagacatatttcctattgaggatcgtaagattgccctccgggagtctcttacagagatcaatagccagattgcttctgctgaaaaaaacggaggagtatgctttccgatgggaaagggcatatatcgagtggttcatatacctgaagacgagtctgttcttctgaattctagggagaaagctccttaccttatatgtgttgaagttttaaaagcagaagctcctagccactctaaaggatcatcagatgggcacaaattatcaaaaggtgggataccattggctaatggagatgtgcaactaccaaaaccacctccatgggcctatcctttgtggagcagacacgaaacacaaaactatgaaacagacagaatgctgaagtctacttctcaggctgcgacatgatgctacggattctcatgatccacctggagattcgcaaacagttgctgatcagcctattgaatgggtgaaggttacgttgtctgcagttccaggagttaacatggaagatgtagatgataatgaaccaacacgaaagaaggaccatcgccgtgttcctagtacaattgccattgaggaagtaaaggctgcagcattaaaaggagaagctccacctggtcttcctctgaaaggagttgcgcagagcacccaaaatttagatcctaaggctactgatggtggggatccaaaaccaaccgatgctttggctggtgagctttgggctgtcaaacgcgaaagaattcgacggtcttcggttcatggaaaatcacctggttgggacttgcgttctattattgtcaagagtggtgatgattgccgacaggaacacttggccgtacagcttgttgcacacttctatgatatatatcaagaagctggtttaccactatggctgcggccttatgaagtaattgttacttcagcttatacagcactaattgagaccatccctgatacggcatcaatccattccgtcaaaagtaggtttcccaatatttcaagtctccgagactactatgtagccaagtatgaagagaattctccaaattttaaactcgcacagagaaactttgttgaaagtatggctggatattcaattctgtgctacctacttcaggtgaaagatcgccacaatgggaatcttctaattgatgaggaaggacatattattcatattgattttggtttcatactgtcgaactctcctggaggtgtaaacttcgagagtgcaccatttaagctaacgagggaactccttgaagtgatggattctgatgcagagggaactcccagtgagttctttgattactttaaggtgctatgcattcaaggtttccttacttgccggaagcatgcagaacgtattatacttcttgtggaaatgttgcaggattctggctttccatgtttcaaaggtggccctcgcacaatacaaaacttgaggaagaggttccacttgagtctaactgaagagcaatgtgtatccctggtgctctcactgatcagtagcagcatggatgcttggcgcactcggcaatatgattactaccagagagtattgaatggaattttatgattttccccacaggagcaacggattcattcagaaaccaattttcttgtatccttggagcaaaccatgggattgcataggtcagttttgggctgatctatgctggcaccccatatcagatttccaggagaggactaggttattgatcactgtgttttcatgtggcattgcacatttgtggtcaactagggaaacagattggtgccgcattgtactttcatgggaccccccctctgaaagagttgagaagtgtacagtcatcggcagtcatctagttagcgctttgtgctaggaggttgtgaccagtggagctctatttggcatattggaatttggaatccggctacattgttgtacagacctttgattgacgtagcttggagaggatgtaggagtgaacagggccatgctttgaagcgaacaagttataggcatatgggagctggggatcatccgagacagatgccgctcgaagtgtcactgtacttgttgtgtggtatccctatagcaccaaagtagatggagatgtgctttgctaaaaaaagataaagacccagtgttggccgctctcatatgtcactaggtctgaaaggaaattggccgctaatttgcgcgaggcctgtccttcagagaggtgctttgctgcatttgtaaattatcattactgtacagggaccatactgtcttagcattctgtttttaagttgttaagattttaattccttctttgtgggtgtcttggtcttcgaagatctaggtgatagcttgtttgactagcactatgatcagtgttcgaaagtacagttccatgtgtcatgaagaaaaacactgcaagatttttaatacatttttgatgtactatgagagcaaatttctatttcgat

SEQ ID NO: 213956 - DNA, 5418 bp, Zea Mays
ctccgcgtcctccgatccccacccggccaccaccaccacgcccgagaagaaaaccgtaagaaacggtggaaaaataattgggaaaacaaaatttcaaatcgaagtcttcctacacccagcgacgaaaaggctgcgacaattcgaatcaaaaatccatccgagtcgaatcgagccagcggaaactccgcggccgatctcctgtgctctcaccgcccgcctcccccgattctgcagcccctcgctgcgaatctggacgcgatttcgaggctagggtttgggaggctccggatcgcgagcccgtgcggaggcaagggtttggattcgggggttgctgctgcatgtcgggggtgctggattgagctactccgcgccggcttgtgatggtggtgaccggcggtggaagacgagtagacggcggcggtgagtagggtttgttgactgagttggggtcgagggtgcgccggccatggtgcggcttctcgggctgcggagcctgagcttcggcccggaggactcgccgcgggagatcccctccactgccgacgtggccccgcccgttggcagcagcggctggctcgtgcgcttcttcgactccgccttcttctgcgagtggattgccgtcagctatctctacaagcacgaccatgctggagtgcgcgactacctctgcaaccgcatgtacacgctcccgctgccggggctcgaggcctacctcttccaggtctgctacatgctcgtccacaagcccagcccttccctcgaccgcttcgtcatcgacacctgcgccaagtcgctccgcatcgcgctcaaggtgcactggctcctcgctgcagagcttgagctggaggatgctgacgatctcgacgggatcgataaggtgcaggagcagtgccaggttgcagcgaccgtgcagggcgagtggccaccgcttgtccggccttcacctccatcccctgctgccagtccgcgaggtaaccccatgctcagcagaatacgatcgtccaagcagcggctactgtcccttgcatcgtcaccttcgcttggactgagccccccagcaggtggtggggtcaatgtcgctgaggatgctatgggtactggagggaagcagccagccacaccgtcatcagaggataacaagttactcaagaggctgagcattggtccaaaaatgcgcgatgcactgctcttcagacgatcaggagagaaggatgaagaacaagaccgggatggtttttttaaaaggcttcttagggacagcagagacaaggaggaggaggatggtgacagagaaggatttttcaaaagattacttagcagggagaaggataatgaggaggaagaaagtgatagagatggtttcttccgcagattactcagggatagcaaagaggaggacatggaactgacaccaagctcagatggtttgttgaagcgactttttcgtgataaggaggacaggcaaggtgaggatgatgagaaggaaggattttttcgcaggatgttcaaggataagaacgaggagaggagagatagtagtcatgcaagacatgggaatgaggaaagactgggcaagagtgtggaagatgatgacagagaaggtttcttccgcaaaattttcaaagataagaatgaggagaggaaagatgaagggcatcaaaagccagatgagagggaaaaggttggtgcgaacatagaagatgataagagagatggttttttcaggcaactctttaaggagaaaaacgatgagaaaaaggaaggcagcacaccaagcaagaaagaggaagatgataaaggccataaaaatgcagatgatgataatttctttcgcaggcttttcaaggataagaatgaagaaaagaaagggattgttcatgacaggaatgaagatgacaagtgtgaggaaggtgataaagaaaacttcttccgcaaattatttaaggataaacatgaggagaggagaactgagggacctgataaaaatgatgattatggtaagggaagtagtggtatcgaagaggaagataatccagagtttttgtcattccgtaggttgtttagagtgcacccagaagattctaagagtgggcacatagaaagcagtcaatctaacaatctttctgaggggagcccaggatcagaaagcttttttaagaggctattccgtgatagagaccgctcacttgaagattctgagatttttgggtcaaaaatggcaaaagagaaacaccctggtactacaggaatcaatgagaagcaaagtggaaaaccaccattaccaattaatgcagtagcagagcttcgaaaaggttcttactatgcttcgttggaacttgttcaggctttatgtgatacatcgtatggcctggtagacatatttcctattgaggatcgtaagattgccctccgggagtctcttacagagatcaatagccagattgcttctgctgaaaaaaacggaggagtatgctttccgatgggaaagggcatatatcgagtggttcatatacctgaagacgagtctgttcttctgaattctagggagaaagctccttaccttatatgtgttgaagttttaaaagcagaagctcctagccactctaaaggatcatcagatgggcacaaattatcaaaaggtgggataccattggctaatggagatgtgcaactaccaaaaccacctccatgggcctatcctttgtggagcagacacgaaacacaaaactatgaaacagacagaatgctgaagtctacttctcaggttattgaccaagcaatggctcaactctgggagactaaagtaaaatttgtaaatgttagtttctctattgagaaacttggtcgctcaaggagcattgtactttctgaaacgggtcgtaggctgcgacatgatgctacggattctcatgatccacctggagattcgcaaacagttgctgatcagcctattgaatgggtgaaggttacgttgtctgcagttccaggagttaacatggaagatgtagatgataatgaaccaacacgaaagaaggaccatcgccgtgttcctagtacaattgccattgaggaagtaaaggctgcagcattaaaaggagaagctccacctggtcttcctctgaaaggagttgcgcagagcacccaaaatttagatcctaaggctactgatggtggggatccaaaaccaaccgatgctttggctggtgagctttgggctgtcaaacgcgaaagaattcgacggtcttcggttcatggaaaatcacctggttgggacttgcgttctattattgtcaagagtggtgatgattgccgacaggaacacttggccgtacagcttgttgcacacttctatgatatatatcaagaagctggtttaccactatggctgcggccttatgaagtaattgttacttcagcttatacagcactaattgagaccatccctgatacggcatcaatccattccgtcaaaagtaggtttcccaatatttcaagtctccgagactactatgtagccaagtatgaagagaattctccaaattttaaactcgcacagagaaactttgttgaaagtatggctggatattcaattctgtgctacctacttcaggtgaaagatcgccacaatgggaatcttctaattgatgaggaaggacatattattcatattgattttggtttcatactgtcgaactctcctggaggtgtaaacttcgagagtgcaccatttaagctaacgagggaactccttgaagtgatggattctgatgcagagggaactcccagtgagttctttgattactttaaggtgctatgcattcaaggtttccttacttgccggaagcatgcagaacgtattatacttcttgtggaaatgttgcaggtaacgtactttatctgtgttgcgtaatatatgtcatacaactaatttctaagggcaaatatttgtttaatccaaacgttttttttggctcaacattttgtgatgtatatcagtaaagaattatcgcattagattctttgacaggtcttctatattggccaaaagttccagtttctcaattttcatccaatacgaactcaagttttttcactgtgccttgtaatctgagctactacagtgaagttgttttctttttttctctcaaaaagtgaagttttttccttgtattgaagcatataaattgatttgagttaaccttttttatatggtataaggttacccctgcatgtctgggatgtggtatgctgtttacttataattgtgttgatttagctttttctctgatttggctagtatgcaaattgttacaaattatcttacaagtgttatattgcgttcccttaccaggattctggctttccatgtttcaaaggtggccctcgcacaatacaaaacttgaggaagaggttccacttgagtctaactgaagagcaatgtgtatccctggtgctctcactgatcagtagcagcatggatgcttggcgcactcggcaatatgattactaccagagagtattgaatggaattttatgattttccccacaggagcaacggattcattcagaaaccaattttcttgtatccttggagcaaaccatgggattgcataggtcagttttgggctgatctatgctggcaccccatatcagatttccaggagaggactaggttattgatcactgtgttttcatgtggcattgcacatttgtggtcaactagggaaacagattggtgccgcattgtactttcatgggaccccccctctgaaagagttgagaagtgtacagtcatcggcagtcatctagttagcgctttgtgctaggaggttgtgaccagtggagctctatttggcatattggaatttggaatccggctacattgttgtacagacctttgattgacgtagcttggagaggatgtaggagtgaacagggccatgctttgaagcgaacaagttataggcatatgggagctggggatcatccgagacagatgccgctcgaagtgtcactgtacttgttgtgtggtatccctatagcaccaaagtagatggagatgtgctttgctaaaaaaagataaagacccagtgttggccgctctcatatgtcactaggtctgaaaggaaattggccgctaatttgcgcgaggcctgtccttcagagaggtgctttgctgcatttgtaaattatcattactgtacagggaccatactgtcttagcattctgtttttaagttgttaagattttaattccttctttgtgggtgtcttggtcttcgaagatctaggtgatagcttgtttgactagcactatgatcagtgttcgaaagtacagttccatgtgtcatgaagaaaaacactgcaagatttttaatacatttttgatgtactatgagagcaaatttctatttcgat

SEQ ID NO: 213957 - DNA, 4761 bp, Zea Mays
cacgcccgagaagaaaaccgtaagaaacggtggaaaaataattgggaaaacaaaatttcaaatcgaagtcttcctacacccagcgacgaaaaggctgcgacaattcgaatcaaaaatccatccgagtcgaatcgagccagcggaaactccgcggccgatctcctgtgctctcaccgcccgcctcccccgattctgcagcccctcgctgcgaatctggacgcgatttcgaggctagggtttgggaggctccggatcgcgagcccgtgcggaggcaagggtttggattcgggggttgctgctgcatgtcgggggtgctggattgagctactccgcgccggcttgtgatggtggtgaccggcggtggaagacgagtagacggcggcggtgagtagggtttgttgactgagttggggtcgagggtgcgccggccatggtgcggcttctcgggctgcggagcctgagcttcggcccggaggactcgccgcgggagatcccctccactgccgacgtggccccgcccgttggcagcagcggctggctcgtgcgcttcttcgactccgccttcttctgcgagtggattgccgtcagctatctctacaagcacgaccatgctggagtgcgcgactacctctgcaaccgcatgtacacgctcccgctgccggggctcgaggcctacctcttccaggtctgctacatgctcgtccacaagcccagcccttccctcgaccgcttcgtcatcgacacctgcgccaagtcgctccgcatcgcgctcaaggtgcactggctcctcgctgcagagcttgagctggaggatgctgacgatctcgacgggatcgataaggtgcaggagcagtgccaggttgcagcgaccgtgcagggcgagtggccaccgcttgtccggccttcacctccatcccctgctgccagtccgcgaggtaaccccatgctcagcagaatacgatcgtccaagcagcggctactgtcccttgcatcgtcaccttcgcttggactgagccccccagcaggtggtggggtcaatgtcgctgaggatgctatgggtactggagggaagcagccagccacaccgtcatcagaggataacaagttactcaagaggctgagcattggtccaaaaatgcgcgatgcactgctcttcagacgatcaggagagaaggatgaagaacaagaccgggatggtttttttaaaaggcttcttagggacagcagagacaaggaggaggaggatggtgacagagaaggatttttcaaaagattacttagcagggagaaggataatgaggaggaagaaagtgatagagatggtttcttccgcagattactcagggatagcaaagaggaggacatggaactgacaccaagctcagatggtttgttgaagcgactttttcgtgataaggaggacaggcaaggtgaggatgatgagaaggaaggattttttcgcaggatgttcaaggataagaacgaggagaggagagatagtagtcatgcaagacatgggaatgaggaaagactgggcaagagtgtggaagatgatgacagagaaggtttcttccgcaaaattttcaaagataagaatgaggagaggaaagatgaagggcatcaaaagccagatgagagggaaaaggttggtgcgaacatagaagatgataagagagatggttttttcaggcaactctttaaggagaaaaacgatgagaaaaaggaaggcagcacaccaagcaagaaagaggaagatgataaaggccataaaaatgcagatgatgataatttctttcgcaggcttttcaaggataagaatgaagaaaagaaagggattgttcatgacaggaatgaagatgacaagtgtgaggaaggtgataaagaaaacttcttccgcaaattatttaaggataaacatgaggagaggagaactgagggacctgataaaaatgatgattatggtaagggaagtagtggtatcgaagaggaagataatccagagtttttgtcattccgtaggttgtttagagtgcacccagaagattctaagagtgggcacatagaaagcagtcaatctaacaatctttctgaggggagcccaggatcagaaagcttttttaagaggctattccgtgatagagaccgctcacttgaagattctgagatttttgggtcaaaaatggcaaaagagaaacaccctggtactacaggaatcaatgagaagcaaagtggaaaaccaccattaccaattaatgcagtagcagagcttcgaaaaggagtatgctttccgatgggaaagggcatatatcgagtggttcatatacctgaagacgagtctgttcttctgaattctagggagaaagctccttaccttatatgtgttgaagttttaaaagcagaagctcctagccactctaaaggatcatcagatgggcacaaattatcaaaaggtgggataccattggctaatggagatgtgcaactaccaaaaccacctccatgggcctatcctttgtggagcagacacgaaacacaaaactatgaaacagacagaatgctgaagtctacttctcaggttattgaccaagcaatggctcaactctgggagactaaagtaaaatttgtaaatgttagtttctctattgagaaacttggtcgctcaaggagcattgtactttctgaaacgggtcgtaggctgcgacatgatgctacggattctcatgatccacctggagattcgcaaacagttgctgatcagcctattgaatgggtgaaggttacgttgtctgcagttccaggagttaacatggaagatgtagatgataatgaaccaacacgaaagaaggaccatcgccgtgttcctagtacaattgccattgaggaagtaaaggctgcagcattaaaaggagaagctccacctggtcttcctctgaaaggagttgcgcagagcacccaaaatttagatcctaaggctactgatggtggggatccaaaaccaaccgatgctttggctggtgagctttgggctgtcaaacgcgaaagaattcgacggtcttcggttcatggaaaatcacctggttgggacttgcgttctattattgtcaagagtggtgatgattgccgacaggaacacttggccgtacagcttgttgcacacttctatgatatatatcaagaagctggtttaccactatggctgcggccttatgaagtaattgttacttcagcttatacagcactaattgagaccatccctgatacggcatcaatccattccgtcaaaagtaggtttcccaatatttcaagtctccgagactactatgtagccaagtatgaagagaattctccaaattttaaactcgcacagagaaactttgttgaaagtatggctggatattcaattctgtgctacctacttcaggtgaaagatcgccacaatgggaatcttctaattgatgaggaaggacatattattcatattgattttggtttcatactgtcgaactctcctggaggtgtaaacttcgagagtgcaccatttaagctaacgagggaactccttgaagtgatggattctgatgcagagggaactcccagtgagttctttgattactttaaggtgctatgcattcaaggtttccttacttgccggaagcatgcagaacgtattatacttcttgtggaaatgttgcaggattctggctttccatgtttcaaaggtggccctcgcacaatacaaaacttgaggaagaggttccacttgagtctaactgaagagcaatgtgtatccctggtgctctcactgatcagtagcagcatggatgcttggcgcactcggcaatatgattactaccagagagtattgaatggaattttatgattttccccacaggagcaacggattcattcagaaaccaattttcttgtatccttggagcaaaccatgggattgcataggtcagttttgggctgatctatgctggcaccccatatcagatttccaggagaggactaggttattgatcactgtgttttcatgtggcattgcacatttgtggtcaactagggaaacagattggtgccgcattgtactttcatgggaccccccctctgaaagagttgagaagtgtacagtcatcggcagtcatctagttagcgctttgtgctaggaggttgtgaccagtggagctctatttggcatattggaatttggaatccggctacattgttgtacagacctttgattgacgtagcttggagaggatgtaggagtgaacagggccatgctttgaagcgaacaagttataggcatatgggagctggggatcatccgagacagatgccgctcgaagtgtcactgtacttgttgtgtggtatccctatagcaccaaagtagatggagatgtgctttgctaaaaaaagataaagacccagtgttggccgctctcatatgtcactaggtctgaaaggaaattggccgctaatttgcgcgaggcctgtccttcagagaggtgctttgctgcatttgtaaattatcattactgtacagggaccatactgtcttagcattctgtttttaagttgttaagattttaattccttctttgtgggtgtcttggtcttcgaagatctaggtgatagcttgtttgactagcactatgatcagtgttcgaaagtacagttccatgtgtcatgaagaaaaacactgcaagatttttaatacatttttgatgtactatgagagcaaatttctatttcgat

SEQ ID NO: 213958 - DNA, 2591 bp, Zea Mays
aagaaacggtggaaaaataattgggaaaacaaaatttcaaatcgaagtcttcctacacccagcgacgaaaaggctgcgacaattcgaatcaaaaatccatccgagtcgaatcgagccagcggaaactccgcggccgatctcctgtgctctcaccgcccgcctcccccgattctgcagcccctcgctgcgaatctggacgcgatttcgaggctagggtttgggaggctccggatcgcgagcccgtgcggaggcaagggtttggattcgggggttgctgctgcatgtcgggggtgctggattgagctactccgcgccggcttgtgatggtggtgaccggcggtggaagacgagtagacggcggcggtgagtagggtttgttgactgagttggggtcgagggtgcgccggccatggtgcggcttctcgggctgcggagcctgagcttcggcccggaggactcgccgcgggagatcccctccactgccgacgtggccccgcccgttggcagcagcggctggctcgtgcgcttcttcgactccgccttcttctgcgagtggattgccgtcagctatctctacaagcacgaccatgctggagtgcgcgactacctctgcaaccgcatgtacacgctcccgctgccggggctcgaggcctacctcttccaggtctgctacatgctcgtccacaagcccagcccttccctcgaccgcttcgtcatcgacacctgcgccaagtcgctccgcatcgcgctcaaggtgcactggctcctcgctgcagagcttgagctggaggatgctgacgatctcgacgggatcgataaggtgcaggagcagtgccaggttgcagcgaccgtgcagggcgagtggccaccgcttgtccggccttcacctccatcccctgctgccagtccgcgaggtaaccccatgctcagcagaatacgatcgtccaagcagcggctactgtcccttgcatcgtcaccttcgcttggactgagccccccagcaggtggtggggtcaatgtcgctgaggatgctatgggtactggagggaagcagccagccacaccgtcatcagaggataacaagttactcaagaggctgagcattggtccaaaaatgcgcgatgcactgctcttcagacgatcaggagagaaggatgaagaacaagaccgggatggtttttttaaaaggcttcttagggacagcagagacaaggaggaggaggatggtgacagagaaggatttttcaaaagattacttagcagggagaaggataatgaggaggaagaaagtgatagagatggtttcttccgcagattactcagggatagcaaagaggaggacatggaactgacaccaagctcagatggtttgttgaagcgactttttcgtgataaggaggacaggcaaggtgaggatgatgagaaggaaggattttttcgcaggatgttcaaggataagaacgaggagaggagagatagtagtcatgcaagacatgggaatgaggaaagactgggcaagagtgtggaagatgatgacagagaaggtttcttccgcaaaattttcaaagataagaatgaggagaggaaagatgaagggcatcaaaagccagatgagagggaaaaggttggtgcgaacatagaagatgataagagagatggttttttcaggcaactctttaaggagaaaaacgatgagaaaaaggaaggcagcacaccaagcaagaaagaggaagatgataaaggccataaaaatgcagatgatgataatttctttcgcaggcttttcaaggataagaatgaagaaaagaaagggattgttcatgacaggaatgaagatgacaagtgtgaggaaggtgataaagaaaacttcttccgcaaattatttaaggataaacatgaggagaggagaactgagggacctgataaaaatgatgattatggtaagggaagtagtggtatcgaagaggaagataatccagagtttttgtcattccgtaggttgtttagagtgcacccagaagattctaagagtgggcacatagaaagcagtcaatctaacaatctttctgaggggagcccaggatcagaaagcttttttaagaggctattccgtgatagagaccgctcacttgaagattctgagatttttgggtcaaaaatggcaaaagagaaacaccctggtactacaggaatcaatgagaagcaaagtggaaaaccaccattaccaattaatgcagtagcagagcttcgaaaaggttcttactatgcttcgttggaacttgttcaggctttatgtgatacatcgtatggcctggtagacatatttcctattgaggatcgtaagattgccctccgggaggtaggtcaaacacattaccatgtaacttcatggctattcatttcacaacccttcagtcatcctgtgccaatcattgcactctctttgttcttttcacattttaacttgtaccctgcactgcaatgatatcttcttttgtgtggcagtctcttacagagatcaatagccagattgcttctgctgaaaaaaacggagttgccatcaccattgtaaggactggagttagtttctt

SEQ ID NO: 213959 - DNA, 4789 bp, Zea Mays
aagaaacggtggaaaaataattgggaaaacaaaatttcaaatcgaagtcttcctacacccagcgacgaaaaggctgcgacaattcgaatcaaaaatccatccgagtcgaatcgagccagcggaaactccgcggccgatctcctgtgctctcaccgcccgcctcccccgattctgcagcccctcgctgcgaatctggacgcgatttcgaggctagggtttgggaggctccggatcgcgagcccgtgcggaggcaagggtttggattcgggggttgctgctgcatgtcgggggtgctggattgagctactccgcgccggcttgtgatggtggtgaccggcggtggaagacgagtagacggcggcggtgagtagggtttgttgactgagttggggtcgagggtgcgccggccatggtgcggcttctcgggctgcggagcctgagcttcggcccggaggactcgccgcgggagatcccctccactgccgacgtggccccgcccgttggcagcagcggctggctcgtgcgcttcttcgactccgccttcttctgcgagtggattgccgtcagctatctctacaagcacgaccatgctggagtgcgcgactacctctgcaaccgcatgtacacgctcccgctgccggggctcgaggcctacctcttccaggtctgctacatgctcgtccacaagcccagcccttccctcgaccgcttcgtcatcgacacctgcgccaagtcgctccgcatcgcgctcaaggtgcactggctcctcgctgcagagcttgagctggaggatgctgacgatctcgacgggatcgataaggtgcaggagcagtgccaggttgcagcgaccgtgcagggcgagtggccaccgcttgtccggccttcacctccatcccctgctgccagtccgcgaggtaaccccatgctcagcagaatacgatcgtccaagcagcggctactgtcccttgcatcgtcaccttcgcttggactgagccccccagcaggtggtggggtcaatgtcgctgaggatgctatgggtactggagggaagcagccagccacaccgtcatcagaggataacaagttactcaagaggctgagcattggtccaaaaatgcgcgatgcactgctcttcagacgatcaggagagaaggatgaagaacaagaccgggatggtttttttaaaaggcttcttagggacagcagagacaaggaggaggaggatggtgacagagaaggatttttcaaaagattacttagcagggagaaggataatgaggaggaagaaagtgatagagatggtttcttccgcagattactcagggatagcaaagaggaggacatggaactgacaccaagctcagatggtttgttgaagcgactttttcgtgataaggaggacaggcaaggtgaggatgatgagaaggaaggattttttcgcaggatgttcaaggataagaacgaggagaggagagatagtagtcatgcaagacatgggaatgaggaaagactgggcaagagtgtggaagatgatgacagagaaggtttcttccgcaaaattttcaaagataagaatgaggagaggaaagatgaagggcatcaaaagccagatgagagggaaaaggttggtgcgaacatagaagatgataagagagatggttttttcaggcaactctttaaggagaaaaacgatgagaaaaaggaaggcagcacaccaagcaagaaagaggaagatgataaaggccataaaaatgcagatgatgataatttctttcgcaggcttttcaaggataagaatgaagaaaagaaagggattgttcatgacaggaatgaagatgacaagtgtgaggaaggtgataaagaaaacttcttccgcaaattatttaaggataaacatgaggagaggagaactgagggacctgataaaaatgatgattatggtaagggaagtagtggtatcgaagaggaagataatccagagtttttgtcattccgtaggttgtttagagtgcacccagaagattctaagagtgggcacatagaaagcagtcaatctaacaatctttctgaggggagcccaggatcagaaagcttttttaagaggctattccgtgatagagaccgctcacttgaagattctgagatttttgggtcaaaaatggcaaaagagaaacaccctggtactacaggaatcaatgagaagcaaagtggaaaaccaccattaccaattaatgcagtagcagagcttcgaaaagtctcttacagagatcaatagccagattgcttctgctgaaaaaaacggaggagtatgctttccgatgggaaagggcatatatcgagtggttcatatacctgaagacgagtctgttcttctgaattctagggagaaagctccttaccttatatgtgttgaagttttaaaagcagaagctcctagccactctaaaggatcatcagatgggcacaaattatcaaaaggtgggataccattggctaatggagatgtgcaactaccaaaaccacctccatgggcctatcctttgtggagcagacacgaaacacaaaactatgaaacagacagaatgctgaagtctacttctcaggttattgaccaagcaatggctcaactctgggagactaaagtaaaatttgtaaatgttagtttctctattgagaaacttggtcgctcaaggagcattgtactttctgaaacgggtcgtaggctgcgacatgatgctacggattctcatgatccacctggagattcgcaaacagttgctgatcagcctattgaatgggtgaaggttacgttgtctgcagttccaggagttaacatggaagatgtagatgataatgaaccaacacgaaagaaggaccatcgccgtgttcctagtacaattgccattgaggaagtaaaggctgcagcattaaaaggagaagctccacctggtcttcctctgaaaggagttgcgcagagcacccaaaatttagatcctaaggctactgatggtggggatccaaaaccaaccgatgctttggctggtgagctttgggctgtcaaacgcgaaagaattcgacggtcttcggttcatggaaaatcacctggttgggacttgcgttctattattgtcaagagtggtgatgattgccgacaggaacacttggccgtacagcttgttgcacacttctatgatatatatcaagaagctggtttaccactatggctgcggccttatgaagtaattgttacttcagcttatacagcactaattgagaccatccctgatacggcatcaatccattccgtcaaaagtaggtttcccaatatttcaagtctccgagactactatgtagccaagtatgaagagaattctccaaattttaaactcgcacagagaaactttgttgaaagtatggctggatattcaattctgtgctacctacttcaggtgaaagatcgccacaatgggaatcttctaattgatgaggaaggacatattattcatattgattttggtttcatactgtcgaactctcctggaggtgtaaacttcgagagtgcaccatttaagctaacgagggaactccttgaagtgatggattctgatgcagagggaactcccagtgagttctttgattactttaaggtgctatgcattcaaggtttccttacttgccggaagcatgcagaacgtattatacttcttgtggaaatgttgcaggattctggctttccatgtttcaaaggtggccctcgcacaatacaaaacttgaggaagaggttccacttgagtctaactgaagagcaatgtgtatccctggtgctctcactgatcagtagcagcatggatgcttggcgcactcggcaatatgattactaccagagagtattgaatggaattttatgattttccccacaggagcaacggattcattcagaaaccaattttcttgtatccttggagcaaaccatgggattgcataggtcagttttgggctgatctatgctggcaccccatatcagatttccaggagaggactaggttattgatcactgtgttttcatgtggcattgcacatttgtggtcaactagggaaacagattggtgccgcattgtactttcatgggaccccccctctgaaagagttgagaagtgtacagtcatcggcagtcatctagttagcgctttgtgctaggaggttgtgaccagtggagctctatttggcatattggaatttggaatccggctacattgttgtacagacctttgattgacgtagcttggagaggatgtaggagtgaacagggccatgctttgaagcgaacaagttataggcatatgggagctggggatcatccgagacagatgccgctcgaagtgtcactgtacttgttgtgtggtatccctatagcaccaaagtagatggagatgtgctttgctaaaaaaagataaagacccagtgttggccgctctcatatgtcactaggtctgaaaggaaattggccgctaatttgcgcgaggcctgtccttcagagaggtgctttgctgcatttgtaaattatcattactgtacagggaccatactgtcttagcattctgtttttaagttgttaagattttaattccttctttgtgggtgtcttggtcttcgaagatctaggtgatagcttgtttgactagcactatgatcagtgttcgaaagtacagttccatgtgtcatgaagaaaaacactgcaagatttttaatacatttttgatgtactatgagagcaaatttctatttcgat

SEQ ID NO: 213960 - DNA, 4578 bp, Zea Mays
aagaaacggtggaaaaataattgggaaaacaaaatttcaaatcgaagtcttcctacacccagcgacgaaaaggctgcgacaattcgaatcaaaaatccatccgagtcgaatcgagccagcggaaactccgcggccgatctcctgtgctctcaccgcccgcctcccccgattctgcagcccctcgctgcgaatctggacgcgatttcgaggctagggtttgggaggctccggatcgcgagcccgtgcggaggcaagggtttggattcgggggttgctgctgcatgtcgggggtgctggattgagctactccgcgccggcttgtgatggtggtgaccggcggtggaagacgagtagacggcggcggtgagtagggtttgttgactgagttggggtcgagggtgcgccggccatggtgcggcttctcgggctgcggagcctgagcttcggcccggaggactcgccgcgggagatcccctccactgccgacgtggccccgcccgttggcagcagcggctggctcgtgcgcttcttcgactccgccttcttctgcgagtggattgccgtcagctatctctacaagcacgaccatgctggagtgcgcgactacctctgcaaccgcatgtacacgctcccgctgccggggctcgaggcctacctcttccaggtctgctacatgctcgtccacaagcccagcccttccctcgaccgcttcgtcatcgacacctgcgccaagtcgctccgcatcgcgctcaaggtgcactggctcctcgctgcagagcttgagctggaggatgctgacgatctcgacgggatcgataaggtgcaggagcagtgccaggttgcagcgaccgtgcagggcgagtggccaccgcttgtccggccttcacctccatcccctgctgccagtccgcgaggtaaccccatgctcagcagaatacgatcgtccaagcagcggctactgtcccttgcatcgtcaccttcgcttggactgagccccccagcaggtggtggggtcaatgtcgctgaggatgctatgggtactggagggaagcagccagccacaccgtcatcagaggataacaagttactcaagaggctgagcattggtccaaaaatgcgcgatgcactgctcttcagacgatcaggagagaaggatgaagaacaagaccgggatggtttttttaaaaggcttcttagggacagcagagacaaggaggaggaggatggtgacagagaaggatttttcaaaagattacttagcagggagaaggataatgaggaggaagaaagtgatagagatggtttcttccgcagattactcagggatagcaaagaggaggacatggaactgacaccaagctcagatggtttgttgaagcgactttttcgtgataaggaggacaggcaaggtgaggatgatgagaaggaaggattttttcgcaggatgttcaaggataagaacgaggagaggagagatagtagtcatgcaagacatgggaatgaggaaagactgggcaagagtgtggaagatgatgacagagaaggtttcttccgcaaaattttcaaagataagaatgaggagaggaaagatgaagggcatcaaaagccagatgagagggaaaaggttggtgcgaacatagaagatgataagagagatggttttttcaggcaactctttaaggagaaaaacgatgagaaaaaggaaggcagcacaccaagcaagaaagaggaagatgataaaggccataaaaatgcagatgatgataatttctttcgcaggcttttcaaggataagaatgaagaaaagaaagggattgttcatgacaggaatgaagatgacaagtgtgaggaaggtgataaagaaaacttcttccgcaaattatttaaggataaacatgaggagaggagaactgagggacctgataaaaatgatgattatggtaagggaagtagtggtatcgaagaggaagataatccagagtttttgtcattccgtaggttgtttagagtgcacccagaagattctaagagtgggcacatagaaagcagtcaatctaacaatctttctgaggggagcccaggatcagaaagcttttttaagaggctattccgtgatagagaccgctcacttgaagattctgagatttttgggtcaaaaatggcaaaagagaaacaccctggtactacaggaatcaatgagaagcaaagtggaaaaccaccattaccaattaatgcagtagcagagcttcgaaaaggttcttactatgcttcgttggaacttgttcaggctttatgtgatacatcgtatggcctggtagacatatttcctattgaggatcgtaagattgccctccgggagtctcttacagagatcaatagccagattgcttctgctgaaaaaaacggaggagtatgctttccgatgggaaagggcatatatcgagtggttcatatacctgaagacgagtctgttcttctgaattctagggagaaagctccttaccttatatgtgttgaagttttaaaagcagaagctcctagccactctaaaggatcatcagatgggcacaaattatcaaaaggtgggataccattggctaatggagatgtgcaactaccaaaaccacctccatgggcctatcctttgtggagcagacacgaaacacaaaactatgaaacagacagaatgctgaagtctacttctcaggctgcagcattaaaaggagaagctccacctggtcttcctctgaaaggagttgcgcagagcacccaaaatttagatcctaaggctactgatggtggggatccaaaaccaaccgatgctttggctggtgagctttgggctgtcaaacgcgaaagaattcgacggtcttcggttcatggaaaatcacctggttgggacttgcgttctattattgtcaagagtggtgatgattgccgacaggaacacttggccgtacagcttgttgcacacttctatgatatatatcaagaagctggtttaccactatggctgcggccttatgaagtaattgttacttcagcttatacagcactaattgagaccatccctgatacggcatcaatccattccgtcaaaagtaggtttcccaatatttcaagtctccgagactactatgtagccaagtatgaagagaattctccaaattttaaactcgcacagagaaactttgttgaaagtatggctggatattcaattctgtgctacctacttcaggtgaaagatcgccacaatgggaatcttctaattgatgaggaaggacatattattcatattgattttggtttcatactgtcgaactctcctggaggtgtaaacttcgagagtgcaccatttaagctaacgagggaactccttgaagtgatggattctgatgcagagggaactcccagtgagttctttgattactttaaggtgctatgcattcaaggtttccttacttgccggaagcatgcagaacgtattatacttcttgtggaaatgttgcaggattctggctttccatgtttcaaaggtggccctcgcacaatacaaaacttgaggaagaggttccacttgagtctaactgaagagcaatgtgtatccctggtgctctcactgatcagtagcagcatggatgcttggcgcactcggcaatatgattactaccagagagtattgaatggaattttatgattttccccacaggagcaacggattcattcagaaaccaattttcttgtatccttggagcaaaccatgggattgcataggtcagttttgggctgatctatgctggcaccccatatcagatttccaggagaggactaggttattgatcactgtgttttcatgtggcattgcacatttgtggtcaactagggaaacagattggtgccgcattgtactttcatgggaccccccctctgaaagagttgagaagtgtacagtcatcggcagtcatctagttagcgctttgtgctaggaggttgtgaccagtggagctctatttggcatattggaatttggaatccggctacattgttgtacagacctttgattgacgtagcttggagaggatgtaggagtgaacagggccatgctttgaagcgaacaagttataggcatatgggagctggggatcatccgagacagatgccgctcgaagtgtcactgtacttgttgtgtggtatccctatagcaccaaagtagatggagatgtgctttgctaaaaaaagataaagacccagtgttggccgctctcatatgtcactaggtctgaaaggaaattggccgctaatttgcgcgaggcctgtccttcagagaggtgctttgctgcatttgtaaattatcattactgtacagggaccatactgtcttagcattctgtttttaagttgttaagattttaattccttctttgtgggtgtcttggtcttcgaagatctaggtgatagcttgtttgactagcactatgatcagtgttcgaaagtacagttccatgtgtcatgaagaaaaacactgcaagatttttaatacatttttgatgtactatgagagcaaatttctatttcgat

SEQ ID NO: 213961 - DNA, 1456 bp, Zea Mays
tcaggctagtagagcagcattatgtacttcaggtacagctgttatggaactaatgttagcaagactgccctgtgtggtagcgtaccaagctcatttcattacagaatgctttatccacttgaggaaaaagataaactttatttctctgcccaacattctcttgaattctctcgttgtgcctgagatcctttttggggcttgtacagctaagaatttagctgcaaaattaagtgaggttatttcaaatgatcaaatccgccagatgcaaattgaatcagctggccaagtattcagggttctctatgaacccatcaagaaacgggatactttattaagggaagagatcgactactcaggcttgtcatcaaatttcctatctcctagcatgatcgcagctttaacagtgctttatatggataagcatcaaaacactgcatgccggaatttggtggtagaatcagaagctaagaaatctcttgttctaccaacgtggtcagggttccatgcatgttgttcatgcacaactggagtaacaaggcaacaagcaactggttatgtttaagcttccacttctgaagtggtatcagggtcggtcagcatcatggtatcgcaaacagatttggtcatcctgttggtgcagactcttctacggttagaatttcctagatggaacaggactcggggagtgtgactagatggtacagtggggcttcgaaagtaataatgaactacaagatttttttcttctgtgtttctgatttctttcagattctgcagtggctaggcagactgtacgctagcagtcgtctgctcctgctttttagcaaggggggatatgagagatgtcgttataatgaagcgcatatcgagatttctgttgtcctgacggatggagaggtaaatcctccaaatacccccacgaagtttggtaacgaatcctgatgtacttactagtctgcaagcctttgttattgtgtgggcagtataattttgtggtcgacctgacattgggcaatggtaaggtggaaactggtaggactgcagtttcctgtcaaaggatttttcaaaaagaaaatcaagtggatgaaacatggattcccacgtcgccagtggtacgatgacgtcactcctgaggtcacgcaggtggtgggccatgtggcgtcgaatgtattttgaattcttattttggtttaaaagttggaagagctacaggggcagtgggctcgggtaacatctctgttgttccccaccccaattggaatcccattcttggaatcttcgtaaggaaggcaaccgtttcgcatttgtttgatggattctcattctgtactcggcatttgtttaatgtctatactgagaaatctttactaagttcctattcatgccaagtcctgtagtcaaagctagagaagctgcagcgaacaaaatcatgttttcatcttgacctttttttttg

SEQ ID NO: 213962 - DNA, 1543 bp, Zea Mays
gctcttccccgcttgcgactggcggagtccaaactccaaaccaaaccggcgcttctcccacgtcttctcgagttcccacgcgcccgcctgctataaatcgcatccctcaatccccactctttatcccctcctcagccatcgcctccctctcccctcaacccagcgcccccctcccgccgccgctagggtttctcctccctccccgcccacccctaaatcatttccgaagcttccagtgcgccgcagccatgagcgacggcaaggactccctcgacctctccgccctcggcgctgccatccccaactcggccgagctcagcgcggaggacaaggctaaccttgtggcgtcgatcaagaacacgctcgagggattggcgtcgcggcataccgacgtgctcgagagcctcgagcccaaggtcaggaagcgcgtcgagaagctcagggagatccagggcgaacacgacgaacttgaggcaaaatttttcgaggagagagctgctctagaagctaagtatcagaagttgtatgaaccactttactcaaagcgttacgaaattgtcaatggtgtggtcgaggttgagggtatcacagtagaaagtgcagctgaaacccctgcggagcaaaagactggagatgagacctctgctgatcaaaaagaagaaaaaggtgtaccagctttctggcttaatgcaatgaagaatcatgaaattctagctgaggagatccaggagagggacgaggaagctctcaagtacctcaagaacatcacgtggtataggatcagcgagccgaagggctttaagcttgaatttcaatttggtacaaatccgttcttcaagaattcagtgcttacaaaaacatatcacatgattgatgaggatgaaccaattttggagaaagccattggtactgaaattgaatggtaccctgggaagtgcttgacacaaaaggtgctaaaaaagaagccacggaagggttcaaagaacactaaacctatcacaaaaactgaagattgtgagagcttcttcaacttcttcagtccacctcaagtccctgatgatgatgaggaaattgatgaggatatagctgaacagttgcagaacgaaatggaacaagattatgatattggatctaccatcagagacaagattatcccacatgctgtctcgtggttcactggagaggctgctcaagatgaggagtttgaagttatggatggtgaggatgacgatgatgaagacaatgatgatgaagacgaagatgacgaggatgatgatgatgatgatgattacgattcaaagaagaccaagggaactgccggaggggaagggcagcagggcgaacgacctgcagagtgcaagcagcagtgagccgacgttccaggggccactcaggaaggaacagacggctcctggtctacagggttgtctccacttctctattgaggcgtctgggtcctacagggttgtctccacttctctattgaggcgtctgggtcctgtaccggcatctactcctttttcctgtacatgtataaatatca

SEQ ID NO: 213963 - DNA, 2109 bp, Zea Mays
ggagtccaaactccaaaccaaaccggcgcttctcccacgtcttctcgagttcccacgcgcccgcctgctataaatcgcatccctcaatccccactctttatcccctcctcagccatcgcctccctctcccctcaacccagcgcccccctcccgccgccgctagggtttctcctccctccccgcccacccctaaatcatttccgaagcttccagtgcgccgcagccatgagcgacggcaaggactccctcgacctctccgccctcggcgctgccatccccaactcggccgagctcagcgcggaggacaaggctaaccttgtggcgtcgatcaagaacacgctcgagggattggcgtcgcggcataccgacgtgctcgagagcctcgagcccaaggtcaggaagcgcgtcgagaagctcagggagatccagggcgaacacgacgaacttgaggcaaaatttttcgaggagagagctgctctagaagctaagtatcagaagttgtatgaaccactttactcaaagcgttacgaaattgtcaatggtgtggtcgaggttgagggtatcacagtagaaagtgcagctgaaacccctgcggagcaaaagactggagatgagacctctgctgatcaaaaagaagaaaaaggtgtaccagctttctggcttaatgcaatgaagaatcatgaaattctagctgaggagatccaggagagggacgaggaagctctcaagtacctcaagaacatcacgtggtataggatcagcgagccgaagggctttaagcttgaatttcaatttggtacaaatccgttcttcaagaattcagtgcttacaaaaacatatcacatgattgatgaggatgaaccaattttggagaaagccattggtactgaaattgaatggtaccctgggaagtgcttgacacaaaaggtgctaaaaaagaagccacggaagggttcaaagaacactaaacctatcacaaaaactgaagattgtgagagcttcttcaacttcttcagtccacctcaagtccctgatgatgatgaggaaattgatgaggatatagctgaacagttgcagaacgaaatggaacaagattatgatattggatctaccatcagagacaagattatcccacatgctgtctcgtggttcactggagaggctgctcaagatgaggagtttgaagttatggatggtgaggatgacgatgatgaagacaatgatgatgaagacgaagatgacgaggatgatgatgatgatgatgattacgattcaaagaagaccaagggaactgccggaggggaagggcagcagggcgaacgacctgcagagtgcaagcagcagtgaggtgctgcacaatgaatgttggcaggcattgtttgtggagcaattagtttggttctgcttgatgctcaaggtcattgagttggtttgtggaaccttcgagggggcgcttgttggttttatggaattggttggggaatttttctgggacatggcgttatatcattatatgtgggtagtttcttcactttctgtattgggtttcagatattatatgtgttcttatgcttggagtgaagatggttgccactctggtatgtcttattgtgcataccactggcatagtgtgctgtctgtactttcatcaagcgtgccgtgccgctgagaaattttgctctaggggaaaggctagccttttgcctgaaaatgttttgcgaattgcatcttgcatacgggtcttgaattttgtctgttgttttacaatcaggagatatgctgcccagtgagcgcgctaggcctcatgggggtaactgcgtgaagattttatttttgtaccgctctagcgttccagactccatttcagaagttccggaattcatcttggtctttagaaataaagaaagcagatttgtgaactttaacgccagccaccgccgacgttccaggggccactcaggaaggaacagacggctcctggtctacagggttgtctccacttctctattgaggcgtctgggtcctacagggttgtctccacttctctattgaggcgtctgggtcctgtaccggcatctactcctttttcctgtacatgtataaatatca

SEQ ID NO: 213964 - DNA, 1425 bp, Zea Mays
ctgacaccgatatgccgttgactttcagtatcttttggattaaggttgcaatttcaaggggcttgaacggcattggtctagctctcgtcataccagcagtccagtcgctggtagccgactccactgacgacgacaaccgcggcacagcattcggatggctgcaactgaccagcagcatcggctccgtattcgggggattctttgccttactgctggcccagactacagtcttggggatcgaaggatggcgtattgccttccacctcgtcgcgatcgtcagcgtcatcgtcggcaccctcgtgtggttcttcgccgtggatccccatttccccacaaacgatgccgcaccaccatccagcaaaaagtccgcgcttgatgaagcaagggaactgatcatggaggccaggtccatagtccagatcccgacgttccaggtcttcgttgcccagggcgtcagcggctcgttcccgtggtcagcgctgtcgttcttgtccatgtggctggagctcgtcgggttcagccacgaggacaccgccgtcctcacgaccaccttcgctgtcgccacctccgtcggcggccttcttggcgggaagatgggggattcgctcgctcggcggtatccgaacgctgggaggatcgtgctgtctcagataagcgccggctctgctgttcctttggccgctgttcttctgctgggcttgcctgataatccgtccacgtccagtggtgttgcccatggacttgttctgttcgtcatgggactcatcatctcttggaacggagctgctacaaactgcccgatttttgcggagatcgtgcccgagaagcaaaggacgagcatctacgctctggacagaaccttcgagtccattctggcgtcgtttgcgcctccggtcgttggcctgttgtcgcagcaagtctacggcttcaaacaggacgacggcagagggagcagccctgggcaagaccgggagaacgcggcgtcgctggccaaggcgctgtacacggccatctccataccgatggtcatctgcacctccatatacacgttcatgtaccgcacctaccctcgagacagggagcgtgcgcgcatgcagtcggtgattcagtcagagttggaccagattgagctgctgggcggtccgagtttaggaggcggcggcgacggcgacggtgataaacctgacgaggttgatggcagttatggttctgaaagatctgctgaggccgatgccggcactgaaaaactactaggaaggaaaccatgagttgtgacgaacagaagaacctactaggaggaccattcatgttgaagaggatgatagatgttcctgccgattttaggaacttgtaattgtaacacgacgatcaatatgattcactaaagtgaccgttcttttttcttccatgtctatgttatgctgc

SEQ ID NO: 213965 - DNA, 2675 bp, Zea Mays
tcctaatcgatcctggacaactaaggctgtagtctatatagtgcaattgaccgcttctggagaatttgaggaggcgctagcattgtgtaagctacttccaccagaggattcaaatttacgggcagcaaaggaaagctcaatacacataagatatggacactttttgttcgataacgggagttatgaggaggcaatggaacagttttcagattcacatgtggacattacttacgtgttatctctgtacccatctattgttctgcctcaaacaaatattataggtgatcatgacaagctgctggacatgccagaattagcaagggaatcctccgatgtgacagatgagatggaatcatactctttacagcttcaagaaccagatgataaatctccattggaggtaaagaaaatgagtcacaatgctctagctgcccttgtgaagtatttgcagaagaaaagaagtggcataattgagagagcgacggctgaagtaacagaggaggtggtctctggagctgttcaccacagcttaaaattatctgagccatataagtcaaagaagctgagcaagaaacgagctcagacacatacaagctctattgctagagaaatggcaactgtactggatacttgtctgcttcaagctcttattcttactgggcagtcatcaggggcaatagagttgttgaaaggactcaattattgtgacctgaagatatgcgaagagtttttgaaggaaaggagagaatatatggttttacttgaactctataaaagcaatgaaatgcaccgtgatgctctccaactactcaatcaattagttgaagaatcaaaatctgaaatggagaatacatattttaataaaaaatttaactctcaaatgatacttgaatatctcaggcccctttgtagatctgacccaatgctggttttagagtcttccttgtacgtccttgagcgcaacccatcagaaactattgagctctttttgtctgaaaatgttccagcagatttggtaaattcatatctgaagcagcatgccccaaatttgcagtcaacttacttagagctaatgctctcaatgaatgatactgggatcaaccctaatctgcaaaacgagctggtacaactgtacctttctgaagttctagactggtacaagattctgaaggaagagggaaactggacagagaagacatattccccaacacggaagaagttaatatctacgttggagagcaattcaggttacaatacagacgcacttcttaagcgccttccccaggacgctctttttgaggagcgagctatattgtatgggaaaataaatcaacacctcagagctctctctctctatgttcacaagcttcagatgccagagcgagcagttgcatattgtgaccgtgtttatgaagaaagagaacaacaaccgtccaaatcaaatatctattttaatcttctacagattcatctgaacccaagaaaagctgaaaaggaatttgagcagaaaattattccagttgcatcacaatactctggaatccaaaaggctagtgctactaagcccaaagggggtcgcgtaggtaaaaaggttgtagagattgagggggctgatgacatacgctttagccccagcggaacagatagtggccgaagtgatggtgatggagatgatgtaaatgaccgaggccctataatgttaaatgaagcactggaactgttgagccaacggtgggacaggataaatggtgctcaggctcttaggctgttaccaagagatactaaactccaggatcttgtatcatttcttgagccactattgcgtaactctagtgaacatcggcgcaattatttggttatcaaaaacttgattttgcgggcaaacttgcaggtcaaggaggatctgtataatcggtgtcaagctgttgtgaagattgatggagatagtacgtgttctctttgccataagcgtgttgcaaatagtgcttttgcaatatatccaaatggacaggctttggtgcattttgtctgctttaaagaatcacagcaaattaaggccgtcagaggagcaaactctgtgaaacgtagataatatggccgtgatccaggtttggttgatgccagcttatggaattccctctctttggcttcacactggattttagtggactgcttcagaagtttttactggagtaatcttcactctcttcagagatcgagtttatagccgtgcgtgtgtgctcgctctctgttttctggccatcgtactggaaaactggaacccctttcttttggttttcatgtacagaatgtaaatgatactgtaaagtttcggttaacagattgatgatggtcttgattatagtgccgcaatgtgtgctccaaataggtttggacattattattattggatccatgtcattataattctctaagttttgaatggcgctattataattcgtatattcggaggtctaccattttaattctctcttcttaatcgccattacaatttgtcaattcggagatctgccattataataatctctctccacatccatggcatttcggacacctgccgtatactggtatatgagttcactgtcactgtcagtcgtgtatgcgtaccgtataggaacatctatgcgcgtctgtcaactttgttagactgagac

SEQ ID NO: 213966 - DNA, 3653 bp, Zea Mays
gttgaggttagcttccttccgaattcccaaaccgggtatacgctcatcggttcctcggcgctcgcctcgacctccgactcgaagcggccctcctccctcgccggacgacggcgacggccgtggccgtctaacacatccgtggggaaccgctcccttagttgggcctcctccggccatggtgcacagcgcgtacgatgctgtcgagctggtggctgacgtgccgggccacatcgaggccgtcgcctcccacgctgggaagctcctcgtcgcggtttccgacaccgaaggcttcctctggggctccgactgctccttgcgcatctactccgctccttccccctccgacggcggcggcgagatccggtgggacgggccctacgcgctcgagcggcaggagccgcggttctggcggcgcccgcccttagccatggaggtcagcgccagccgcgacctcctgatctcgctctccgagtggatcgcgctccaccgcctccccgggctcgagaccgtcgctgtcgtctctagcaagacaaagggggccaacgtctttgcttgggacgagcggcggggcttccttgccgtcggtcgacagaagcgactcaccgtcttccgcctcgacagtgggcgagaatttgttgaagtgaaggaatttggagtgccagatattctgaaatcaatggcctggtgtggtgataacatatgtcttggaatcaggcgggaatatatgataataaatagcatgaccggggcactaacagaagtgttttcttctgggaggatcgctcctcctttagttgtgcctctccttactggggaactgatccttggcaaggataacattggggtattcgttgatcaaaatggtaaacttattcaagacggcagaattatttggtcagacacaccagcttctgttgttatacataaaccatatgccgtggcccgcctgccacgacatgtcgagatacgctctcttaggccccccaatgcattggttcagacagttgtgctccgtgatgttcaaaagcttgtccaaactgaccactgtatacttgctgctctatctaactctgttcatggtttgttgcctgttcctattggagctcagatagtgcaattgaccgcttctggagaatttgaggaggcgctagcattgtgtaagctacttccaccagaggattcaaatttacgggcagcaaaggaaagctcaatacacataagatatggacactttttgttcgataacgggagttatgaggaggcaatggaacagttttcagattcacatgtggacattacttacgtgttatctctgtacccatctattgttctgcctcaaacaaatattataggtgatcatgacaagctgctggacatgccagaattagcaagggaatcctccgatgtgacagatgagatggaatcatactctttacagcttcaagaaccagatgataaatctccattggaggtaaagaaaatgagtcacaatgctctagctgcccttgtgaagtatttgcagaagaaaagaagtggcataattgagagagcgacggctgaagtaacagaggaggtggtctctggagctgttcaccacagcttaaaattatctgagccatataagtcaaagaagctgagcaagaaacgagctcagacacatacaagctctattgctagagaaatggcaactgtactggatacttgtctgcttcaagctcttattcttactgggcagtcatcaggggcaatagagttgttgaaaggactcaattattgtgacctgaagatatgcgaagagtttttgaaggaaaggagagaatatatggttttacttgaactctataaaagcaatgaaatgcaccgtgatgctctccaactactcaatcaattagttgaagaatcaaaatctgaaatggagaatacatattttaataaaaaatttaactctcaaatgatacttgaatatctcaggcccctttgtagatctgacccaatgctggttttagagtcttccttgtacgtccttgagcgcaacccatcagaaactattgagctctttttgtctgaaaatgttccagcagatttggtaaattcatatctgaagcagcatgccccaaatttgcagtcaacttacttagagctaatgctctcaatgaatgatactgggatcaaccctaatctgcaaaacgagctggtacaactgtacctttctgaagttctagactggtacaagattctgaaggaagagggaaactggacagagaagacatattccccaacacggaagaagttaatatctacgttggagagcaattcaggttacaatacagacgcacttcttaagcgccttccccaggacgctctttttgaggagcgagctatattgtatgggaaaataaatcaacacctcagagctctctctctctatgttcacaagcttcagatgccagagcgagcagttgcatattgtgaccgtgtttatgaagaaagagaacaacaaccgtccaaatcaaatatctattttaatcttctacagattcatctgaacccaagaaaagctgaaaaggaatttgagcagaaaattattccagttgcatcacaatactctggaatccaaaaggctagtgctactaagcccaaagggggtcgcgtaggtaaaaaggttgtagagattgagggggctgatgacatacgctttagccccagcggaacagatagtggccgaagtgatggtgatggagatgatgtaaatgaccgaggccctataatgttaaatgaagcactggaactgttgagccaacggtgggacaggataaatggtgctcaggctcttaggctgttaccaagagatactaaactccaggatcttgtatcatttcttgagccactattgcgtaactctagtgaacatcggcgcaattatttggttatcaaaaacttgattttgcgggcaaacttgcaggtcaaggaggatctgtataatcggtgtcaagctgttgtgaagattgatggagataaatcacagcaaattaaggccgtcagaggagcaaactctgtgaaacgtagataatatggccgtgatccaggtttggttgatgccagcttatggaattccctctctttggcttcacactggattttagtggactgcttcagaagtttttactggagtaatcttcactctcttcagagatcgagtttatagccgtgcgtgtgtgctcgctctctgttttctggccatcgtactggaaaactggaacccctttcttttggttttcatgtacagaatgtaaatgatactgtaaagtttcggttaacagattgatgatggtcttgattatagtgccgcaatgtgtgctccaaataggtttggacattattattattggatccatgtcattataattctctaagttttgaatggcgctattataattcgtatattcggaggtctaccattttaattctctcttcttaatcgccattacaatttgtcaattcggagatctgccattataataatctctctccacatccatggcatttcggacacctgccgtatactggtatatgagttcactgtcactgtcagtcgtgtatgcgtaccgtataggaacatctatgcgcgtctgtcaactttgttagactgagac

SEQ ID NO: 213967 - DNA, 1629 bp, Zea Mays
gcaccctccactatcaccagataaatggatgggttggtgaagtgtgagaagtggattcgggatgatgaagggcggtcggaggagtcaaaaacgtcatggtggctgaaccggcttattggccgcacaaagacagtctccgttgattggtcatacccattcgtcgaggaccgcctgtttgttctcactctcactgctgggttcgagggttaccatgtgaatgttgatggacggcatgtgacatcatttccataccgcactggatttgttcttgaggatgctactggcttatcattggatggggaccttgatgtgcaatcagtgtttgcggggactctgcccaccacacatcctagcttttctccacagaaacacctagagatgttacccagttggcaggctcctccccttccagacgaaccagttgagattttcatcggtatcctgtcagcaggcaaccattttgctgagcgaatggctgtgagaaagacatggatgtctgctgctcagaagttgccgaatgttgtggcccggttttttgttgccctgcatggcaggaacgagattaatgcagagctgaaaaaggaggctgagtttttcggggacattgttattgtgccattcatggatagctatgatttggttgttctcaagacaattgccatatgcgagtatggggtccatgttgtatatgctagatacataatgaagtgtgatgatgatacttttgttagacttgattcagtaattgctgaagtgaagaaaatccagaacggtgaaagtctctatatagggaacatgaattatcgtcataagccattgcgtgatggtaaatgggctgttacttatgaggaatggccagaagaggattatcccatctatgcaaatggtcctggatatgttatatcctctgatattgcagactccattctatcagaatttttaaaccttaaattaaggcttttcaaaatggaggatgtcagcatgggcatgtgggtcgagcggttcaacagcaccagacttgttaaatacgtccacagcgtcaaattttgtcaatttggatgcatagatgattattacactgcacactaccaatcaccgaggcagatgttgtgtttgtgggacaagctgcaggctggaaaagctcaatgttgcaatatgagatagcaacattggaggtggtggtactgctgaacaggcggtgtttcagctggaaatggaaacagggggaatgggcagcggcctgtaacgactttctgattgagcttgcggcgctcttctttctcgacgtatagacggagttctgtgagcagtatggaacctgcttgggtcttgatttgtaaatgggacgggtagaaagcttagtcaaataactattgcttttggcacttatggctgtggttgcatttataggcaacccagttgtacagatggtagtgtacaagaattttgctgtgctcttaacatggtcataagttatggtttgattagcaggcctacttgtcttaatctggtcataagttatgactttattactggtggacttgtcactatcacgacttcggctctatgactttatgacctttaaccacagttattactactgttcaaaattataattcattttctact

SEQ ID NO: 213968 - DNA, 1306 bp, Zea Mays
ctagctgccattttcttttctcccagccatctccacttcttctccccacgccatcctccttcctgctcctcacgcacaccagtggagggcctcccatggcgtctcctcccctttcctcaagtcagccaccctagcttccactcctctcgccaccagccattttccagcagcctctcttctcccacacggcagcagcttctccctcacgccaacagcagggagcaggagcttttcctcccatggccggcctcccttctccccctcggctccttcctccaggccgagctcctatgtcaggaacggctgatccacttgaccgctgctccatttttccctcgcctctgctctctcggctgctgtcagccatggcgtgacgcctctgctccttctctcttccccacaaaacaaccagcgcgcaggagcttctccttcatggacgctgaccaggctggtccctcgcccccttctctccccttgtccgcgaccttctctgcccgcgcgcaaagccgctgaccggagcgcggcatggcagcgccgccctttcgtggatgaagctagtgcccctttcagcttctccactgcagcaggccgggcatccccatgcctgcgccttccctctcttgccgtgccttccccatggtcaggatcagcggcagaagtcgtgtgctacctgttagatgatatgggcagcaaccacgcttcgcagctccttgcaacagcaatcaatccctgccgcatgccacctgctcgatatattacgcagccacatcgtcgttgccctttctcgcagcacgccgttgttggttctaggtgctgctacctacatccctcgcactcaccttgctcgacaaaaatgcctccccgttcgttgacctcgggtggctgcacacttgttgtcgctgccccttgtccgtcaacgcgcagcccctctgtttccccattggcgcagcagccccgacgtctccgcgctctgtcggctcgctgttttgtgaagccagtggacagcacgccgtcgacgctcgctgggtgtttgctgtttttgcgcagccccatccgcgacgtcgtcgaaacccctagtggtcgacgccgcgcttcgcgccttgctcgttcgatgaaataccgagccatgtggacagcccatgcgtctagtcacgacccgttcaggaccgagagatgacgatcgagacagtgatgtggtgccacccacaagatgcagtcggtggacgacccaagaaaggatggacataaccagtggatgctcgccaagcgagtacctcccccagcaaacactatctaagtgttaaat

SEQ ID NO: 213969 - DNA, 2955 bp, Zea Mays
ctcgaggcctcgcccggccccacgggtcagctcgatcggatgccaggccgctgcctctacttcgctgctccctgctcgtcgtcggtcgatcatgttgcgtctgcgtgtctatttatttggatttggacatatgggcagagcatggagcagcacgcggcctagctaggtgagagtgagacagagcagacgcggcgccgggagctggaagtgatctagagctagagcggcggcggcgggcatggcagagcatctcatctctacggctgaccacgacaggctgccggacagctacgtccggccggagacgcagcggccgcgcctgcgcgaggtcgtccccgacgcggagatccccgtggtggacctcgccgaccccgaccgcgaagccgtcgtcgccagggtcgccgaggcgtgccgcacccacggcttcttccagttgctcaaccacggggtgccggagcagctgacggcggcgatgatgtcggtggcgtacgaattcttccggctccccgcggaggagaaggccaagctgtactccgacgacccggccaagaagatgcggctgtccaccagcttcaacgtgcgcaaggagacggtgcacaactggcgggactacctccgcctgcactgccacccgctggagcagtacgtccccgactggccggacaacccaccatccttcaggaggaccgtgagcgcgtactgcagtgcggtccgggagctggggttcaggctgtacgtcgccatctccgagggcctgggcctggacggagcgtacatcaaggaggcgctgggcgagcaggagcagcacatggcggtgaacttctacccgaggtgcccggcgccggagctcacgtacgggctgcccgcgcacacggaccccaacgcgctcaccatcctgctcatggaccagcaggtggccggcctgcaggtgctcaaggacggccgctggatcgccgtgaacccgcggcccggcgcgctcgtcgtcaacatcggggaccagctgcaggcgctgagcaacggcaggtacaggagcgtgtggcaccgcgccgtcgtcaacgccgacaggccgaggatgtcggtggcgtcgttcctctgcccctgcaacgacgcgcgcatcggccccgccgccaggctcctcaccgacggcacgcccgccgtctacagggactacacctacgccgagtactacgccaagttctggagcaggaacctggaccaggagcactgcctcgagctcttcaggaccccgacctcctaggagtattttggatgcttctctttcattttagcttttcggtactagtttgtttgttactagaatggaacttgccgactgcatcagaaactgtctgtctgtacccctcatcagctccccctccaaataatctctctgcccatgtgggcttgtttcaatactttttgtcagtacagcccatatattactttttttttgtcacatacggtgtggaaacacaaaacaggccgattccttccataaatgggcctgctcctgtccagcccgccccccgtgatgggccaaattcgcggtggctgctgagaacaggaacaggccccgcgccggcgccgcccgtccagtttccaaactcgcgcatccggtcggctggcgcgtcgtgtggaccagaaagggagcgaaatcctactcgtcgcacggggtccgcaagcttttcgtcgcctcgattcgcttccgccccatcctccttcccgacgcctcacatggcaacggccgtgcccgccgcctgcctccgcgcgccgtgctcctctccagcggccgtcgcacgccgacttggggccggtggcccgtcgctgcgcaagcggcattgcgccgtcgcgcccgtcgctgccgcctgcggccccgcgccgccgcggctgcttgacaacgaggaggcggtctgctccgtacggcggcgtgtgctggttgccggtgccgccgcgttcctctcccggcctaatccggcggcattcgcagcagaggctaagaaagggttcctgcccgtcgtcgacaagaaggctggctactctttcctctacccgttcggatgggagtggctgtgcaagggcaagacaaggtgtacaaagatgtgatagagcctctcgagagtgtgagcgtcaactctattccaactagcaaggaggatatccgtgatcttggtcctccggataaggttgccgaggctctgattaaaaaggttttggcaccatcaacacagaagacaaagttaattgaggcgaaagagaatgatgttgatgggagggcttactacacttttgagttcacagctcaggctccaaactacaccagacatgcacttggtgctattgtaattgcaaatggcaaattttacacattgaccactggagcaaacgagaggaggtgggaaaagatgaaggataggctgcatactgttgtggattccttcaaaatcgaaaatagaatatgagtgcctgaattgctgtgttgtttttccttcgttgattcgctttttcttacataactgcagtgctgagatttttcagtagtaaataccgggattgtggattatgctgatcagtttcatttcgaaatgtttgttaccagacttgagcaacatttgtttgtactttatgtgtataataataatatcttgtttggatgtagatattggagcataaaattgggaattagaatcaatgttgttaggtacgtgcaaatgagatttgaaatcagacgtccaattctttggaattggactataacttaaaactccatctcccaagacaaagcatcaccacttggtattgtgtggaattagaccacacaattctaaactccaaatcagtgatatccaaacaatagaattggaattacatcttattttaatatcatgtctgatttagtattcaacctaatttaatttgttcctcttcaatatcgacatccagagcataaaacttttt

SEQ ID NO: 213970 - DNA, 3312 bp, Zea Mays
cgtcgcctagttttcacctatgtacagactatatttattactcgtaattagtattcaaactttagatgtgatatagactaaacttagtcatcaaaaccaaacactaactctggctctaaggttgtttgtaattgtaggggaaaaaactagcatgtgtagcccggctaacagtcgagtcgcgttgtaaaagaatatgtccatctccagcagcaggtgcatgcaaacacggaataaagagagaaagatcatcggtctatatggaaaatttggaaaacagagagcacccggattttaagtagacacggagacattttagtatccacattcgagctctgttggagagtagctcattttcccgcaagcgggacacgatagggtcctattggacgacacacactaatgtcattttcaatgagagtttcatgaaagattccattttattgcattaattattatgccacataggattttttatgacatggctatatttattataaaatatgtgaaattagtttcattatcatataactatgccaacatatttctaatgtattgcaaagcgcgtgaaaccactgttgagagcaattttgtttcatctccatctatttaatctattcctatgggttatttagcctgtgaaattgtcatgaaaatcttcattaagagagtatatttcattctttatttattcttatttttattaatatggcaacattggaaatagtgtaacgaaactaccacttagaatgatctaaaactctccaacgttccaacgccttatggagcttctccccctcacacctactcatgtacgcggtcacacctcccccctcgatctcttctcggtaagagttagtttgggagtctaaatactggaggtgattggaggagctaacatacactccttattcaaaattgaataagggctagtttagaaactcgaatccccctcgggattgaagaagattggagaggaaattagttcatttctacctcaatcccctccaatcccgaagggaatttaaggttcccaatgtagccctaaggaggggattttagtccctcaaatcctctccggttttgtggctcctaaactagctctaagagaaaattttaacctatggagagggagcttttaatctccccctctccaacaataataattataaaattaattattttgggtttaattagtagataataatatgtattgcggtagtataaatatagtatgatttttttaaaactctaaaaactcatgcattaaagtcaaatagcttctttaaaggttaaaggatgagctcaatgtgaggaatggttggagatgagttgagatagggagaaattagttaaggggaagatatttaaacatgaataaaaagtatgaatgatgggatttgggatggagaatggttggagttagcctaagagtttgtttgggaatataatttttcaagtttgaagacagcactatggtatttaagcataccataatattttaggctaaaagatggttgagtaaaatatagaaactctatattttaaatcatagttttattaataccgtaatatttttgggtctaaaaaactttagtatggaataaagtttttttgttaacacattgctacagcttactctttctccttctctactatactgcaaccacagtattgttgtttcatgacattcgataaaccgttctattaaaaagcaataggccctaagcagcgggcagaaaagccaaagtttgagagagtcctgctcccggacgtgctcttcagaaaacagacaaacaagttggttggtctctctccctctcttctgatcggtaacctcagcagatgcggctatagcattttctctctcctcatatttttcttttactgtagctcaacaacacccttccctcgccccggccggccagctgcgttatatgtgacgcaaggtcgacgacgatgactcacgactcgccatgcatgctgatgtcagttcttggcttctcttttaattgtagaaatttgcttgttttgttgtcacacggatagaatcgtatgactatttcgatacttctagtctatctaggcgacaaaagaaaagagtcaatgggtcatctctctctactcttatgttttatagatgtattggaattaactgtcttcatcgtattttctatgatctggtttgattattctaatttcatgtaaattgaagtgtattaaattagattgtcatagatgttgatttgttgtgaatttaaaccgacctaatagcacttaatttatatagattaacggtgaaacgaacaaggtcttagagtttattcggtttgatgataatccatattgattaggtgagattaagtcggtttaaatttataataagttaaaagccacctcaatacatctcaatcatctctaatctgtataatctcaatcccctctaatctgcatagaataaaaataatcgaataaaatcttagtcttttttaaactctactccataaacagcacgctctaacagtatagatggtctggtgaggacggtctaatagtatagtagcggagcagagtactagtgaggtgtgatgctggggtaggaagcagaggcagatatagatagtggtacctgaaggatggtgggttgtccggccagtcggggacgtactgctccagcgggtggcagtgcaggcggaggtagtcccgccagttgtgcaccgtctccttgcgcacgttgaagctggtggacagccgcatcttcttggccgggtcgtcggagtacagcttggccttctcctccgcggggagccggaagaattcgtacgccaccgacatcatcgccgccgtcagctgctccggcaccccctgtgtgcccacctggaagaagccgtgggtgcggcacgcctcggcgaccctggcgacgacggcttcgcggtcggggtcggcgaggtccaccacggggatctccgcgtcggggacgacctcgcgcaggcgcggccgctgcgtctccggccggacgtagctgtccggcagcctgtcgtggtcagccgtagagatgagatgctctgccatgcccgccgccgccgctctagctctagatcacttccagctcccggcgccgcgtctgctctgtctcactctcacctagctaggccgcgtgctgctccatgctctgcccatatgtccaaatccaaataaatagacacgcagacgcaacatgatcgaccgacgacgagcagggagcagcgaagtagaggcagcggcctggcatccgatcgagctgacccgtggggccgggcgaggcctcgagatccg

SEQ ID NO: 213971 - DNA, 2091 bp, Zea Mays
aggacaagtgctcgaggttcttgctccgctcttctttctgcttgctcatcccagccccagcccactgaaactctcgaatccgcggccgccccctccgcgatcccgacgtccgtccgccttgctcgaactcgacgctctcttctcctcaacgcgctgcacctcccccccccctcccggggggcggcgcggccaccggggccctctagcgcggctgggctgattaggtggagtagaatggaggcccggccggagtgggatctacgcaagatgagggagctgcgcttcgttgtgttgcttctggtgatatccttgccgtgcttctctgcatccgatcgccaaggagatgctttatatgatatgaaacaaaaactgaatgttactggcggtcagctttcagattggaaccaaaatcaagttaacccttgcacatggaattctgttatttgtgacaataacaacaatgttattcaagtcactttggctgcgcgaggattcactggtgttttgtcaccaagaattggcgaactccaaaatttgagtgtcctgtcattggctggtaacaggattactggtaccatacctgaggagtttggcaatctatctagcttgacaagcttagatttagaggacaatcttttagttggagaagtaccagcttcccttggcaacctttctaagcttcagctgttgatactgagtcaaaataatttcaatgggtcaattcctggtagcatagcgaacatttcaagcttgacagacatacgcctggcatataataatttgtccggtcagatacctgggttgctgtttcaagtagcacgttacaacttttctggcaatcacttaaactgtggacctaacttcccgcactattgtgcatcgaacacatcctatccgagtggatcccataactcaaaaattggcttaatacttggaacagttgggggaattttagggcttattatcgtgggagctctgtttctaatctgtaatgcaaggaggaaaagccatctgcgggaagtttttgtggatgtagcaggcgaggatgatcgacgaattgcgtttggccagctcaaaagatttgcatggcgagaactgcagattgcgactgataatttcaatgaaagaaatgttcttggacagggaggttttggtaaagtgtacaagggagttcttccagatggcactaagattgctgtaaaacgactgactgactatgagagtcctggtggggaggctgccttcttgcgtgaggttgagcttatcagtgttgcagttcaccgcaatctcttaagattaattggcttctgcacaacacaaacagagcgcttgttggtctatccatttatgcagaatttgagtgttgcctaccgcttaagagattttaagcctggagaagccatcctggattggccttcaaggaaacgggtggctataggtacagctcgtggactggagtatctgcatgaacactgcaaccccaagatcatacaccgtgatgttaaagctgcaaatgtattgcttgacgaggatttcgagcctgttgtcggcgattttggcctagcaaagctagtagatgtgcagaagacgtctgtgacaacacaagtccgcggaaccatgggtcacatagcacccgagtacctgtccacagggaagtcttccgagaggacagatgtttttggatatgggatcatgcttcttgaacttgtgactggtcaacgggctattgacttctcacggctggaagacgaagatgatgtgctattgcttgatcatgtaaagaagctacagagagaaggggagctggactccatcgtggacagcaaccttaaccagaattatgacggcgaggatatcgagatgataatacagatagcgctgctctgcactcaggcatcacctgaggaccgtccatcgatgtctgaagtggttaggatgctggaaggcgagggtttggcggaacggtgggaagagtggcagcatgtggaggtgacaaggaggcaagaatatgagcggatgcagcggaggtttgactggggagaggattcgttctacaaccaggaagcgatagagctgtctgcaggcatacta

SEQ ID NO: 213972 - DNA, 1616 bp, Zea Mays
agcttagatttagaggacaatcttttagttggagaagtaccagcttcccttggcaacctttctaagcttcagctgttgatactgagtcaaaataatttcaatgggtcaattcctggtagcatagcgaacatttcaagcttgacagacatacgcctggcatataataatttgtccggtcagatacctgggttgctgtttcaagtagcacgttacaacttttctggcaatcacttaaactgtggacctaacttcccgcactattgtgcatcgaacacatcctatccgagtggatcccataactcaaaaattggcttaatacttggaacagttgggggaattttagggcttattatcgtgggagctctgtttctaatctgtaatgcaaggaggaaaagccatctgcgggaagtttttgtggatgtagcaggcgaggatgatcgacgaattgcgtttggccagctcaaaagatttgcatggcgagaactgcagattgcgactgataatttcaatgaaagaaatgttcttggacagggaggttttggtaaagtgtacaagggagttcttccagatggcactaagattgctgtaaaacgactgactgactatgagagtcctggtggggaggctgccttcttgcgtgaggttgagcttatcagtgttgcagttcaccgcaatctcttaagattaattggcttctgcacaacacaaacagagcgcttgttggtctatccatttatgcagaatttgagtgttgcctaccgcttaagaggtacagctcgtggactggagtatctgcatgaacactgcaaccccaagatcatacaccgtgatgttaaagctgcaaatgtattgcttgacgaggatttcgagcctgttgtcggcgattttggcctagcaaagctagtagatgtgcagaagacgtctgtgacaacacaagtccgcggaaccatgggtcacatagcacccgagtacctgtccacagggaagtcttccgagaggacagatgtttttggatatgggatcatgcttcttgaacttgtgactggtcaacgggctattgacttctcacggctggaagacgaagatgatgtgctattgcttgatcatgtaaagaagctacagagagaaggggagctggactccatcgtggacagcaaccttaaccagaattatgacggcgaggatatcgagatgataatacagatagcgctgctctgcactcaggcatcacctgaggaccgtccatcgatgtctgaagtggttaggatgctggaaggcgagggtttggcggaacggtgggaagagtggcagcatgtggaggtgacaaggaggcaagaatatgagcggatgcagcggaggtttgactggggagaggattcgttctacaaccaggaagcgatagagctgtctgcaggtagatgataatctgtggaaacggatggttgtaaatgcgcaacgaagtggtgcctgctgtgccgtatataactattatttgtagagtagctattagatagatatgttcataagattattcaaacaaacttgctcggcgatagcatgaatgtggatgaaattagatgcataaataaataaatggaagtagagatgaaagtggt

SEQ ID NO: 213973 - DNA, 1381 bp, Zea Mays
cggcatctttttccggctgcagcaagcaactggacgatgatggcttccaggcagtcagagaacaatgcacaagaagaaacatcaccattgacgactcctaacgccaacatagccaggatcatcccttcgctgcccctcgagaccaggtggccaccgttccctctccgacggtacgccaatttttggctgcctgaggtagcattgaaggaaggcgtccccggcgttcattcctgcttcgagccgagacccaccgacgtgttcctcgcaagcttccccaagtctggcaccacctggctcaaggccctcgccttcgcgacgctgaagcgttccacgcatccgccgttcgacgacgaccatccgctgcgccattgcaaccctcatgactgtgtcaggttcctcgaacttgatttcaaccagcagaaggatgagctcgaggcgctcccgtccccgcgtgtgctggccacgcacctcccctactccctgctgcccggcagcatcaccggcgacggagagcgctcggggtgccggatcgtctacgtttgccgggaacccaaggacgtgctggtctcctcctggctgttcacgagaaaggcagcgccggcttgtggggttgacgcccggtcgttcacgatccaggaggccttggagctgttctgtgatggccgctgtctcggcggcccacagtggaaccacgtcctccactactggaaggagagcgtgaggaggcctgacagggtgttgttccttcgttacgaggaggtgctgattgagcccgaggcgcacgtcagaaagctggccaatttcatgggctgtggattctcagaggaggaggaggagcgcggggtggtgagcgccatcgtggagctgtgtagcttggggaagctgagagacatggaggtaaatagaaatggaagcactttgttggggatcaagaacgaaagcttcttcaggaagggagttgttggggactggagcaagcatatgacgcaggagatggcgcagaggctagacaaggtcgtagaggatgcattgcaagggactggattcacctttgcgagcacagcatgatgaggcagtgcgctcatagtagttgcgaactacagaataatgccaaggtcaactcgttttattggtgttgctggttggagatcataccagtcatggtgagcattcttctttggtgatgaagggggaaatatggacatcatcttatcatttaacgaaaattgatttgtgtacaattcatttgtataactttgttacaaaccatatgttgtggcaccttggcacgccaaaaccatatgcattactgtgtaagatttgtcataaagccatgtatcatcattgatatattatcgattaatgtttggagaagctacaa

SEQ ID NO: 213974 - DNA, 1944 bp, Zea Mays
gtgctactgtaggagctgttgcaatcggggaggaaacgcgaccagtttgccggcaccaacacggccctgctgccacgctccggcatctttttccgcttctgcaaaagacgaacaaatcaaaagggtgatcatctcggtgcccaccaaacctcaacaaccaagtttcatgtctaatctcgacgttcagcttccatctgctttgatctgtttgttgaggcaaatgctgaggctctggtgttggtcctggaacgaaggattacgtgcatgtgcgcatctaagagcgcaatgatagaaagactttgactacagtccagggtctgaataaagaatccagttataacaagatcctcaaggatctgaagaaggaattctgctgcaatggtactgtagttcaggacccagagctaggccaggtcattcagctccaaggtgatcaacacaagaacgccctcacgtccaccatagtgcagcaattgcccgtgtgtatttcctgtctcagaggcggcggcgccaagatccagcccaaggagcagcagaagcaagtaaggaaagtgatcagaaaagtggctagcaatcgggctgcagcaagcaactggacgatgatggcttccaggcagtcagagaacaatgcacaagaagaaacatcaccattgacgactcctaacgccaacatagccaggatcatcccttcgctgcccctcgagaccaggtggccaccgttccctctccgacggtacgccaatttttggctgcctgaggtagcattgaaggaaggcgtccccggcgttcattcctgcttcgagccgagacccaccgacgtgttcctcgcaagcttccccaagtctggcaccacctggctcaaggccctcgccttcgcgacgctgaagcgttccacgcatccgccgttcgacgacgaccatccgctgcgccattgcaaccctcatgactgtgtcaggttcctcgaacttgatttcaaccagcagaaggatgagctcgaggcgctcccgtccccgcgtgtgctggccacgcacctcccctactccctgctgcccggcagcatcaccggcgacggagagcgctcggggtgccggatcgtctacgtttgccgggaacccaaggacgtgctggtctcctcctggctgttcacgagaaaggcagcgccggcttgtggggttgacgcccggtcgttcacgatccaggaggccttggagctgttctgtgatggccgctgtctcggcggcccacagtggaaccacgtcctccactactggaaggagagcgtgaggaggcctgacagggtgttgttccttcgttacgaggaggtgctgattgagcccgaggcgcacgtcagaaagctggccaatttcatgggctgtggattctcagaggaggaggaggagcgcggggtggtgagcgccatcgtggagctgtgtagcttggggaagctgagagacatggaggtaaatagaaatggaagcactttgttggggatcaagaacgaaagcttcttcaggaagggagttgttggggactggagcaagcatatgacgcaggagatggcgcagaggctagacaaggtcgtagaggatgcattgcaagggactggattcacctttgcgagcacagcatgatgaggcagtgcgctcatagtagttgcgaactacagaataatgccaaggtcaactcgttttattggtgttgctggttggagatcataccagtcatggtgagcattcttctttggtgatgaagggggaaatatggacatcatcttatcatttaacgaaaattgatttgtgtacaattcatttgtataactttgttacaaaccatatgttgtggcaccttggcacgccaaaaccatatgcattactgtgtaagatttgtcataaagccatgtatcatcattgatatattatcgattaatgtttggagaagctacaa

SEQ ID NO: 213975 - DNA, 2204 bp, Zea Mays
acctttccaggaagctgaatcaacagaaacgcgtagaaataacgaaaagtacaaaaatattgcgctgaagtttccgtgtacgacggtcaggctcaggctcagcatgaaatagccgcgtccggcgtttcatcatctcagtccccggcgcggcaggtgaaattcgagtactcctgactgttcagttcactataatatcccttggtgccgttgcccttgcctcaaatctatacgtaagtggaaacgttggaggagatcgatcgatcgggatgggtgggtgcttctccgtgcacggtgacgtgcgcggcggcatggagggcgtcggcggtggcgcgaggacccagggcggcgcggcgtcgtcgtctgcgcagcagggcgggccgaacgatgcggtcgactatttcttccagacgcgcgggctccgcggcctctacacgcccatcgagttgtcattttcagcatcgaagttgcggaatacagattccttttcaaagagtgatcctatgttagtggtctacactaacatcaaaggaaagctagaggagattggccgtactgaagtgattttaaattcactggagccctcatggattacaaaggttacaatgtcttaccaatttgagattgtgcaaccactcatattcaggatatatgatgttgacacaaagtaccacaacactccagtgaagacattgaatttgacacagcaggattttctgggggtagcatgctgcaacttatcagagattgtaacaaaatttaaccgtagcctgacattgaatcttcagagtgattgtggacatggtcttcatggaacaatgacagtacatgctgaagaaagtgactcctctagaatggcagttgagatgactctgcgttgcgtgaacttggaaaataaagatgtgttctccaaaagtgatcccttcttaagaatatctaaactggtagagactgctggtcccattccaatctgcaaaacggaagtagtacctgacaacttgaaccctgtttggaggccaatcactttaacatcgcagcagtatggaagcaaggataacccactgctagttgagtgttttgattttaattccagtggtgaccatgaactgataggggccttccagacaactattactcagcttgaaaatctatatacctcaaagtctgcagcaattttttacaaccacaagggacaaagaaagatgaaagaacaattgtttgtggacaagtttcaggaaacagtccagcatactttcttagattatatatccagtggatttgagctcaatttcatggtggctatagattttactgcttcaaatggagacccacgtgtaccccagtccttgcactacattgacccctctggcagacctaattcgtatcaacaggtggttggagttgaaggcatcatgtcagcatacacctcttctctttacagtgtttcccttgctgggccaactatgttcgggcccgtgatcaacaaagctgcagatattgcaagccagtcccttcaatattcaaacaataaatattttgtccttctcattatcacggacggagttctcactgacatccaagaaacaaaagattgcattgtaagggcatcagacctgccattgtcgattctcattgtaggcgttggaaacgctgatttcaaacaaatggagatcttagacgcggacaatggtaagcgactggaaagctctacgggtaggatcgcgacacgcgacatcgtccagtttgttcccatgagggaagtccaaggtggcgagatctccgtcgtgcaatcccttctggaggaactgcccggtcagttcctgcagtacatgcgcactcggggaatcaagccacagcgggctccggggcttgcttcagcgcccgtttacccacctcagcagtgaccagaagaaaacgtgcacgagctgatccatttgcctcaactgtggattccgctagcgtcccgtcccgtggtagcctagtactcttgttcatacggtctctggttagctttctctttgccgcagttggtaaatatccatgctgtagaatctagatccagcacaaatagatagtaaaacactgctttcctctaggttaagctagacgatgtaaattcgtgctgcagattgccaagtattcaggttgtcgtgaaacgtcattattatcacctgctttcatattaagtactatcttgctaatagttg

SEQ ID NO: 213976 - DNA, 2371 bp, Zea Mays
accaccatttatttagtccctctccctccctccctcactcctccgctgaggcgaggcaaccccgtcaacccgaggatcccacgcgaaccctagccagctagcaagccaccgcggccgggtccaatggcggaggacgggggcgacagggaccaccagcagcagccgccggcggcggcggccgctgcggcgtcagacagcgccggggtggaggggcgcagcagggagagcgtcaagctcttcgtgggacaggtgcccaagcagatgtccgaggccgagctcgctgccatgttccgcagcgtcgccctcgtcgacgaggtcactgtcatccgcgacagggtcaccagggtctcgcgaggctgctgcttcgtgatctgcccatcaagggaggaggctgataaggctgtgactacataccacaacaagcgcacactacctggggcctcaagtccattgcaagtaaaatatgccgatggggagttggaaagattggagcacaagctcttcgttggaatgctccccaaaaatgtaacacatgctgaaatgacggatttattttcaaaatatggaaatataaaggatttacagattctgagaggctctcagcaaacgagcaaagctggttgtgcctttctaaaatatgaaacaaaagagcaagctgtggctgctatagaagctctaaatggaacacacaaaatagagggttcaagtgttcccttggttgtcaaatgggctgacactgaaaaggaaaggcaggctcgaaaagcacaaaaagctcaattccagtcttctaacatgttgaatgcaaatgctatgcagcagaattcagtgtttggaggtttacagatgggttatgtgccgcagtacaatggatttggctaccaggtatattatggcataaaaaatgaggttaggttaggtgttggcccatgatagagcaaacaacctgagacagctctgtgataacctttcatgcagtagtgtcatgctcatgcttggcagaaatgtgctagcagttttaaccaaaaaattcacaaggaatgctatacaaacttgattacttggattttataaagtatgcattgatcagtaaactatgtgcagcacgacaatgctgtagagtggtacactgacaaacttgattagttggatttaatttgttttgcattccgggtaataactgtacttgcattactctatgcagccacaaggaacctacgggcttatgcaataccctcctctatctcctgtgcaaaatcaagctgccttccagaatatggttcagcctgttaatcaaggaagctcgatccatggagctaattctgaagtttcgcctaatccagttcctagatcatttaattccgcgcagttgggaagcccctattcgcctttgcctggtttgcagtatcctggagtgtatcctggtggtcctattaatcatcgccccttttcaagttctcacagttcaaccaaagttcaaaactcaagtgctaattcgccgtcttcgagtcccagcagcaatcctggcccccagatagagggtttgctttcttctatactcacgaaattagttgtttattaacttttaagttagtttttttattctaacaagaagtttcaagtttgtatttagaggtattatgttcaaagatttctcttaaaaacgactgtcgtgtgtacaggtcctcctggagccaatttgttcatataccacatcccgcaagaattcggtgaccatgatcttgccagtgcattccatagtttcggtagggtactgagcgccaaagttttcgtagacaaggcaactggtgttagtaaatgctttggtaaccgattcttcccagtttcaattccagtgacaggacatcattaccttacagacattgtttgctaacttattttcctgtataggtttcgtaagctacgactctccagcctctgcacaggcagccatcagtgtgatgaatggataccaattaggcggcaaaaagttgaaagtacagctcaagagagacaacagcaagcacagtaaacctttctgacaaagcgacctcgttgtgtgctctcaccacgttcaggaaaaagtcggtacatatgtgtcacaattgatcattacattgtttcctccggcctctcaccattgcgttgccgccggtggtggctcttgttgtatctttgttcaattcacattcttgaaaactgtcgcattgtgtatttttcgtcgcagcgtagctgtagcgtttgtaccatcatcagatcttgtacatcagacattgatttattcaattgttttttaaaaaaaaattcacatggattattttgttgtaaataatgttttaggaatttccagtatgtgacatgtttgagtatttct

SEQ ID NO: 213977 - DNA, 750 bp, Zea Mays
aaaatagtcggtctcgcgtctggagattttcagatcagaaccaaactcggctcgagagagatcgcatacgcctgcctgcccacccacctccccttttccttcctcttcgccccagcgacgcggccgcccggagaccgagcgaggcaggcaacccaccaccgagaggcagggacaggaacaggaagccggaggcgaagatgtcgtcggtgttcagcggcgatgagacggcccccttcttcggcttcctcggcgccgccgccgccctcgtcttctcatggcaaatgcgcaacagccaaagcttttcgttggcatgatcctcatcctcattttcgcagaagcgcttgctctctatggtctaattgttggaattatcctttcgtctcgcgctggtcaatcccgggcggattaagtgcaccaccattctgtgattaccgcaccgtttattatgctattctgagaggattggaactctattcccttgtctagtttattcttgttaccatgtattaatgtaacaatctgtagctgatggaaggtgacttccagtcatgttttggttttggtggtgtcgagcagaggttatttatttttgggttaaggtcggagtcggacggatgctcttgggctaagtggatttaattttatccttgctgaataaagaacacggaattgtagccaaataagaacgtgatatataaatatttctttcccactttgctggatgcctggattttcatcaccatctatact

SEQ ID NO: 213978 - DNA, 798 bp, Zea Mays
cgattccgggcgtgctgatgctggatctgcccgatttggcatgggcgccgcgtacgggaccgcgaagagcggcgtcggcgtggcgtcgatgggtgtgatgcggccggagctcgtcatgaagtccatcgtgcccgtggtcatggctggtgtgctcggtatctacgggctcatcatcgccgtcatcatcagcacggggatcaaccccaaggccaagccctactacctctttgatggctacgcccacctttcgtccgggcttgcctgtggtctcgctgggcttgcagctggcatggccatcggcattgtcggtgatgctggagtcagggcaaatgcgcaacagccaaagcttttcgttggcatgatcctcatcctcattttcgcagaagcgcttgctctctatggtctaattgttggaattatcctttcgtctcgcgctggtcaatcccgggcggattaagtgcaccaccattctgtgattaccgcaccgtttattatgctattctgagaggattggaactctattcccttgtctagtttattcttgttaccatgtattaatgtaacaatctgtagctgatggaaggtgacttccagtcatgttttggttttggtggtgtcgagcagaggttatttatttttgggttaaggtcggagtcggacggatgctcttgggctaagtggatttaattttatccttgctgaataaagaacacggaattgtagccaaataagaacgtgatatataaatatttctttcccactttgctggatgcctggattttcatcaccatctatact

SEQ ID NO: 213979 - DNA, 549 bp, Zea Mays
gttgataatccactttttaatatttcatacacaagtctggaaatgcaattattacacatttaggttctctgttagggcaaatgcgcaacagccaaagcttttcgttggcatgatcctcatcctcattttcgcagaagcgcttgctctctatggtctaattgttggaattatcctttcgtctcgcgctggtcaatcccgggcggattaagtgcaccaccattctgtgattaccgcaccgtttattatgctattctgagaggattggaactctattcccttgtctagtttattcttgttaccatgtattaatgtaacaatctgtagctgatggaaggtgacttccagtcatgttttggttttggtggtgtcgagcagaggttatttatttttgggttaaggtcggagtcggacggatgctcttgggctaagtggatttaattttatccttgctgaataaagaacacggaattgtagccaaataagaacgtgatatataaatatttctttcccactttgctggatgcctggattttcatcaccatctatact

SEQ ID NO: 213980 - DNA, 2575 bp, Zea Mays
agggaacgttgaagagtcccgtcccgtcgtgcaccaacatgccgccgcagctgctcgccagctccattattgcctctactccgccatctccttcctaatcgctcgcctcgtttcatcacctgagctctcctaatctcattcaccgttgcttgctctttgaattgcctttgcccccatttgctttcctgtttcttccatcccatccgtaccagctgacggtgcccgggttccatgcccagcggccagcgccttgtgacctgatccgcggctcgtccattcctccctccgtgaatggctcctccagcagggtctggggcagcgacggagggagggccggcacggcggcgcggcaccggcaccggtaccagccccggccgcaccaaagtgtgggtcgagccgccgggcaagagccaccaccagaccccggcgcggtcgctgcccccgccctcgcccccggccccgtcggtggcggccaagagggtgtccgtggtgtactacctttgccgcaaccgccatctggagcacccgcacttaatcgaggtgccgctcgccgccccggaggaaggtctctacctgcgagatgtgattaaccgcctcaacgtgctgcgcgggaagggcatgtcctccaagtattcctggtcttgcaagaggagctacaagaacggcttcgtgtggcacgatctgtccgacgacgacctggtgctccccgcgcagggcaacgagtacatcctcaagggctccgagcttcttgaccgctcgccgccgctagatcggcagcagaatggcgttagcaacccaaaggtggagggcctcaagccatgcaaggaagagtcccctcagtcgcggggctcgcaagaaggatgctcgtcgtcatcgtcttcgtctgcccttggcaaggagatctcacctccacctgccactcgacggccacagcagcaggcgcaatcagcagtgctgccatcgtcgtcggcttccaccaaccatgaagatgacctgtgcccgaccgcgcattcaggctcgtccggcaaccagtcccctgaacctgcaggaagaaatgctccattgtcagaggctagctccccgggaccttccgaatacagggtctgcagacccatcggagctcaggatgccgcgacacaaacagatgacagtgagagggatgttgctaaaacccatacttgcgtggtcggagtgtccatggatacgacgttagatgctgagattcaggaatgtcatcaaaggagctcactgctgtcaccaaaggtacccaagattgttcaggaatcaccggccctgtgttcctctgatgcttcaccgggtgtcagagttgagaccttggagtccctaataagagcagaagcctgtaggagaagtagctttagaacactagaggaggaacacatgcttggcccaattggtgtgaaactgaagccagccaatttgctaatgcagcttatcacttgtggatctatatctgttaaagaacaccgaggctttgggttcatcccaacgtacaggcctcggtttacacaagttgagttcccttcgtcagtgttctccactcctgtggcattgcgacaccttgacaaaatcccctgcaatacaagaacaatcgggacgagagctccagagtctgaacgtttcagtgggagcttggttgagaccaagatgcaggacgagtcaaggagaggaatcagctcactcaaacgctcatcatcttatgacgaggatagagtttatagagcagcacattccaaaagtgatacagaaaactcttgtgagtcaggtagtttcaggtgtcttccgcagactatcagaatcatatcatgtaagcaatcgagaaatggaacaatactctcccctttctctgatgtgagaaacagctctagtcaacaagaatatagtactagatcctcaccactgggttcatcaaagagtgcaagcaataggatgactgatccatcactgggtaaagtagattcattccacaaggaaaaggacatgatcaagatcgaagaaagcttccttctggagctcgggttataatccaatctgcacctttgtgtgaagatagtgatggcagcaatgaatcactgtaaggggctgtgttacatatgttttttttctttttatttcattttactgagaatgacatttgttggaatttggtgcttgtgtgtggcatagcttttggagtaggttcaaaggtattgattttgtaaactgtgaatgtgatagtcaacattttctcacaccttgaagaagagaatactttatcttgctttaaaaggtagcatggttacttgaacgcccttccttccttgagagagggatcgaatggcccaggttctgtgagggagggtgtatgcagctatgggcagtggatctgatccgataatgctgcgccatggagagcgacgtgccctcagggcaacgccagatgcacatgtatttgtggaactgtgaagcaggaatacaagctgtgtttggctctgaattatttgatcctcagtggcatgtttctgaagtctgaacgtgaaacgatagtatctggctctgaattttcttgtctttc

SEQ ID NO: 213981 - DNA, 2132 bp, Zea Mays
agggaacgttgaagagtcccgtcccgtcgtgcaccaacatgccgccgcagctgctcgccagctccattattgcctctactccgccatctccttcctaatcgctcgcctcgtttcatcacctgagctctcctaatctcattcaccgttgcttgctctttgaattgcctttgcccccatttgctttcctgtttcttccatcccatccgtaccagctgacggtgcccgggttccatgcccagcggccagcgccttgtgacctgatccgcggctcgtccattcctccctccgtgaatggctcctccagcagggtctggggcagcgacggagggagggccggcacggcggcgcggcaccggcaccggtaccagccccggccgcaccaaagtgtgggtcgagccgccgggcaagagccaccaccagaccccggcgcggtcgctgcccccgccctcgcccccggccccgtcggtggcggccaagagggtgtccgtggtgtactacctttgccgcaaccgccatctggagcacccgcacttaatcgaggtgccgctcgccgccccggaggaaggtctctacctgcgagatgtgattaaccgcctcaacgtgctgcgcgggaagggcatgtcctccaagtattcctggtcttgcaagaggagctacaagaacggcttcgtgtggcacgatctgtccgacgacgacctggtgctccccgcgcagggcaacgagtacatcctcaagggctccgagcttcttgaccgctcgccgccgctagatcggcagcagaatggcgttagcaacccaaaggtggagggcctcaagccatgcaaggaagagtcccctcagtcgcggggctcgcaagaaggatgctcgtcgtcatcgtcttcgtctgcccttggcaaggagatctcacctccacctgccactcgacggccacagcagcaggcgcaatcagcagtgctgccatcgtcgtcggcttccaccaaccatgaagatgacctgtgcccgaccgcgcattcaggctcgtccggcaaccagtcccctgaacctgcaggaagaaatgctccattgtcagaggctagctccccgggaccttccgaatacagggtctgcagacccatcggagctcaggatgccgcgacacaaacagatgacagtgagagggatgttgctaaaacccatacttgcgtggtcggagtgtccatggatacgacgttagatgctgagattcaggaatgtcatcaaaggagctcactgctgtcaccaaaggtacccaagattgttcaggaatcaccggccctgtgttcctctgatgcttcaccgggtgtcagagttgagaccttggagtccctaataagagcagaagcctgtaggagaagtagctttagaacactagaggaggaacacatgcttggcccaattggtgtgaaactgaagccagccaatttgctaatgcagcttatcacttgtggatctatatctgttaaagaacaccgaggctttgggttcatcccaacgtacaggcctcggtttacacaagttgagttcccttcgtcagtgttctccactcctgtggcattgcgacaccttgacaaaatcccctgcaatacaagaacaatcgggacgagagctccagagtctgaacgtttcagtgggagcttggttgagaccaagatgcaggacgagtcaaggagaggaatcagctcactcaaacgctcatcatcttatgacgaggatagagtttatagagcagcacattccaaaagtgatacagaaaactcttgtgagtcaggtagtttcaggtgtcttccgcagactatcagaatcatatcatgtaagcaatcgagaaatggaacaatactctcccctttctctgatgtgagaaacagctctagtcaacaagaatatagtactagatcctcaccactgggttcatcaaagagtgcaagcaataggatgactgatccatcactgggtaaagtagattcattccacaaggaaaaggacatgatcaagatcgaagaaagcttccttctggagctcgggttataatccaatctgcacctttgtgtgaagatagtgatggcagcaatgaatcactagcatggtgtactgactggtgagcagttgggcatatg

SEQ ID NO: 213982 - DNA, 1941 bp, Zea Mays
ctagaacccagccgaggatcaccgtacgctttgctccgctcatctcctcctccgcggagcaattccgtcgaacgcctcgcgcgcgcacgcgctctcgcaccgccctcggcctttgtcccatcgaatgccgtagcgctgtggacgggcgcgcgcggcggtgcctgccatggcttcgctctgccccttatcagccgcgcccgctttcccgcgcgctgctcgacctcgtgccgcaagcttcaggggacccgcttcctggagcggcctcgcggcgaccgcgagcaatgcctgtgtctgtagctgtggacttctgcccactggaggctacgcgaggctgcggtcgcgactaaggagtcccgtgcgcgccaagatcgacgaggcggacaagggcacgggcgccggtctgggcttcccctcgccacgccgtaggaagctacgcttgcgcctgcgaccacggctgcgcctcttgtggtggcggctccggcggctgtcgccgcgggagctcatgaccgacgccggggccgcgctgcggcgcgccgttcgccgcgtgcctcccgcggccgcggcgccggtcgtcctggcgcttctcctcgccgtggcgcggctcgcgctgcccaagaacgtggcccgggaggtggcctactcggacctcgtcgcggggctccgcgagggcgccgtggccgccgtcgctttcgaggaggactcgcgccgtatctacttcagcaagaacgctggggatgatgttggctccgacacgaacgagaccggtgagaacgctgcggcgccggcgccgaagtggccgtactacgcgcggagggtgccgcacgatgagggcttcttgctcgggctaatgcgggatggccgggtggactaccgttcgtcgccgcggcctgctgggaggctgctcgtggacatgctgagcacgctgctcacgctttgggtctcgctggtgcccgtgatgtggttcatacagcgtcagatgtctggtgcgggcggtgctgacaagcgacgcaaaccgaggaagcagagggtgggctttgatgatgttcagggcatagatgaagccaaggaggagcttgttgagatagtgagctgtctgcatggttcactgaattataagaagcttggagcaaaattgcccaggggtgttctgcttgttggccctcctggaactgggaagactctgctagcaagggcagttgcaggagaggctggaattccgtttttctctgtttctgctagtgaatttgttgaagtttttgttggacgaggtgcagctcgggtaagggatttgttcaaggaggccaaagaagctgccccgtcaatcatttttattgatgaacttgatgccgtgggtggaagtcgaggtagaagttttaatgatgagagggaccaaactctaaaccagctgcttaccgaaatggatggttttgactcggacatgaaagttattgtaatggctgctactaacagaccaaaagcactggatgctgctctttgtcgacctggccgcttctccagaaaggttgttgttggtatgcctgatgtggagggccgcaaaaagattctggatgttcatctaaggaatattcctttggaagaggatcacggaataatcagtgatctggttgctagagtaaccccagggctggtcggcgcagatctagcaaacattgttaatgagtctgctctactagctgcacgaagaggtcggaatactgtgtctcgggaggatattatggatgcaatcgagagggagaaatacggggtcactgggaggcaagaagctgattctgaaaggcaaggcctcaccaagttatttccatggctatctaaacctggaaataaaccatcaagccctgatgatttccgaggattgatgggttatcacacattaagctaacttagtagctcttgcaagagccctattgctcgctagtgagg

SEQ ID NO: 213983 - DNA, 2093 bp, Zea Mays
gcggacaagcccgccggcctcgtgcacgtcaagggctggggtcttgggtctcggcgcgcgcggcggcgacgaggtcgcggcgaccctggcggaggagggcagccgcctgcacgccatccgcgccgcgctagaggacatcgaggaccacttcgagtgcttgcttatactataaaaccatacttgtttgcgtctgtggaatgtgcacacccatgggaatttttcttgatggtccactgctgacatgcacagacatctcttctaccactgccatctcaaaggccatgctgctataccagcggtagctgcaacgattcatctagttgtggcaaattttggcacatccccaacactcgagagatcaagaaagcaaagacatgccaaccttcaaaatgcattgagaattttggaccttgtaccatccaagcatcatcatgaccaagaggaagttccgtcacatcaccgccttatcaatggctgtatgggtgacatctcggcagtccaatcaagactgcacactatgcgtaagggtaaagagagttttgctaactcaagctcaaatcaagcacagcctaaacacagtaacattgtctcaaataatacctcagtttgccccttcataactagactcacaaaggaggacatgtttatgcaaattgtggagttacataggagtggacaaattagttcagatgcatccattttggtatctgcactgagttactgtgctgctgagaaaattgttaccgcaggtgtacagttccatgctcaactagtgaaagtaggatatgtctcatctatctccactggcaactcgctgatcagtttttattcacgatgcagccaattggaaatcgctcatcgggttttccaaaatatgacagcaaaaagtaccgtgacatggacagcattaatttctggctatgcccaggataatcaggtggaaccgtgtctccatttatttgcactgatgaggcactctgtgtgcaagcccaatgacgtcacattcgcaactatcttcagtgtctgcactaatcatgcatttcttgtacttggtaaaagtgtgcaagccctacagatgagaatgggttttgattcgtatgtgcatgtgtccaatgcattgatatcaatgtatgcaaagtgcgggagtattggtgaagcacgagctgtatttgagagcattagatgcaaagacttggtctcatggaactccttgatctttggatattcacagcatggccttgctgagcattgcctatatttgctaagagaaatggaagggcatataacaccggatgcaatctccttcctaggtgtgctctcatcatgccggcatgcatgccttgtggcagagggccgacggtgcttcagggcaatgattgaacatggagtagtaccagagatagatcactactcatgtatggtggatctttttggccgtgcagggctgcttgatgaagcatgggatctgatccagacgatgcccatgcctccaaatggtgttgtatggggctcccttctagcttcctgtagggtgcatggaagcacttggatcggcatacaagctgcagagcaccgtctaaagctggaaccaagttgtgctgcaattcatgttcagctagcgaatttgtatgggagcattgggtgctgggatgatgtggcaagagtgaggaaggtgatgaaggagagagggctgaaaacaaacatcgggtgcagttggatagaagttggcaataaagtttatacatttacagcagaaaacagatcaaagaaccaggtaaacaatgtcctggttgttcttgattgcttgcagtcacatatggatcacgagtatgatatactactgatcgagggtctggattgggattatcctgagcatatcaagttaagtttaaacactatataaatttgaagatgattgctcgttatgttcaagttcatttgaagaggcactcaataggaattgacatcacacctcaaatatctgcaacctagatgtaacatatctacggaggaaatgatccatccatcggatccattcaatttcaaaggcggcgactctgtcgtcctcacttcgtcttcaatcacaaattaag

SEQ ID NO: 213984 - DNA, 2240 bp, Zea Mays
aatcgcgtttgtcccaacgccgacctgttagtaggtcaggtcagtcgaccaggtcggtgtaatcagtaacgatcgatcgatatcgattatatgccttggatggaatcagacggtatcaacagattttagttgataatgatcgacagcgtggtcgataattcggttaatagctgacatggtggtccataaagacagaaaggcagcagctacgcctgcacgtgcacggccttccgctccatcagcacgaagctagcagcacggtccagcgctggccgccgcagccgtggccgccgttctgccgttgacccctctgctggagggccgccgctgccgccgccaccagttgtcatcgccggcgccgtggcgtcgcccggcaagcgaatgccgccgtcaccaattggttgcaccagcagggccgccaccgctagtagtagtaggcaggcgaaagaggacgatggcgcgagcagaaacgtctcaggctttgagccatccatctggggcgatttcttcctcacctactccagccctctggccacgtcgtcccttcacaaggcatggatggtacatcgagcagagcagctgaaggaagaagtggcagcaaaactggtagcagcttccagcgcctgtagcctgcaccgtaggattcatctcatccacgtcttggagcgtctctgtctggatcatctcttcgaggacgagatcagcgacatgctagctcgaatgaacgacgtcgatgtcagtggctgcgaccttcaaacggtggccatgtggttctatcttctccgaaagcacggatacagtgtctcgtcagatgtctttgccgagttcagagacgaacaggggggtggttttacagcaaacagtgcaagggatctgctgagccttcactgcgctgcttgtctcgcgacgcgtggagagacgatacttgacgaggccatttccttcacagccaagagtttaaaatcaacagcgccgtatacgggagcagcgtcgttagcatgtgaaataaagcgtgcgctcgagatccccctcccaagacgtgtgagaatttacgaggctaaatctcgtatagctgaatatggaagagaggctgaggctgatgaactggtaatggagctagcaaagctcaactataatctcgtgcaactccagtatcaacaagagctgaagatcataacaaggtggtggaatggtctagagcttcagtcaaggctatcgttcgctcgagacagagttgtggagtgctacttctggatcgtgggagtatattttgagccaagctactctcgagctcgaataatactaacaaaagtcatcgccatcgtgtccctattggacgacacttatgatgtctatggaactccacaggagtgcgagttatttaccgagtgtatagaaagttgctggaggtcttccagagaacatgaagttcatttttggaaaaattttggatacttaccaaagcattgaggaagagttagcgccggaagagaaataccgcatgccctacataaaaaattttattatagatctagtaagagcatacaacaaggaggtaagatggcgcgaacaagggtatgtgcctgcaaccgttgaggagcacctgcaggtttcagcaagaagtggcgcttgtcacctcttgtcgtgcgcatcatttgttggaatgggagatgttgcaggtgaagaagctttcgaatgggtgtgcagtgtgcctaaactagtgcaggcgctctgcatcattctcagactttccgatgatctcaagtcatatgagcgagagaaaatggccccgcatgttgcctcgacaatagaaagctgcatgagagagcacgaggtcccgctcgaagtggctcgcgtgaagatacaggaaatgatagatgaaacatggaaagatttcaacgaggagtggctgaacatgaacaagcaccagccggcggagctgctcgagaggatcttcaacctgacaagaacaatggtgtatatgtacaagaatgatgacgcgtacacaaattgccatgtcatcaaagacaccataaactcgttgtttgtggagcctgtttccatagcctaagacgttcgttaaatagttgtgatgccccatgcatggttgtgtgtaacaccataaaagccatcaattaaaataataaatttagatattatattgattagggtaataaaatttttagtgtttaattgttcatttgcatcgttttctttgtatgcacttgattgattatcgg

SEQ ID NO: 213985 - DNA, 2235 bp, Zea Mays
ggtcggtgtaatcagtaacgatcgatcgatatcgattatatgccttggatggaatcagacggtatcaacagattttagttgataatgatcgacagcgtggtcgataattcggttaatagctgacatggtggtccataaagacagaaagatggtagcagcagccagcaccacccaagcacactggcaaatgacaggcagcagctacgcctgcacgtgcacggccttccgctccatcagcacgaagctagcagcacggtccagcgctggccgccgcagccgtggccgccgttctgccgttgacccctctgctggagggccgccgctgccgccgccaccagttgtcatcgccggcgccgtggcgtcgcccggcaagcgaatgccgccgtcaccaattggttgcaccagcagggccgccaccgctagtagtagtaggcaggcgaaagaggacgatggcgcgagcagaaacgtctcaggctttgagccatccatctggggcgatttcttcctcacctactccagccctctggccacgtcgtcccttcacaaggcatggatggtacatcgagcagagcagctgaaggaagaagtggcagcaaaactggtagcagcttccagcgcctgtagcctgcaccgtaggattcatctcatccacgtcttggagcgtctctgtctggatcatctcttcgaggacgagatcagcgacatgctagctcgaatgaacgacgtcgatgtcagtggctgcgaccttcaaacggtggccatgtggttctatcttctccgaaagcacggatacagtgtctcgtcagatgtctttgccgagttcagagacgaacaggggggtggttttacagcaaacagtgcaagggatctgctgagccttcactgcgctgcttgtctcgcgacgcgtggagagacgatacttgacgaggccatttccttcacagccaagagtttaaaatcaacagcgccgtatacgggagcagcgtcgttagcatgtgaaataaagcgtgcgctcgagatccccctcccaagacgtgtgagaatttacgaggctaaatctcgtatagctgaatatggaagagaggctgaggctgatgaactggtaatggagctagcaaagctcaactataatctcgtgcaactccagtatcaacaagagctgaagatcataacaaggtggtggaatggtctagagcttcagtcaaggctatcgttcgctcgagacagagttgtggagtgctacttctggatcgtgggagtatattttgagccaagctactctcgagctcgaataatactaacaaaagtcatcgccatcgtgtccctattggacgacacttatgatgtctatggaactccacaggagtgcgagttatttaccgagtgtatagaaagttgctggaggtcttccagagaacatgaagttcatttttggaaaaattttggatacttaccaaagcattgaggaagagttagcgccggaagagaaataccgcatgccctacataaaaaattttattatagatctagtaagagcatacaacaaggaggtaagatggcgcgaacaagggtatgtgcctgcaaccgttgaggagcacctgcaggtttcagcaagaagtggcgcttgtcacctcttgtcgtgcgcatcatttgttggaatgggagatgttgcaggtgaagaagctttcgaatgggtgtgcagtgtgcctaaactagtgcaggcgctctgcatcattctcagactttccgatgatctcaagtcatatgagcgagagaaaatggccccgcatgttgcctcgacaatagaaagctgcatgagagagcacgaggtcccgctcgaagtggctcgcgtgaagatacaggaaatgatagatgaaacatggaaagatttcaacgaggagtggctgaacatgaacaagcaccagccggcggagctgctcgagaggatcttcaacctgacaagaacaatggtgtatatgtacaagaatgatgacgcgtacacaaattgccatgtcatcaaagacaccataaactcgttgtttgtggagcctgtttccatagcctaagacgttcgttaaatagttgtgatgccccatgcatggttgtgtgtaacaccataaaagccatcaattaaaataataaatttagatattatattgattagggtaataaaatttttagtgtttaattgttcatttgcatcgttttctttgtatgcacttgattgattatcgg

SEQ ID NO: 213986 - DNA, 1131 bp, Zea Mays
ccgaccccgaccccgtggttagctcgtggtcacccacccgagaagggaagaccccagcccttgtttgcgctgcgcagtgctttatatatacccggggctccactactccagtgctggctggcgttgtatgagcgtgggtggtggcgccgccggccggggatgagctgcaacgggtgccgcatgctgcgcaaggggtgtagcgacgcgtgcgtgctgcggccgagcctgcagtggatcgacggcggcgccgaggcccagggccacgccaccgccttcgtcgccaagttcttcggccgcgccggcctcatgtccttgctcaccgccgtccccgagccgcagcgcccagtcgctgctgtacgaggcggccgggaggacgatcgacccggtgagcggcgccgtggggctgctcggcgcggggagctggcacctgtgccaggcggcggtggagacggtgctgcggggcggcgccatcgccccgctgcccgagtccgactccgacggggcccgccgcggcgcgtccgctgtggcggcgaggcgggccgtggggtgctcgacgttctcgacggcgaagcgcgcgccggcgagcgtgggggcgccgccggagccgtcgtgcgacctcgggctgtggctcagccccgggtcacccccggcgaccggggagcggcgccggcggcggcggcccggcacgccgtccatgacctccgaggagtccgtgacgacgatgagcggcggcggcggaggcggaggcggagggagggagcccgagctgctgaacctttttgtctgagaatggccgacggtttggctaaaagccagcggccgatcgtgccgtgcgcccctcggcgcgcggtgtggtgtgcttgatcccggcgagaaaaaaacgtttgtttgtctaggtagccgtcgtcttgtccttcttcctttttgggccgcgcgtagaaaccatgagcgtgccggcggcagcagcgctctcccagccgccgtccgttagctagctgtttatttcatttcttcccaactttttcttggcagaagcgacgctccgtccgtcgctgaataaaattgtagaccaagggtaaagcgaagtggcgctgcatgcgtcgatcttatcgtcatcacagcgggagcggc

SEQ ID NO: 213987 - DNA, 3099 bp, Zea Mays
gcctctttttctccccgccccgcgcggccgaacaaaaccctagtccccctccccactccctcagtccccattcccacaccgttggtggctcggaaccgccactgaccacttccctgaccccgcgctctctccctctcactacagtcggagggcggcggcggtggcgaaccgacggcgtataacagttggctgctcacaatggggacactttcaatgtccgacgccagccctatccctgccaagaactgggatgcttcccctgtcaagctcgaggctcaaggtggtgacgccatcctcggcatgaaggaggaagagcgactactggagctcgtgaaggatgagcaggctgatggaatcttggattcattaccaattgacctggaggccaagaatggcgatgcatcactcatcactgaagccatgaaaaaggaggaggagcagcttgaagacacccggatcaaggtgcaggaagaagaggaagccaggaagagggaagaggctgctagacttgcttttgatcctgagacacagtataacaagttagatgagctgctgacaaagacacaactcttttcggagtttctacttgagaacatggatcggattgccgatgaaagtgttgaaactcaagctgaacagccacaggtagaagagaagaagaaagggcgcggccggaagaggaaagcaaagccacagtacaatgataagaaggctaagacggcagtggctgccatgctcacaagatctcgcgaagaacgtcttgcggaagattctactctctcagaagaagaaaggtgggaaaaggagcaggctaatcttgtgccgttattgactggtggaaagttgaagtcatatcagataaagggtgtcaagtggcttatatcattgtggcagaatgggctgaatggaatactggctgatcaaatgggccttgggaaaaccatccagacaattggatttcttgctcatctgaaagggaaaggcatgcatggtccatacttaataatcgctcctctgtccactctctcaaactgggtgaatgaaatctcaaggtttactccatctctggttagtatcatataccatggaggtaaggctgcccgggcagagatccgaaggaaatttatgcccacaaatgttggccctgattttccgatagtagtgacttcatatgagatggccatgtttgatgctaaatttcttgctgcctataagtggaagtatgttgttgtggatgaggggcatcgtctgaaaaatgctaagtgtctattattgaagcagctgaagcgcataccaatggataataagctccttttgactggaacacccttgcagaataatcttgcagagctctggtcactattgaacttcattttgcctgatatattctcgtcacatcaagagtttgagtcatggtttgatttttctggtggaaatgaagaaactgatgagaagaaaaggctgcatgttgtttcaaagcttcacgctatcttgcgtccattccttctaaggcgtatgaaggaggatgtggaacagatgcttccacgaaagaaagagataatcatatatgccaacatgactgagcaacagaagcaaatccagcatcacttgatcgaaaaaacatttgacaactacttgcacgaggaatcagatattatattgaaaagacctggcattagggcaaggttgcataatctaatgattcagctgaggaagaattgcaaccatcctgatcttttggaatctccagttgattcaactggtttatatccacctgttgagaagcttctggaacagtgtggtaaattccaactttttgacaggttgctaaatttcctgatggcgcaaaagcacaaggttcttgtattctcgcagtggacaaaagtgctggacattattgaatactaccttgattcaaaaggccatgctgtttgccgaatcgatggtaatgtgaaactggaagaaaggaggaggcagatagcagaattcaatgacgtgaatagcagcatgcgtatcttcctcctgagcacaagggctggtgggcttggcatcaaccttactgccgctgacacctgtatcctctacgacagcgactggaaccctcagatggatttgcaggccatggaccgatgccaccggatcggccaaacacgcccagtgcatgtgtataggctggctacgtcacactccgttgaggggcggatgatgaagagagcctttgggaagctgaagctggagcacgtggtgatcggcaagggacagttcgagcaagacagagctaagccgagcgccttagatgaaggtgagctgctggcgcttctcaaggacgagcagaccgaggaggacaggatcgtccagaccgacatcagcgacgaggacctccagaggctgatggaccggagcgacctgatgggcccgccgcctggcgctggcggcgcaaacgcggcctcgcctcttgtaccgctgaaaggcccgggctgggaggtggtggtgccggccaagagtggcggcggcatgctgtcgtcgctcaccagctgagccgtcgtcgctgcggggatctgttgtgcttttggttggtcgcacgcactcagttttggtttgccccccccccccccccccccccccccactggtgctggtggttttggtggcagctgttgcgctgctcaggcgatggctgttgaactggggcgttgcccctgcagaagtagcttttagtttaggatcagcaacaaaacaagcaggactctaggccatgtgtggtcgactctccgtacggtacccaggtcgtttacagtacggaggtcgttgcgttagattacgtgggtgggtgatggcctcatgggggatgggacggttggttgaaccagacacatgccggttgctttgtaaagtttgtatcacgtcgtccgtgatacaatgcggtcctccgtctacaagcgtgctgatcctctcttgtttggctgtcttgtgatgtttgttgagaacgctgaacgaacgcccgtaccgtgacaaagatcggttcctggtcttgttactcttgtacagtctacaaaaggagaaggcgaacgctgcaacaaggttggttcctgtatactat

SEQ ID NO: 213988 - DNA, 1791 bp, Zea Mays
gcggtccaagtacccctaaagttcatacatatttacccacattttccatagtataaaaaggtctgatttctctcatccctcccgcaccacggcaccagaccctagccacgactttccccaagcctcagcccctctccccgctcgtgtctccaagccgcaacggcgcagctcctcttcttggacgccgaaaccgggcaccgtcgtagcccctgtctccgctcgtctccgggaccctgcttggccctctccggcgaacctctgtgcccctgctccgccgccagttcgacgccgcctgctccagatcgacgttgtcgtcctccgtcctttgtccgcctgctccagatcgacgacgcctgctccagatcaaatccggcctccgtcctctgtgcccctgccctgccgctcccagatcgacgccctaccgctccaggtcgagctgctgctccagatcgacgcccaactgctccagatcgagctgcttgtcccagatcgacgctaaggggcaaaagaaggattgcctgccaatgatagtgatgatgtggaggaggtgtctccaagtgttgaggacaagcaagctagaaaaagaggtgttgatcacaaatccccaattaaaaaatcaaagaagaattttagagatatgcagttcaagcgttttgtggattcatttgtggaaaaagctagttcaagcaagtcttccgcaacatcttcgcctaatgatcatgttaggcaagagataacagaaatgatggaatcagttatctcagctgggatagttgaaggaagtgatgacatttctatgccactcaacttctcatcaagaaggagtatcgagatgtgtttctcacactaaagattccagaagggaagcttgcatggctcaagagaacttgggaggagaggaaaaaacataagctagttatatgtattcatgctgtatcttgaacttgattagtaatgctatttgttcatgttgtatcttgagcttgattagtattgctatttattcatgttgtatggttgagttatattattcatgttgtatggttgacagatggctttcacctcaagtgaatcaaatgaagctgacataacaagtaattcaagtgactcaagtgactcaagtgactggatgtgtgaagctgctgcaattgcagcttatgcaatgctcgattgcggtacatcatctggaaagaagcaaaaaataagtgcaggagactggttatcagtgggttcagaggcatctcagttatccagagagttgttatgatatgtttagaatgagaagttcaaatgatgtagcatgaacttggacaaaggtaacgagatccggaatatcagtacatcaaagcaagacattagaagactcatagaagatttatcaagatcatgcaagagcctaatacacaagataagagaatcccaaacaaagaaacacgaagaaacaaaaaaatcagcacaccaaaaaggcactggacgtgtcacgcgcgaatgacaactgtggctggataagaaaagagctgaagacaaagtgcacaattgtcttagtgtgcatcagatacaatgcactagacaggttacccagagagctctgcagagtgacccaaggagttacagggcatcgaacatgtctggtggtgcaccagatacggcactctataagggatgcaaatgcaactgagtcaggtatgatgcaccggacaagtctagtgttaacaccggtggcacactggatacccagaggcctcaatggtcgataacgactatttccaatggctaggtgatgtggaactc

SEQ ID NO: 213989 - DNA, 1352 bp, Zea Mays
ctcatccctcccgcaccacggcaccagaccctagccacgactttccccaagcctcagcccctctccccgctcgtgtctccaagccgcaacggcgcagctcctcttcttggacgccgaaaccgggcaccgtcgtagcccctgtctccgctcgtctccgggaccctgcttggccctctccggcgaacctctgtgcccctgctccgccgccagttcgacgccgcctgctccagatcgacgttgtcgtcctccgtcctttgtccgcctgctccagatcgacgacgcctgctccagatcaaatccggcctccgtcctctgtgcccctgccctgccgctcccagatcgacgccctaccgctccaggtcgagctgctgctccagatcgacgcccaactgctccagatcgagctgcttgtcccagatcgacgctaagatggataacatgccaaagaacaggaaaccaaatgctcaatgggatctcagtgctgctagaatttttaatgagatatgtgtggaataagtattgacaaataatagaccacaaggttgtttgaacaacaaagggtacgccaatcttgtagccaagtttaatgaatggtcaggcagaaattacacccgtgttcaaatgaaaacccgttgggatgcactgaaatctgactttacaacatggaaaacactactccttagtgtgtctgggttaggaagagatccaaggattggttctattacagctagtgacgaatggtgggaagaaaagatagaggccatgccagcatgcaaaaagtttaggcttgcagcattggagaatgaagatcttgaaataatgtttaatggggtgtcctgcactaatgcatatgctatggctccaggggcaaaagaaggattgcctgccaatgatagtgatgatgtggaggaggtgtctccaagtgttgaggacaagcaagctagaaaaagagatggctttcacctcaagtgaatcaaatgaagctgacataacaagtaattcaagtgactcaagtgactcaagtgactggatgtgtgaagctgctgcaattgcagcttatgcaatgctcgattgcggtacatcatctggaaagaagcaaaaaataagtgcaggagactggttatcagtgggttcagaggcatctcagttatccagagagttgttatgatatgtttagaatgagaaggtcagtgttctatagtttgcatgacattttagttaacagttatggtttacgatcatcaaatgagatgtgttcaattgaagcacttggcatgtttttatggacgtgtggtgcacctcagtcatttcggcaagcaaaacacatattttctcattctacagaaactatt

SEQ ID NO: 213990 - DNA, 1845 bp, Zea Mays
atagtataaaaaggtctgatttctctcatccctcccgcaccacggcaccagaccctagccacgactttccccaagcctcagcccctctccccgctcgtgtctccaagccgcaacggcgcagctcctcttcttggacgccgaaaccgggcaccgtcgtagcccctgtctccgctcgtctccgggaccctgcttggccctctccggcgaacctctgtgcccctgctccgccgccagttcgacgccgcctgctccagatcgacgttgtcgtcctccgtcctttgtccgcctgctccagatcgacgacgcctgctccagatcaaatccggcctccgtcctctgtgcccctgccctgccgctcccagatcgacgccctaccgctccaggtcgagctgctgctccagatcgacgcccaactgctccagatcgagctgcttgtcccagatcgacgctaaggtaatatggataacatgccaaagaacaggaaaccaaatgctcaatgggatctcagtgctgctagaatttttaatgagatatgtgtggaataagtattgacaaataatagaccacaaggttgtttgaacaacaaagggtacgccaatcttgtagccaagtttaatgaatggtcaggcagaaattacacccgtgttcaaatgaaaacccgttgggatgcactgaaatctgactttacaacatggaaaacactactccttagtgtgtctgggttaggaagagatccaaggattggttctattacagctagtgacgaatggtgggaagaaaagatagaggccatgccagcatgcaaaaagtttaggcttgcagcattggagaatgaagatcttgaaataatgtttaatggggtgtcctgcactaatgcatatgctatggctccaggggcaaaagaaggattgcctgccaatgatagtgatgatgtggaggaggtgtctccaagtgttgaggacaagcaagctagaaaaagaggtgttgatcacaaatccccaattaaaaaatcaaagaagaattttagagatatgcagttcaagcgttttgtggattcatttgtggaaaaagctagttcaagcaagtcttccgcaacatcttcgcctaatgatcatgttaggcaagagataacagaaatgatggaatcagttatctcagctgggatagttgaaggaagtgatgacatttctatgccactcaacttctcatcaagaaggagtatcgagatgtgtttctcacactaaagattccagaagggaagcttgcatggctcaagagaacttgggaggagaggaaaaaacataagctagttatatgtattcatgctgtatcttgaacttgattagtaatgctatttgttcatgttgtatcttgagcttgattagtattgctatttattcatgttgtatggttgagttatattattcatgttgtatggttgacagatggctttcacctcaagtgaatcaaatgaagctgacataacaagtaattcaagtgactcaagtgactcaagtgactggatgtgtgaagctgctgcaattgcagcttatgcaatgctcgattgcggtacatcatctggaaagaagcaaaaaataagtgcaggagactggttatcagtgggttcagaggcatctcagttatccagagagttgttatgatatgtttagaatgagaaggtcagtgttctatagtttgcatgacattttagttaacagttatggtttacgatcatcaaatgagatgtgttcaattgaagcacttggcatgtttttatggacgtgtggtgcacctcagtcatttcggcaagcaaaacacatattttctcattctacagaaactatt

SEQ ID NO: 213991 - DNA, 2859 bp, Zea Mays
ctgacactagggcgcacaaacggacaacgaacccagctcgaaaagttgtccaggagaaaccgaaggtcggcgggatccgctctccgttcgggcgcgagatccgccatcccaccagcaatggcggcggggatcgccggcgcggtggtggcagcgctcctgcttctgtatccggccagggcagcggcagcggcggcggtgggggaggggcggcggttgcacactctgttctcggtggagtgcggcgactacttcgactggcaggcggtggggctcctccacagcctccgcaaggcccggcagcccggcggcgtcacccgcctcgtcagctgcgcggaggaccagctcccgtcctaccgcggcctccgcatcggccacaccctccaggtcccctccttcagccgccacccacgcaccggcgactggtacccagccatcaacaagccagcaggggtagtgcattggctaaagcatagtccagaggccgacaatgttgattgggttgtaatcttggacgcagatcagattattcgagggcccattattccttgggaactcggagcagagaaagggaagccttttgctgcttattatggatatttgaagggctgtgataacatcctagcacagcttcacactgcacatccagaattttgtgacaaagttggaggaattctagccatgcatattgatgacttaagggctttagcacctctgtggctctcaaaaactgaagaagtgaggcaagataagtcccattggtcaaccaatattactggcgatatatatggcatgggttggatcagtgagatgtacgggtattcatttggtgctgcagaagtaggtctacggcacaagataaatgatgacataatgatctacccaggttatactcctagacctggcattgagccacttatcttgcactatggtttgccatttaaagttggaaactggtcattcagtaaattagaacaccatgaagatggaataatttatgattgcaaccgcttgttcgatccacctccttttcctagagaggttgagatgatggaatctgacccaaatataaaacgtggcttatttctaagcatagagtgcattaacaccttgaatgaaggactcttgttgcatcatgcatctgctggatgccctaaaccacagtggtcaaaatacctgagttttcttaaaagcaggaggttttcagagcttacaaaaccaaaatactggaagggtgaacaggttgacagcataatgaccatgcaacatgttgcattgtccaaggcaaacaatgaatatccaaaaatacacacccttttctctaccgaatgttcatcatattttgactggcaaactgttggacttatgcacagttttcgtttaagcggacagcctggtaacatcacgcgcttattgagctgtacggatgaggacttaaagaactataaaggacatgatcttgctcccacacattatgttccatctatgagccgacatccattgacaggggactggtaccctgcaataaacaaacctgcagcagttctccattggctcaatcatgtgcagactgatgctgagttccttgttatcctagatgctgatatgatcatgagaggccccatcaccccatgggaatatggtgcaaaacgtggccatcctgtttctactccttatgagtacctcattggttgtgataacatacttgcaaagatacacactcgcaatccctccgcgtgtgataaggttggtggtgtcattatcatgcatatagatgatcttcggcgttttgctctactgtggcttcacaaatcagaggaggttcgtgcagacaaagctcactatgcaaccaacattactggcgatatatataattctggctggattagcgagatgtatggctactcttttgcagcagctgagattaacctgcgacacatcattaggagggacataatgatatatccaggttatgttccactgcccagggcaaaatacagggttttccattatggtttgagatttggagttggtaattggagctttgacaaggcggattggagaaacgctgatgtagtaaatacatgctgggccaagttccctgaaccacctgatcctgctacgatcacgaaacaagatctagatgcacgggagagggattttctcagcattgaatgcgggagagctttgaacaaagccctatacctgcaccataagcgcagaaattgcccccggctagacaccattagcagcacatctaagaaaactgatcaagtttctgcttctaacaaaattgtgagtgttgcacaaaagtcaagaagtataagtagaggaaacatcgaatccatggacgagggaaggttgaagactgtcaagaggactgcagcttctgtacaacctctacatagatcaaggagactggccaggtcttctaggatgtggataattgctgtatgggcattatcaattgtggtgttcctattagtaatctccatgtttttcactgagcaaaggagaaacgcttcgagatctagggtttctagaagtttaaaggctcatgtctgagtattctctttttctaccgacacaatttctgactatagagcagacaatattcacaaactgttactttgtggacgtatataatacataaaaggattttgccaaaaggttatggtcctgggactgtataggctaacatctggtttgagttatcagaagccaaaggactagaacctttgcgaacgtctcctctcttttgtcaaaacttcccgtaaactgctagcatgtttcggtgccactgctgttgtacttgatttaataggttcttttattataacaatactgtgaagttccatatat

SEQ ID NO: 213992 - DNA, 2734 bp, Zea Mays
atggcggcggggatcgccggcgcggtggtggcagcgctcctgcttctgtatccggccagggcagcggcagcggcggcggtgggggaggggcggcggttgcacactctgttctcggtggagtgcggcgactacttcgactggcaggcggtggggctcctccacagcctccgcaaggcccggcagcccggcggcgtcacccgcctcgtcagctgcgcggaggaccagctcccgtcctaccgcggcctccgcatcggccacaccctccaggtcccctccttcagccgccacccacgcaccggcgactgccatcaacaagccagcaggggtagtgcattggctaaagcatagtccagaggccgacaatgttgattgggttgtaatcttggacgcagatcagattattcgagggcccattattccttgggaactcggagcagagaaagggaagccttttgctgcttattatggatatttgaagggctgtgataacatcctagcacagcttcacactgcacatccagaattttgtgacaaagttggaggaattctagccatgcatattgatgacttaagggctttagcacctctgtggctctcaaaaactgaagaagtgaggcaagataagtcccattggtcaaccaatattactggcgatatatatggcatgggttggatcagtgagatgtacgggtattcatttggtgctgcagaagtaggtctacggcacaagataaatgatgacataatgatctacccaggttatactcctagacctggcattgagccacttatcttgcactatggtttgccatttaaagttggaaactggtcattcagtaaattagaacaccatgaagatggaataatttatgattgcaaccgcttgttcgatccacctccttttcctagagaggttgagatgatggaatctgacccaaatataaaacgtggcttatttctaagcatagagtgcattaacaccttgaatgaaggactcttgttgcatcatgcatctgctggatgccctaaaccacagtggtcaaaatacctgagttttcttaaaagcaggaggttttcagagcttacaaaaccaaaatactggaagggtgaacaggttgacagcataatgaccatgcaacatgttgcattgtccaaggcaaacaatgaatatccaaaaatacacacccttttctctaccgaatgttcatcatattttgactggcaaactgttggacttatgcacagttttcgtttaagcggacagcctggtaacatcacgcgcttattgagctgtacggatgaggacttaaagaactataaaggacatgatcttgctcccacacattatgttccatctatgagccgacatccattgacaggggactggtaccctgcaataaacaaacctgcagcagttctccattggctcaatcatgtgcagactgatgctgagttccttgttatcctagatgctgatatgatcatgagaggccccatcaccccatgggaatatggtgcaaaacgtggccatcctgtttctactccttatgagtacctcattggttgtgataacatacttgcaaagatacacactcgcaatccctccgcgtgtgataaggttggtggtgtcattatcatgcatatagatgatcttcggcgttttgctctactgtggcttcacaaatcagaggaggttcgtgcagacaaagctcactatgcaaccaacattactggcgatatatataattctggctggattagcgagatgtatggctactcttttgcagcagctgagattaacctgcgacacatcattaggagggacataatgatatatccaggttatgttccactgcccagggcaaaatacagggttttccattatggtttgagatttggagttggtaattggagctttgacaaggcggattggagaaacgctgatgtagtaaatacatgctgggccaagttccctgaaccacctgatcctgctacgatcacgaaacaagatctagatgcacgggagagggattttctcagcattgaatgcgggagagctttgaacaaagccctatacctgcaccataagcgcagaaattgcccccggctagacaccattagcagcacatctaagaaaactgatcaagtttctgcttctaacaaaattgtgagtgttgcacaaaagtcaagaagtataagtagaggaaacatcgaatccatggacgagggaaggttgaagactgtcaagaggactgcagcttctgtacaacctctacatagatcaaggagactggccaggtcttctaggatgtggataattgctgtatgggcattatcaattgtggtgttcctattagtaatctccatgtttttcactgagcaaaggagaaacgcttcgagatctagggtttctagaagtttaaaggctcatgtctgagtattctctttttctaccgacacaatttctgactatagagcagacaatattcacaaactgttactttgtggacgtatataatacataaaaggattttgccaaaaggttatggtcctgggactgtataggctaacatctggtttgagttatcagaagccaaaggactagaacctttgcgaacgtctcctctcttttgtcaaaacttcccgtaaactgctagcatgtttcggtgccactgctgttgtacttgatttaataggttcttttattataacaatactgtgaagttccatatat

SEQ ID NO: 213993 - DNA, 583 bp, Zea Mays
caaagcgatatttgccggtaaagaagttaccacagctatgccttcattgcgtgccggtcaattcatgcggtgaacaaactaaatccgtcgttcgtgtaccgtctgttggagaagttcttcaaggatcagagctacagtggtacggttgatgaaataaccaagaaccttgttgtgcccatcatcggtgaaactaatttggcggcattcagagcaggttttaacgattcacattctgatcaggctacaaggatatctttcaagaacggctgtgcacgaggtgtgaccgggacaccctacttctttgtgaatggcatacccatcaacgattcaggttctcctctggaatacaaggactggatttctatcctgggtcccttggttggaaagatgtagcgcggttgctagtttgttcatcaataaagtcctagtagagagtaaacagacaaaagctgaataataaataacattaatcagcatcgtcattctcagaataaaaagagtgctaactctcatcggattcaaattgtgtacaagcaacagttcattctttcaggcaacatatcatgcgtgtgcaactctcccg

SEQ ID NO: 213994 - DNA, 2357 bp, Zea Mays
ccctacgcccaccccacccgacccgggcacacaacaccaattcaccaaacttctcaagactgtcactgtccactccaccacctcacttgcgatgcgaacaagagcaaagccctgaaatccttctccccctgcacgcacctgcagacctgctctctcgcgcgcatctcccgtgcccctcactgtttagtggcgacgactgggcgacagtcgccgccgccgcccgctaggggccgtgcccctggtctccatcttcgggcgcttcgcccaccagatatgagcagctggcaattcgattttgaggccattatttgataacccgggacaagtgcactgttacctgaccattttagcttgttcagatggctacacagttgccatgcttcacacagctcagtccaccgtcttgtagttggataaaagatgtcgggaactgcaaggctacgcctgatagggtagccagaagtgcccgagctttgggccactgtcacttccggtgctgtgcaggcccccgtagtgcaaactctttcaagaagaaagactctttcgagaagaaagactctttcctcgaacttcatccggaggtatctctgctccgtggcgagaagagtgccgaggttgtgccaatgaaaggttcctctgatgggggtctgttagagggactgggggtgccgccggaccgaaatgattacagtgaggctaagatcaaggtagttggagttggaggcgggggttcgaatgcagtcaatcggatgattgagagctccatgaacggcgttgagttttggatcgtgaacactgatgtgcaggccataagaatgtctcctgtgctcccccacaatagactgcagattggacaggagttgactcgaggcctgggcgctgggggaaaccctgatattgggatgaatgcagcaaaggagagcagcgagtccattcaggaagctctttttggtgctgacatggtttttgtgacggctggaatgggtggaggaactggaactggaggtgctcctgtgattgctggaatagccaagtccatgggtatactaaccgttggcatagtcacaacgcctttctcgttcgaggggagaagacgggcagttcaagctcaggagggaatagcagcattgagaaatagtgtggacaccctaatcgtcatcccaaatgataagttgctgtctgctgtttctccaaatacacctgtaactgaagcatttaatctggctgatgatattcttcgtcaaggcattcgtggcatatctgatataattacggttcctgggttggttaatgttgattttgctgacgtacgtgctatcatgcaaaatgcagggtcatccttgatgggtatagggactgctacaggaaagtcaagagcaagggatgctgctcttaacgccatccagtcgccgctgcttgatattggaattgaaagagccacaggcattgtgtggaatatcactgggggaactgacctgactttgtttgaggtttggtccagccattttctagtattctccacacaatgtagattgtttttccgacttgaattttgttaattttacatacatcttagctaacatggcaaaactgagcatgctttgtatttgactttgcttgccctttcgtgtttcaaaagactgggaaaaaacattcacgatcagctcctagggtcatgttctctatcatgtttgtttttataagcaataggggttaagaaatcagaggtgcttgcatttttgttgctttcaggtgaatgctgcggccgaaattatctacgaccttgtcgatccaaacgctaatctgatatttggcgccgtcatagacccgtcactgagtgggcaggtgagcataaccttgatagctactggcttcaaacggcaggatgaaccagaaggccgcgtgtcgaagggtgggcaacaaggtgagaatggccgacgcccatccccagcagagggcagcagcacggtggagatcccagagttcctgcgacgaagaggaccttctcgcttcccacgagtttgactgtcctgtcctgcacctgtatgatatgctccacccacccttaggtcagaattagatgatcttgtatggcacctagtcttctctaggcatcgatcgtctctagcggtttgttctttctagttttctttttttccccgccaccaattcttatggttatggtcatcaataatgtgtagctgctgtgagctctctagcgctatatgtaatgtagtccgtggagaatgtgttttccctgttacactggatctgattagaatggtagctgaagaagtgatggttgcctgcattagtatggtagctgaccaaggccatgtttgttttcctcccagatt

SEQ ID NO: 213995 - DNA, 749 bp, Zea Mays
ctttgatgtttatacgaaagaaagtcaagagcaagggatgctgctcttaacgccatccagtcgccgctgcttgatattggaattgaaagagccacaggcattgtgtggaatatcactgggggaactgacctgactttgtttgaggtgaatgctgcggccgaaattatctacgaccttgtcgatccaaacgctaatctgatatttggcgccgtcatagacccgtcactgagtgggcaggtgagcataaccttgatagctactggcttcaaacggcaggatgaaccagaaggccgcgtgtcgaagggtgggcaacaaggtgagaatggccgacgcccatccccagcagagggcagcagcacggtggagatcccagagttcctgcgacgaagaggaccttctcgcttcccacgagtttgactgtcctgtcctgcacctgtatgatatgctccacccacccttaggtcagaattagatgatcttgtatggcacctagtcttctctaggcatcgatcgtctctagcggtttgttctttctagttttctttttttccccgccaccaattcttatggttatggtcatcaataatgtgtagctgctgtgagctctctagcgctatatgtaatgtagtccgtggagaatgtgttttccctgttacactggatctgattagaatggtagctgaagaagtgatggttgcctgcattagtatggtagctgaccaaggccatgtttgttttcctcccagatt

SEQ ID NO: 213996 - DNA, 1960 bp, Zea Mays
gggagagtcaagttcggtgttgttacctactttttggtgtctacctccgtccgtctgcactaggcgacctgaaaactcagtaatgctagttaacctctccagtatctccttctcggatattgaatcacacacggcaacgccgcaacgcgcagcggactcgggtcctcgcactcgcaatcaagcatgggggccgccgttgggaagccagctttcggtgtcgccgtcgcgccgaagacgcaggcggaggagcggctcgccctcgcggagcacgccctgctccagtggactcgctcacccggcgccgactcgggcatctgggacgccggggcgagctacaccaacagaggcctcctggcggcggtcgacgaggtgctcctcctggcggcggagaaccctttcccgctcccggaggccgcctccgcgcgccgccgcctggacagcgccgtcggcgccgccgcgtcgcgcatggtggaggagttcctgcgcgtcaggcgcccgcgaaaggaacagctcggcgggcaccggcggggtggtcgacgcgtccgacgggagccggtcgagggcgagctcgagcgtgcctcacgaggtcgcggccctcttggacaccgaggtctgggacgacctcgatctcatctgccccgcaggcgtgtccgtccttcacgagatcgcgcttcgggtcgttcgtgccggatgcaccgaggtactcttccgggcgttcgccaacgctccctgcgatgtgctagacagtttcttgtcaattcttcgggtcgaatgctcgcagcagacgactgaggccgtgatcaagcggtggacgacggtgacggagatcatagggaaggccatggtcgccatgcggaggcagctgtacgcgcagaacccaggcgccttcgacggtttcagggacgaatacttgctggccatcgcggagaaccgcatcctgatcctgctcgacttcgccaacggattcaccagcatcacgtcgcacgagaagctcgtgtacatgctcggcatgtacgaggctctcaccgacgccgctcccagcctcctgctcctcctcagcggcgcgcgcaaggaggccatctcggagcggacacaaggtggcgtccacccgctgacacgcgacgccatgacctgcgtcgagctgctggcgaggcaccgcaccacgctcgatctgatcctcgcgggcgccgacgagcgcggctccctcgccggcgtcgtctcggacctgatcgcgggcctggaacgcaacctccagaggagattcgctgtcgcctgcgcggacgcagggggctcgcggcacctcttcctggcgaacaacatcagcttcgtgctgagccgcgtcgcggacaacgacggcgtggcttccctgctcggggacgcgtgggcggcgcggcgccggagccgggtcgagcagcacgtagcgagctacgccgcgtcgtcgtggggccccgtcgtcgctctcctggacacgaccgcgtgtggcagaggcaagtcggcgaaagttctggcggagttcaacgcggcgtttaacagatcgcgcgacagcgagatgtgccgcgaggtcccggaccccgtgctccgagcggtgctgcggaacgccgtgtcggagatggtggtccctgcttactgcgcgttcctgcagaagcaacccaagcttgggaaatctgccaggtacacggcagatgatctggtcgagttgctatcggagttgttcgaaggggaatccacggatggcatcaaaatctagctttcaactttgccaaactgagaacgcttgacttctgtaacactacaaaaaaaagttccatttcttcattgatagcagcagtggtagcagtcagacttctttttttagcatgcacggataatctgaatattccattgtaataaaaaaaagaaaaggggacaatctggacatgaaaatgtgccagaaagcatcgacatttccttgttaacagaa

SEQ ID NO: 213997 - DNA, 841 bp, Zea Mays
tcccaatcatttttaggagactggtctttcggcgctcaggttctaattgatgacaaccccagatatgctctagagtgtgctaatgatggcatgagggtccttctgttcgattacgaaagctcgtatccttggtgcaaaactggagccgatgaactgcatccgctggtgacaaaggttcacaactgggaagaagtcgaggagaaacttctctcttgggtagtacctgatagctgacactcttctgtcttgtgagaagcactgcttgagaccagcaaatgattccttttgcctggtttctaaaggaacctgatagggtgaaagactgcaatgttcctagagcttgattttcaatacagatgtcgatagcctctccaagagtcattctaaaacccactctaaatcatcatccgaagagtcatttgcataaatttgactccaactccaacagtttttctatatcctgggatatttttcattaaactctctattcacaataattagttaggatatggagagtcttggggatgttgtcaacgtaagctaggatattcagcttcattaccgcagcctggttgaggcatattcgactgtacttggtcagtctgagctgtaggcgcttctgctctcacacatcagaatcttgttttatccttttgccgcagccgggtgtactatgtatatatcgacgctgccatatggctaagatggtatttgaattgttctaatacagaaaactcgtgtgtgtgtgggtccttggaccaactgatttggagcattttcattattgaggttaagcacaaactcgatgagagttcagtctttatatttgcatttccgaatc

SEQ ID NO: 213998 - DNA, 2017 bp, Zea Mays
ggctcctttcccgaaaaagaagcgagcccaccaccacggtcactgacgttcacaaaaaaaatcgcacacaaaattcctagaccacgttttttttagtcgcacaaatcctacaaaccaaacagcaagagcggaagaagaaacgaaaaaggttcactggaatcgaccaagaaatccgccttgccatctccgtttcgtatatgccctgagaatttccaaacgaaatttccgagcttttccctcgccgcgcgaccttcgatctcgcttgaaagagatggcccagatcacgggaccggtgtgaggactgagacgccgacctccgacctcaccgaggcattcgattcgtcgcaatcctcgccctcactcgcgtgttcaggtttgtcgggctgccccgggataggaatgcttctgtcgacatgctaagccgcggagccgtgcggttgctgttgtatcgtctccggcctccgcctctgcgtttgagttggaatccgagcggtgctatgccatccgccgccgccaaccgctcgagccgggaggaggttcacgccgagcggcgcgcttagcttgaggggttgcttgggttggcgggatggtggcggcgacggcgagttcaggaggagggtggacggagaggcggcggggatgaaggcgcaggtgctcaccacgcagcggcagctgatgcgcgatccggaggtgctgccgctcgaggaggccgccacaggcaagagcatgaacgtgaatggtgcctgtcggcgagggaagcggctagggtttccggagcaggcagcggctaagatggtggttgctgttgatgtagatgaagttcttggtagcttccttgcggctctgaacaaatttattgctgatcgttattcttggaatcactcagtatcagaatatcatgtatacgagttctttaagatatggaactgttctcgagaaagagctaattttcttgtccacgagttcttcacaacccattacttccaagatggcattcatcctattccgggggctcgagatgctctccaaactctttcttctttctgtagcttgtctgtagtaacatctcggcaggatgtaattaagaatcacacattggaatggattgagaagtattatccaggcttatttgagcagatccatttcgggaatcatttcgctttggaaggtcaatcaaggccaaaatcagagatttgcaggtctttcggcgctcaggttctaattgatgacaaccccagatatgctctagagtgtgctaatgatggcatgagggtccttctgttcgattacgaaagctcgtatccttggtgcaaaactggagccgatgaactgcatccgctggtgacaaaggttcacaactgggaagaagtcgaggagaaacttctctcttgggtagtacctgatagctgacactcttctgtcttgtgagaagcactgcttgagaccagcaaatgattccttttgcctggtttctaaaggaacctgatagggtgaaagactgcaatgttcctagagcttgattttcaatacagatgtcgatagcctctccaagagtcattctaaaacccactctaaatcatcatccgaagagtcatttgcataaatttgactccaactccaacagtttttctatatcctgggatatttttcattaaactctctattcacaataattagttaggatatggagagtcttggggatgttgtcaacgtaagctaggatattcagcttcattaccgcagcctggttgaggcatattcgactgtacttggtcagtctgagctgtaggcgcttctgctctcacacatcagaatcttgttttatccttttgccgcagccgggtgtactatgtatatatcgacgctgccatatggctaagatggtatttgaattgttctaatacagaaaactcgtgtgtgtgtgggtccttggaccaactgatttggagcattttcattattgaggttaagcacaaactcgatgagagttcagtctttatatttgcatttccgaatc

SEQ ID NO: 213999 - DNA, 1570 bp, Zea Mays
ggctcctttcccgaaaaagaagcgagcccaccaccacggtcactgacgttcacaaaaaaaatcgcacacaaaattcctagaccacgttttttttagtcgcacaaatcctacaaaccaaacagcaagagcggaagaagaaacgaaaaaggttcactggaatcgaccaagaaatccgccttgccatctccgtttcgtatatgccctgagaatttccaaacgaaatttccgagcttttccctcgccgcgcgaccttcgatctcgcttgaaagagatggcccagatcacgggaccggtgtgaggactgagacgccgacctccgacctcaccgaggcattcgattcgtcgcaatcctcgccctcactcgcgtgttcagttcttggtagcttccttgcggctctgaacaaatttattgctgatcgttattcttggaatcactcagtatcagaatatcatgtatacgagttctttaagatatggaactgttctcgagaaagagctaattttcttgtccacgagttcttcacaacccattacttccaagatggcattcatcctattccgggggctcgagatgctctccaaactctttcttctttctgtagcttgtctgtagtaacatctcggcaggatgtaattaagaatcacacattggaatggattgagaagtattatccaggcttatttgagcagatccatttcgggaatcatttcgctttggaaggtcaatcaaggccaaaatcagagatttgcaggtctttcggcgctcaggttctaattgatgacaaccccagatatgctctagagtgtgctaatgatggcatgagggtccttctgttcgattacgaaagctcgtatccttggtgcaaaactggagccgatgaactgcatccgctggtgacaaaggttcacaactgggaagaagtcgaggagaaacttctctcttgggtagtacctgatagctgacactcttctgtcttgtgagaagcactgcttgagaccagcaaatgattccttttgcctggtttctaaaggaacctgatagggtgaaagactgcaatgttcctagagcttgattttcaatacagatgtcgatagcctctccaagagtcattctaaaacccactctaaatcatcatccgaagagtcatttgcataaatttgactccaactccaacagtttttctatatcctgggatatttttcattaaactctctattcacaataattagttaggatatggagagtcttggggatgttgtcaacgtaagctaggatattcagcttcattaccgcagcctggttgaggcatattcgactgtacttggtcagtctgagctgtaggcgcttctgctctcacacatcagaatcttgttttatccttttgccgcagccgggtgtactatgtatatatcgacgctgccatatggctaagatggtatttgaattgttctaatacagaaaactcgtgtgtgtgtgggtccttggaccaactgatttggagcattttcattattgaggttaagcacaaactcgatgagagttcagtctttatatttgcatttccgaatc

SEQ ID NO: 214000 - DNA, 3325 bp, Zea Mays
gctgggaacaagacgggaggcaactgaccgcccgccatcgtgcagccatcgcagatcgggatctcgcggagctgcgattcattcgccagccatcctactcaaacgccacccatctctgagtctttgaccaactgttctgaagatttgagacactgttggagatgggtacaaggatgccaatctttccccgactatcgagcgcactgtccacggcgttgctggagtggatcttgatgctcctgctgttcatcgatgcggtttacagcttcctggtcactagattcgcccgtctctgcagattaccggcgccatgccctttctgctcaaggctcgatcacttcctgggcaacgagaaaccgtgcttctatagggacctgatctgcaaaacccacaagtcggagatttcgtccttggccttctgcagcctccaccagaagctcgcgggagcccgaaatatgtgtgaagggtgctgtggggaagtcgccggtgatgataagacagatgagactgatagcaatcaaagaattggtgatgctttcaattctcctcgtgaaaaagtctgctcgtgctgtggacagcattttaagcgacggagtgtagctttgtcctctagagagactgcagaactagaacctactcgagcgtttggctcaccaaaaacttacacggagtactctgtagtatgtcaagtggatgagcctttggagcctaaagatatataccaccaaagtgactacaggtctaatgagccagacggtctgctacagatgacatctgactctgagactgaggtcccttgtgccattgatgtgagaagttcacaatctcgtgaagccgatgttaagggcgaagacttgcaagaagatccagcttgtgagcaacccgttcttccttcccctgtggtgatcaagaaatctgaaatagtcgtcaggaaggagcctagtgttgaagacacctgcattacatcttcagcgtgtcctgctgtggatgatcatcctaatagcggaggtggtgtggaccagatggaagaaaaagaaagcctatccagaaaatgggcaccccagcacgatcctgtacttgttatagaaaattcaggtttacaagatgctggtatttcacaaattatgccaagtgatgagctaccacaggtttctggtgagactgaaccatctcagagcacaaatgaaggcaacacggatccatataaatctcagttcacaatactagaggagcactatgctgtttcggaagaaggaaatataaaatgtattctggaacaatttgacgtgacagaaattactagcagatcaggtggtgagtttcgtcaaagaagtgcgtcagcagctgattcacatacaaatgcactggtactagagaatactcatcatggtgcttcagaagatgcagaacagaaagataattgtggggatatccgtgtttcacaagtaggtgctggatccaaaacgagtggtgaagttgaagattatactaagaaaattgaacccactggtgacatgggagaacatgaactggtagtacaagatccttctggtagtgctcccaaagatttaatagttaaagattatgtggacgaacctcatgtatcaacaactaccatgagatcgagcggtgaagtacctcaagatcatagtgccaccgaggaaaacccaaaaacaattgacagcattgttgaaaggagaccatctctaagcagtcagattagcattaccctaagatcaagtggtgaagtacttcaagatcatagtgccaccgaggaaaacccaaaaacaagtgaaagtattgttgaaaggagaccatctctaagcagtcagattagcattaccctaagatcgagtggtgaagtacttcaagatcatagtgccaccgaggaaaactcaaaaacaagtgaaagtattgttgaaaggagaccatctctaagcagtcagattagcatgaatgaagcctatagacttgccattggcaacaagggtagcttgacatcccctacattgacggatgtaatccttggaaaggactctacttctagcataaacgaagaactgaggctactgttatcacagatctcagcttccagggggcttgaggcaccatgggccgatccaggccctagcccacgtgcatatggacgtggtgatgagttggtggtgcagaacattaccaatagattatcacttgagaggaatgcttccggtttggagtctctagacggaagcattgttagtgagatggaaggtgaaagcaccattgaccggttgagacggcagattgatcttgatcggaaatcaatacacctactctgcagggaactggaagaagagaggaatgcctcagccattgctgcaagtcaagctctggctatgatcaccaagttgcaggatgagaaggccgcaatgcagatggaagcttcgcattaccaaaggatgatggaagagcaagctgaatatgacagtgaagcggtagcgaaagctaacgagttactcactgaaagagaacagctaattgaagaactggaagttgagctcgaaaactataggagacagtatggaggtggatcaacacagagacgaggcaatcgagtggcttttaaacaagaaaatagggatacaactatgcttgacggtggtggtcttgaagatcctctgattaacacacaacagggcataaattccttggtgggtttggaagaggagagggcatatatagcgactggtttgagaaaattggaacagaagctccaattctactccaacaacagtgtttccgttgagttacccagtccagatgttaaggatgacctctccgacaaagtatatgtcacagaagacttctcgttacactgccaggaaagctcgatggagagcaaggaagctggctcatcgacaactagtggggaggttgatctagttgcagtgcaggaagaaattgcaaagttgaacagaagactgaagacactagaaggagatcgcagttttcttgagcatagcatcaactccctcaggaatggcgacgaaggtttgatgtttatacaggaaattgcttgcaatctgagagaactgcgagcaattgctattggcaaaaaataaaatgcaccaaaatgtgtataatagtcattttctcgaaacttatttgtgcaatagacgccgaatcaacatatgaatcgtgcatcatgtttgtcatataaatgaaaagaaattcttgtaattagacaccagatgttgctgtaattatctttaaattcgtagggttgagatgtaaattggttctatatattatcatgttattatgttaagtttttgctatgaaa

SEQ ID NO: 214001 - DNA, 775 bp, Zea Mays
tccccacccattagaccaccagccgttgcccgttggcttggcttttctcccctcgcaccggagaacgcggccgccgatcccctcccctcccctttcccgccgactgatcccaccaattctgcacccgcgcagttcctgattcgattggcaagcgcaattggccgctcctgaccagacgccggatagggctggatttgattggattggatccccaattgtgtttgccacgtccgtgcgttcgggcgggcgggggagttactttagggtttcggcgggtgcggtcgccgtgtaggcggtagggttttgccatggcggagaagggctgcctcaagcggctccagaaggagtaccacgccctctgcaaggagccgcctccgcagatcgtggctcgcccgctgcccaacgacatactggagtggcactatgtactggaaggaagtaaaggcacaccctttgaaggtggatattattatgggaagctcaaatttccaccggattatccttttaaacctccaagcatcagcatgacaacccctagcggcaggtttgcgccacataaaagaatatgcttgtcaatgagtgactttcatcctgaatcttggaatccaatgtggtctgttgcaagcattctcactgggcttctgtctttcatgatggacgatgcactgacaactggaagcatcaagacgtcagatgcagaaaagagacgtttagcaaaagcttcccttgcttacaattaaccgttacaaacccccttcaggagcagaatgcccat

SEQ ID NO: 214002 - DNA, 1443 bp, Zea Mays
gtcttctggtatgaaaacccatcttggagaccagattctgaatcatgggaacaaatgcttattctggttcgagaagcggtatgaatgtgaggagaggattagattctgtttcatcagacaataggatggcaagaaatgaacggagtaatgatcaagcgggtcctcggagaggttgggacaaagggcagggaccctttaggttcggtgagggtccttctgcccgaagtgcatggcgagcatcaaaagatgaagcaacactggaggctattagagtggctggtgaagataatggaaattcgagggccgctgcaagagttgctattcctgaactggatggagaagctttgaatgatggcaaccaaggggacgaaagaggcccactttgggaggcctggactcgtgcgatggatgctgttcatcttgatgatatggactctgcttatgctgaggttctttcaactggtgatgctgaattacttgtaaagttgatggaacaaacgggaccgattattgatcaactttcaaatgaggttgcaaatgaagtcctacatgcagtgggacagtttctcgtggaagaaagcttctatgatgtagcattaaactggcttcagcagaatcctggcttttcatttggtctagaatgatggtccatcagttttactggattgctcaaggttgaagggggaaactgtagtgaagtatgtgataaatattgatactttctttgtcgaacacatgggttcttatttggtgaaacttgtttttacgttctcctttgtttgcccaatgataattatggtttccacctggagctggacagcagttgactgacctggtaatggaaaacggctctggttatctcggaatacctctggatgcaaagcgggacctcttactgggacttcatgaggctaccgtgattgagctttctgatgattgggagggagcaacacccgtacagataatgaagcagctagcttcatcctggcgcatcgacctgcagcaacttatcaattagggttacattgattgtcgatatatgggttaatttgaatatttgaattgttcgtttccctctggttcttgtctggtctttagctattagtattaggaatattatattgggtggggtggaagtggcactgtgttgaaatggattggttgtattggaaaatatggtattgatgttgtctcaccttcattgaggctagggagcaacgaagaaaaattctaggttgggttttagatctccatcctcgtcctggtcctggtgacggaaaaagtttcctgcggggatcccataaactcttgcccgtatttctttcccatttccgctccacgcggggataaatatctgtcgggatcctggtctccgcttaaattataatcgtgacatactttctttgttattaagacaaaatattgtcatttatatacattgtt

SEQ ID NO: 214003 - DNA, 2981 bp, Zea Mays
tgcctctgcgccgctggaccccggccggcccttcataacttccgctccgtctcctctcctctcttgagtgactctaaccactcgctcgctgcacaccatttactccctcgtatccaccccctgcttcccgctcataaaactcgccacccccaggcccagcagcagagcgagggagcgcattactctgcagcgcggacacgcccggcacggcaagccagccactcttctcgcgtgaagcttagccattcttgcggctgggcaaggaaactgctgaagccactagccggctgcctgctctacggcctccgaaccgaacgaggtgcatcgtgaggaagcagcagcagggggggggggggggggggggcagtggccgggcgggatgacggggagggaggccgtggcttcggcggaggcggagctggatcaggactcggcggcggcggcggccgcggcgcccgtgctgctgagcccgctcagcgagacgctgtggcgcgacagggcggcggcggcggcgggcggggtcctcgtcggggacgtgtcggcgcgcctggcgtggcgcgacctcaccgtgaccgtcgcgctcggcaccggcgacacgcaggccgtgctgcagggcctcacggggcacgccgagcccggcaccatcaccgcgctcatgggcccgtccggctccggcaagtccacgctgctcgacgcgctcgcgggccgcctcgccgccaacgccttcctctccgggaccgtcctcctcaacgggcgcaaggccaacctctccttcggcgccgcggcctacgtgacgcaagacgacaacctgatcggcacgctgacggtgagggagacgatctcgtactcggcgcgactccggctccccgacaagatgccgagggaggagaagcaggctctggtggagggcaccatcgtggagatggggctgcaggactgcgccgacaccgtcgtcggcaactggcacctgagggggatcagcggcggcgagaagcggagggtcagcatcgccctggaaatactcatgcggcccaggctgctgttcctggacgagcctaccagtggccttgacagtgcttcggcgttcttcgtgacgcagacgctgcgagggctggcaagggacggccggaccgtcatagcgtcggtgcaccagccgagcagcgaggttttcttgctgttcgactgcctctaccttctgtcagggggcaggacagtctacttcgggaaggcatcggaggcctgcgagttcttcgcccaggctggcttcccgtgcccgccgatgcgcaacccgtcggaccatttcctccggtgcataaactcggatttcgacaaggtgaaggccactctcaaagggtcgatgaaggcgaggttcgaaaggtccaacgacgacgacccgctggagaagatgacgacgtcggaagcgatgaggaggctcaccagctactaccagcactcgcagtgccacatcaacgcgcagcagaaagtggacgagatggcccggctcaaaggaacggtgctggatccaggaggagggagccaggccagcttcctgatgcaggcgttcacgctcacgaagcgctcgttcgtcaacatgtccagggacttcggctactactggctcaggctcatcatctacatcgtcgtcacgctttgcatcgggactatatacctcaacgttgggaccggatacagctctatcctggcccggggcgcgtgtgcttcgttcatcttcggcttcgtcacgttcatgtccatcggagggtttccgtctttcgtggaggacatgaaggtgttccagagggagaggctgaacgggcactacggcgtgctggcgttcgtcgtcagcaacacggtctcggcgatgccgttcctggtcctcatcaccttcgtgtcgggcacgctgtgctacttcatggtgcgcctgcacccgggcttcacgcactacctcttcttcgtgctggcgctctacgccagcgtcaccgtcgtcgagagcctcatgatggccatcgccagcgtcatccccaacttcctcatgggcatcataatcggcgcagggatccaggggatcttcatgctggtgtcgggttacttcaggcttccgcacgacatccccaagcccttctggaggacgacgagctgcccaggatcccgggggagttcatcctggagaccgtgttccagatcgacgtcgcccgctccaagtggctggacctggccgtgctcttcagcatgatcgtcatctaccgcctgctcttcttcctcatgatcaaggccagcgaggacgtcaccccctggctgcgccgctacgtcgcgcggcgccgggtgcggaaccgtcgccaccgcaagccggacctgcccgcccggacgccgtcgctccgcgggtacgtcgtcgacgcggccagcctgccggacgaccacccgtgacgaaagagcgcgagagaaaacgtacgggcagggatgtcatttcatatcatatcacacagaggctaaaccggatcgagctgataataacacactcactcactagtactgcaataatatgatgttaagttggtatagcaaccgcttaagtgcccgttcggttcttcctgaatgctttactggattggttccggattggaatagttcacaaatttgtattagctcgatgagttggaatgattccggccttcaatctggactaaacgaacagagctgtaatggagtgttgcttgatgcactgctaagatgtacacgtatatgaagagcatgtgaccatcagttctacacatcttgggttggactttgacaccctagggttaagtggtttgcctccaattacttacttaggggcgagttgggaatgtataagatcccttcataaatagggaggatgatttgaccgttgtcatctccctagcacatcatttcatttcatccttcttctataggttctctcattcctctggtatgctattgagttccacatatgattaatttag

SEQ ID NO: 214004 - DNA, 3806 bp, Zea Mays
taacatcagactttcccaagtggaatattgcttagggcaagctccctccatcggggtcgtagagttggagggcccagtccatctgggaggtcccagtgccgcccgctcaccagttaccagccaggccgtcgggaggggagagagagagagagagacgaaaagatcgagacccatacgctcagatcgaagttcgacttctcctctccccctcccccaacctaacagattcgtgtagcacagatccatccgactttgggttgatttcttcctttgctgctgatcagaaagttacagatggatcatgctgaggtctctggtttgttgtgtattggtacacgtgaaacagatgggggtgaagaatcatatgcggctgagtaccctaaaatggatcaggataccaatgcaacgaccaaatttgatgtagtaatggagacttcagcaatgtatactgatcaaatcaacaccaatgcttgcttagatgaatatcacatgtctggaaaacagcctatggaagaaatgggatttggcagtgcacatccctttgaacttccatcagaaggaatggtagctgattctggggaagaaagcatgccatctagccctgacacatctaccagtaattatgatgcgcctggttacacggagcaaaatctgcagcatatctataattcgtatgatgcactggttgacaaagacggagttgtgcttactcctgccttcatgatatgtgacaaaactttgtatcttgaacctcacctcactttctcattggacgggatcaagattgagtatttggatttagattcctttgaagacgagaagctgtcagctctacaatgggaaatatctaatattatttccatcagttgtaaatggactcgtagtgttggatctgccttaataacactccttgttggatctacagcagaaacaggaaatgcaggtcctgttagagcacgattttctcttgatgattcgcaatggccaaggagacaacagaggatttgggaactgggaccaagatatcaagaaatatggaaagacatcccatcagatgattttgcattggagaattggagcatcgaaccctgtctgtttttccctaggcaatacttttccagcactgaggactttgaagatgttatttatccccaaggagatcctgatgctgtttctattagcaaaagagatgttgagctcctgcttcctgaaacctttgtcaatgatacaataattgacttttatatcaagtacttgagcacaagaattgaatctaccaagaagcgcaggtgccacttctttaatagcttcttttttcgcaagctggcagatcttgacaaagatcaggggagagctccagaaggtagagcagccttcttgcgtgttcgcaaatggacccgcaaaataaatgtatttgacaaagattttctgttcattccagtcaacttcaacttgcattggagtttaattgttatttgctatcctggcgaagtggcgacatttgaagatggtgatgccaagctctcagctaaactcccatgcattttacacatggattcacttaaaggaagtcacactggactcaaggatatcattcaaagttatttatgggaagagtggaaggaaagacaccctgaatcagcatcagataattcagacaagttcttaaacttgagatttgtctcccttgagctccctcagcaggataattcatatgattgtggcttattcttgctccattatgtggaattatttttgacagatgctccaagtaacttcaaccctctgaagattgatgtattttctggctttcttagtgatgattggtttccacccccagaagcttctctgaagcgttcggtggtccgaaagttaattcatgagctggtaactggatcttttcagaatcatcccaagctagcttgtggtggtgagcagcttgacgaaagacatcaaagatgctcaaatcctggtgaacctgaaacagtttgcacagttgatgatggaactccatgaagtacagccatccaagtccatctgtttatatgattccaaagaggggctacctacttctggatgcatgttggacactggaagtgtcccaattgttgatgtacagaatctacaagagtcagaggtttgtgcaccagtgaaggatactgttgtttgcttgtcaatccaggatgagaaaaatgacccacttgcatctaacagtcaacttaatatgagatcatattccccagaaggtgatggcgtgattaaggaatcaaatcgtgtggtgacagataaggaaaatgataagtctttgtttctttctttggataatgaccaaaaagttcacagccaagcagaagctgaggtgcaggatattatggttcgtactagctgctcaatatctgaaattttagctcagaaaattaccagcaaagaacagccctcccaaaaaagcatagaagttggggatgagtgctttagaccttctcaagatatggattatgttatgatgtttgactccagcaaagatgagaatggaccaaatccagaaagattgacagctgaaggtgattgtggcgatcctcatgaacgtctggatttagtcacagtaggtgatatcggaaaaatggttgtagacaatgcaatcatcgaagatgtgaagagtaataacacaactgcaaacaatgtcaatcacggtgagctgcatgtttcattgcagttgccagagggaaacactgacaatggtatgactggtgttagcacagcttcctctttagacataaaagagggaaacaatgacaaagtagtggcagatgcctctgcacatgaaggtgatataaatgacaatggtagctctgaattgaaaataggaaatacgaacagtggtattactggtgttatcgcagcttcctcagacttaaaagaggaaaatattgacaaagtagtggcaggtgactgtgcacatgaaagtgatataaatgctaaggattgcactgagttgaacattggaaatactgataatagtattgctggtgatagtacagtttcccctgaggtgagcgcggaaaacactgatcaaatcatagcaggtgattgtggaaatgaaaccgatttaaaagctgatggtgagggtgctgacaaattcttagcaactgacagtgctcttccttgtgaagatgatgcaacttgcatggatggtgcgaatgtgattgtatcactagatgtaccccgtagcacgaagaatgatacattttccaagaacacatcttctgacgctgaaatgcctctgcctgttggaacctgtgagctcgtcgatagaccttcttccgagaatgacatgtctgagcacacatcttttgatggtaaacggcctgcggatgataggactttggaagagaacgaaatggttatgcctggtgatgaaaaaacagaggtgcattacaagcgacggaaggttttggcctcagagaaacaaagcagcttctccggagcaacttctacagattaggtttggctggtgtgagacttagttttagtttctgggatatgtgacctgtctagtccttgacaatatgctgcctgtgatatagtatatatttctgtaatataaggtactgccactaatgactgtagaaataacaaaaagaactggaatcctgaaccctgatgtctgcttgacagcgtggtttgagaattgagatactgtatatggtctgagtattgcacgacctgcactgcacatgcaagttgcacgatataggctgtttccaaacatgtggaaggccttgtttacctgattagttgggatagac

SEQ ID NO: 214005 - DNA, 3614 bp, Zea Mays
taacatcagactttcccaagtggaatattgcttagggcaagctccctccatcggtccgtctctctcagcttcttcgtcttctctcttaggttgacctctttgcctcaactgcgccgcccgctcaccaagccaggcagaggctgcaggggtcgtagagttggagggcccagtccatctgggaggtcccagtgccgcccgctcaccagttaccagccaggccgtcgggaggggagagagagagagagagacgaaaagatcgagacccatacgctcagatcgaagttcgacttctcctctccccctcccccaacctaacagattcgtgtagcacagatccatccgactttgggttgatttcttcctttgctgctgatcagaaagttacagatggatcatgctgaggtctctggtttgttgtgtattggtacacgtgaaacagatgggggtgaagaatcatatgcggctgagtaccctaaaatggatcaggataccaatgcaacgaccaaatttgatgtagtaatggagacttcagcaatgtatactgatcaaatcaacaccaatgcttgcttagatgaatatcacatgtctggaaaacagcctatggaagaaatgggatttggcagtgcacatccctttgaacttccatcagaaggaatggtagctgattctggggaagaaagcatgccatctagccctgacacatctaccagtaattatgatgcgcctggttacacggagcaaaatctgcagcatatctataattcgtatgatgcactggttgacaaagacggagttgtgcttactcctgccttcatgatatgtgacaaaactttgtatcttgaacctcacctcactttctcattggacgggatcaagattgagtatttggatttagattcctttgaagacgagaagctgtcagctctacaatgggaaatatctaatattatttccatcagttgtaaatggactcgtagtgttggatctgccttaataacactccttgttggatctacagcagaaacaggaaatgcaggtcctgttagagcacgattttctcttgatgattcgcaatggccaaggagacaacagaggatttgggaactgggaccaagatatcaagaaatatggaaagacatcccatcagatgattttgcattggagaattggagcatcgaaccctgtctgtttttccctaggcaatacttttccagcactgaggactttgaagatgttatttatccccaaggagatcctgatgctgtttctattagcaaaagagatgttgagctcctgcttcctgaaacctttgtcaatgatacaataattgacttttatatcaagtacttgagcacaagaattgaatctaccaagaagcgcaggtgccacttctttaatagcttcttttttcgcaagctggcagatcttgacaaagatcaggggagagctccagaaggtagagcagccttcttgcgtgttcgcaaatggacccgcaaaataaatgtatttgacaaagattttctgttcattccagtcaacttcaacttgcattggagtttaattgttatttgctatcctggcgaagtggcgacatttgaagatggtgatgccaagctctcagctaaactcccatgcattttacacatggattcacttaaaggaagtcacactggactcaaggatatcattcaaagttatttatgggaagagtggaaggaaagacaccctgaatcagcatcagataattcagacaagttcttaaacttgagatttgtctcccttgagctccctcagcaggataattcatatgattgtggcttattcttgctccattatgtggaattatttttgacagatgctccaagtaacttcaaccctctgaagattgatgtattttctggctttcttagtgatgattggtttccacccccagaagcttctctgaagcgttcggtggtccgaaagttaattcatgagctggtaactggatcttttcagaatcatcccaagctagcttgtggtggtgagcagcttgacgaaagacatcaaagatgctcaaatcctggtgaacctgaaacagtttgcacagttgatgatggaactccatgaagtacagccatccaagtccatctgtttatatgattccaaagaggggctacctacttctggatgcatgttggacactggaagtgtcccaattgttgatgtacagaatctacaagagtcagaggtttgtgcaccagtgaaggatactgttgtttgcttgtcaatccaggatgagaaaaatgacccacttgcatctaacagtcaacttaatatgagatcatattccccagaaggtgatggcgtgattaaggaatcaaatcgtgtggtgacagataaggaaaatgataagtctttgtttctttctttggataatgaccaaaaagttcacagccaagcagaagctgaggtgcaggatattatggttcgtactagctgctcaatatctgaaattttagctcagaaaattaccagcaaagaacagccctcccaaaaaagcatagaagttggggatgagtgctttagaccttctcaagatatggattatgttatgatgtttgactccagcaaagatgagaatggaccaaatccagaaagattgacagctgaaggtgattgtggcgatcctcatgaacgtctggatttagtcacagtaggtgatatcggaaaaatggttgtagacaatgcaatcatcgaagatgtgaagagtaataacacaactgcaaacaatgtcaatcacggtgagctgcatgtttcattgcagttgccagagggaaacactgacaatggtatgactggtgttagcacagcttcctctttagacataaaagagggaaacaatgacaaagtagtggcagatgcctctgcacatgaaggtgatataaatgacaatggtagctctgaattgaaaataggaaatacgaacagtggtattactggtgttatcgcagcttcctcagacttaaaagaggaaaatattgacaaagtagtggcaggtgactgtgcacatgaaagtgatataaatgctaaggattgcactgagttgaacattggaaatactgataatagtattgctggtgatagtacagtttcccctgaggtgagcgcggaaaacactgatcaaatcatagcaggtgattgtggaaatgaaaccgatttaaaagctgatggtgagggtgctgacaaattcttagcaactgacagtgctcttccttgtgaagatgatgcaacttgcatggatggtgcgaatgtgattgtatcactagatgtaccccgtagcacgaagaatgatacattttccaagaacacatcttctgacgctgaaatgcctctgcctgttggaacctgtgagctcgtcgatagaccttcttccgagaatgacatgtctgagcacacatcttttgatggtaaacggcctgcggatgataggactttggaagagaacgaaatggttatgcctggtgatgaaaaaacagaggtgcattacaagcgacggaaggttttggcctcagagaaacaaagcagcttctccggagcaacttctacagattaggctagaatcaataagctat

SEQ ID NO: 214006 - DNA, 3819 bp, Zea Mays
ctttcccaagtggaatattgcttagggcaagctccctccatcggtccgtctctctcagcttcttcgtcttctctcttaggttgacctctttgcctcaactgcgccgcccgctcaccaagccaggcagaggctgcaggggtcgtagagttggagggcccagtccatctgggaggtcccagtgccgcccgctcaccagttaccagccaggccgtcgggaggggagagagagagagagagacgaaaagatcgagacccatacgctcagatcgaagttcgacttctcctctccccctcccccaacctaacagattcgtgtagcacagatccatccgactttgggttgatttcttcctttgctgctgatcagaaagttacagatggatcatgctgaggtctctggtttgttgtgtattggtacacgtgaaacagatgggggtgaagaatcatatgcggctgagtaccctaaaatggatcaggataccaatgcaacgaccaaatttgatgtagtaatggagacttcagcaatgtatactgatcaaatcaacaccaatgcttgcttagatgaatatcacatgtctggaaaacagcctatggaagaaatgggatttggcagtgcacatccctttgaacttccatcagaaggaatggtagctgattctggggaagaaagcatgccatctagccctgacacatctaccagtaattatgatgcgcctggttacacggagcaaaatctgcagcatatctataattcgtatgatgcactggttgacaaagacggagttgtgcttactcctgccttcatgatatgtgacaaaactttgtatcttgaacctcacctcactttctcattggacgggatcaagattgagtatttggatttagattcctttgaagacgagaagctgtcagctctacaatgggaaatatctaatattatttccatcagttgtaaatggactcgtagtgttggatctgccttaataacactccttgttggatctacagcagaaacaggaaatgcaggtcctgttagagcacgattttctcttgatgattcgcaatggccaaggagacaacagaggatttgggaactgggaccaagatatcaagaaatatggaaagacatcccatcagatgattttgcattggagaattggagcatcgaaccctgtctgtttttccctaggcaatacttttccagcactgaggactttgaagatgttatttatccccaaggagatcctgatgctgtttctattagcaaaagagatgttgagctcctgcttcctgaaacctttgtcaatgatacaataattgacttttatatcaagtacttgagcacaagaattgaatctaccaagaagcgcaggtgccacttctttaatagcttcttttttcgcaagctggcagatcttgacaaagatcaggggagagctccagaaggtagagcagccttcttgcgtgttcgcaaatggacccgcaaaataaatgtatttgacaaagattttctgttcattccagtcaacttcaacttgcattggagtttaattgttatttgctatcctggcgaagtggcgacatttgaagatggtgatgccaagctctcagctaaactcccatgcattttacacatggattcacttaaaggaagtcacactggactcaaggatatcattcaaagttatttatgggaagagtggaaggaaagacaccctgaatcagcatcagataattcagacaagttcttaaacttgagatttgtctcccttgagatgctccaagtaacttcaaccctctgaagattgatgtattttctggctttcttagtgatgattggtttccacccccagaagcttctctgaagcgttcggtggtccgaaagttaattcatgagctggtaactggatcttttcagaatcatcccaagctagcttgtggtggtgagcagcttgacgaaagacatcaaagatgctcaaatcctggtgaacctgaaacagtttgcacagttgatgatggaactccatgaagtacagccatccaagtccatctgtttatatgattccaaagaggggctacctacttctggatgcatgttggacactggaagtgtcccaattgttgatgtacagaatctacaagagtcagaggtttgtgcaccagtgaaggatactgttgtttgcttgtcaatccaggatgagaaaaatgacccacttgcatctaacagtcaacttaatatgagatcatattccccagaaggtgatggcgtgattaaggaatcaaatcgtgtggtgacagataaggaaaatgataagtctttgtttctttctttggataatgaccaaaaagttcacagccaagcagaagctgaggtgcaggatattatggttcgtactagctgctcaatatctgaaattttagctcagaaaattaccagcaaagaacagccctcccaaaaaagcatagaagttggggatgagtgctttagaccttctcaagatatggattatgttatgatgtttgactccagcaaagatgagaatggaccaaatccagaaagattgacagctgaaggtgattgtggcgatcctcatgaacgtctggatttagtcacagtaggtgatatcggaaaaatggttgtagacaatgcaatcatcgaagatgtgaagagtaataacacaactgcaaacaatgtcaatcacggtgagctgcatgtttcattgcagttgccagagggaaacactgacaatggtatgactggtgttagcacagcttcctctttagacataaaagagggaaacaatgacaaagtagtggcagatgcctctgcacatgaaggtgatataaatgacaatggtagctctgaattgaaaataggaaatacgaacagtggtattactggtgttatcgcagcttcctcagacttaaaagaggaaaatattgacaaagtagtggcaggtgactgtgcacatgaaagtgatataaatgctaaggattgcactgagttgaacattggaaatactgataatagtattgctggtgatagtacagtttcccctgaggtgagcgcggaaaacactgatcaaatcatagcaggtgattgtggaaatgaaaccgatttaaaagctgatggtgagggtgctgacaaattcttagcaactgacagtgctcttccttgtgaagatgatgcaacttgcatggatggtgcgaatgtgattgtatcactagatgtaccccgtagcacgaagaatgatacattttccaagaacacatcttctgacgctgaaatgcctctgcctgttggaacctgtgagctcgtcgatagaccttcttccgagaatgacatgtctgagcacacatcttttgatggtaaacggcctgcggatgataggactttggaagagaacgaaatggttatgcctggtgatgaaaaaacagaggtgcattacaagcgacggaaggttttggcctcagagaaacaaagcagcttctccggagcaacttctacagattaggtttggctggtgtgagacttagttttagtttctgggatatgtgacctgtctagtccttgacaatatgctgcctgtgatatagtatatatttctgtaatataaggtactgccactaatgactgtagaaataacaaaaagaactggaatcctgaaccctgatgtctgcttgacagcgtggtttgagaattgagatactgtatatggtctgagtattgcacgacctgcactgcacatgcaagttgcacgatataggctgtttccaaacatgtggaaggccttgtttacctgattagttgggatagac

SEQ ID NO: 214007 - DNA, 3796 bp, Zea Mays
ctttcccaagtggaatattgcttagggcaagctccctccatcggtccgtctctctcagcttcttcgtcttctctcttaggttgacctctttgcctcaactgcgccgcccgctcaccaagccaggcagaggctgcaggggtcgtagagttggagggcccagtccatctgggaggtcccagtgccgcccgctcaccagttaccagccaggccgtcgggaggggagagagagagagagagacgaaaagatcgagacccatacgctcagatcgaagttcgacttctcctctccccctcccccaacctaacagattcgtgtagcacagatccatccgactttgggttgatttcttcctttgctgctgatcagaaagttacagatggatcatgctgaggtctctggtttgttgtgtattggtacacgtgaaacagatgggggtgaagaatcatatgcggctgagtaccctaaaatggatcaggataccaatgcaacgaccaaatttgatgtagtaatggagacttcagcaatgtatactgatcaaatcaacaccaatgcttgcttagatgaatatcacatgtctggaaaacagcctatggaagaaatgggatttggcagtgcacatccctttgaacttccatcagaaggaatggtagctgattctggggaagaaagcatgccatctagccctgacacatctaccagtaattatgatgcgcctggttacacggagcaaaatctgcagcatatctataattcgtatgatgcactggttgacaaagacggagttgtgcttactcctgccttcatgatatgtgacaaaactttgtatcttgaacctcacctcactttctcattggacgggatcaagattgagtatttggatttagattcctttgaagacgagaagctgtcagctctacaatgggaaatatctaatattatttccatcagttgtaaatggactcgtagtgttggatctgccttaataacactccttgttggatctacagcagaaacaggaaatgcaggtcctgttagagcacgattttctcttgatgattcgcaatggccaaggagacaacagaggatttgggaactgggaccaagatatcaagaaatatggaaagacatcccatcagatgattttgcattggagaattggagcatcgaaccctgtctgtttttccctaggcaatacttttccagcactgaggactttgaagatgttatttatccccaaggagatcctgatgctgtttctattagcaaaagagatgttgagctcctgcttcctgaaacctttgtcaatgatacaataattgacttttatatcaagtacttgagcacaagaattgaatctaccaagaagcgcaggtgccacttctttaatagcttcttttttcgcaagctggcagatcttgacaaagatcaggggagagctccagaaggtagagcagccttcttgcgtgttcgcaaatggacccgcaaaataaatgtatttgacaaagattttctgttcattccagtcaacttcaacttgcattggagtttaattgttatttgctatcctggcgaagtggcgacatttgaagatggtgatgccaagctctcagctaaactcccatgcattttacacatggattcacttaaaggaagtcacactggactcaaggatatcattcaaagttatttatgggaagagtggaaggaaagacaccctgaatcagcatcagataattcagacaagttcttaaacttgagatttgtctcccttgagctccctcagcaggataattcatatgattgtggcttattcttgctccattatgtggaattatttttgacagatgctccaagtaacttcaaccctctgaagattgatgtattttctggctttaatcatcccaagctagcttgtggtggtgagcagcttgacgaaagacatcaaagatgctcaaatcctggtgaacctgaaacagtttgcacagttgatgatggaactccatgaagtacagccatccaagtccatctgtttatatgattccaaagaggggctacctacttctggatgcatgttggacactggaagtgtcccaattgttgatgtacagaatctacaagagtcagaggtttgtgcaccagtgaaggatactgttgtttgcttgtcaatccaggatgagaaaaatgacccacttgcatctaacagtcaacttaatatgagatcatattccccagaaggtgatggcgtgattaaggaatcaaatcgtgtggtgacagataaggaaaatgataagtctttgtttctttctttggataatgaccaaaaagttcacagccaagcagaagctgaggtgcaggatattatggttcgtactagctgctcaatatctgaaattttagctcagaaaattaccagcaaagaacagccctcccaaaaaagcatagaagttggggatgagtgctttagaccttctcaagatatggattatgttatgatgtttgactccagcaaagatgagaatggaccaaatccagaaagattgacagctgaaggtgattgtggcgatcctcatgaacgtctggatttagtcacagtaggtgatatcggaaaaatggttgtagacaatgcaatcatcgaagatgtgaagagtaataacacaactgcaaacaatgtcaatcacggtgagctgcatgtttcattgcagttgccagagggaaacactgacaatggtatgactggtgttagcacagcttcctctttagacataaaagagggaaacaatgacaaagtagtggcagatgcctctgcacatgaaggtgatataaatgacaatggtagctctgaattgaaaataggaaatacgaacagtggtattactggtgttatcgcagcttcctcagacttaaaagaggaaaatattgacaaagtagtggcaggtgactgtgcacatgaaagtgatataaatgctaaggattgcactgagttgaacattggaaatactgataatagtattgctggtgatagtacagtttcccctgaggtgagcgcggaaaacactgatcaaatcatagcaggtgattgtggaaatgaaaccgatttaaaagctgatggtgagggtgctgacaaattcttagcaactgacagtgctcttccttgtgaagatgatgcaacttgcatggatggtgcgaatgtgattgtatcactagatgtaccccgtagcacgaagaatgatacattttccaagaacacatcttctgacgctgaaatgcctctgcctgttggaacctgtgagctcgtcgatagaccttcttccgagaatgacatgtctgagcacacatcttttgatggtaaacggcctgcggatgataggactttggaagagaacgaaatggttatgcctggtgatgaaaaaacagaggtgcattacaagcgacggaaggttttggcctcagagaaacaaagcagcttctccggagcaacttctacagattaggtttggctggtgtgagacttagttttagtttctgggatatgtgacctgtctagtccttgacaatatgctgcctgtgatatagtatatatttctgtaatataaggtactgccactaatgactgtagaaataacaaaaagaactggaatcctgaaccctgatgtctgcttgacagcgtggtttgagaattgagatactgtatatggtctgagtattgcacgacctgcactgcacatgcaagttgcacgatataggctgtttccaaacatgtggaaggccttgtttacctgattagttgggatagac

SEQ ID NO: 214008 - DNA, 948 bp, Zea Mays
gcatttgtgagtgagaccaggaagaggcattggtcggacccgcgtggttctcccgtgtcctctctctctagtgtcgacgagtgggcgaacgccgccaccgccttacgccagtcgccaggcgctcaggttttcatcttcgggcccttcaccggcgaccagcacccaacaggctttgatgattgctgtacaaggatgatatggcctcccgcccaaagctgtctggtattcagaagcaggttttggcgctgtacaggggattccttcggacagcacgccttaaggcccctgaagaacgccgcaggatcgagtctgttgtctttgcagagttccgtgacaacgcaaggagtgttgaccgtaggaactttgtacacatagagtacttgttgaggagagggaagaagcagcttgagcagctcaagaatcctgatattactggactcgctacccttgtagtaaagaaatgaggtccattcattgccagaacaaagtatcatcatgataccggtgtttctaatgtgaagatttggaacctgccactgatggtgtccaaataaaataaatatgaccacagattacagatttgatatccagggactttctaatcagcctattagaatctgaagataaatcttgtagcacctgtccggtgacccatagtaatattattttactcttgctgtaagcagaggttaacactaaaaaaagtattgtgattggtctgaactttttgtgcggtataaagcatgtgattcagctcaacttgacttttccaactttaccgagcatatacaattgtgattaatatagaggctcttaaggtgtttaaatgtgctatttacaaaaaaaaatcgtagagtcgtctatgaatttatcgtctgttttatcgatctaatgttgtatatgtgtatttacttctgtatttattaatagattatatttatagacacg

SEQ ID NO: 214009 - DNA, 942 bp, Zea Mays
aagaggcattggtcggacccgcgtggttctcccgtgtcctctctctctagtgtcgacgagtgggcgaacgccgccaccgccttacgccagtcgccaggcgctcaggttttcatcttcgggcccttcaccggcgaccagcacccaacagttacatgtgcatcaggctttgatgattgctgtacaaggatgatatggcctcccgcccaaagctgtctggtattcagaagcaggttttggcgctgtacaggggattccttcggacagcacgccttaaggcccctgaagaacgccgcaggatcgagtctgttgtctttgcagagttccgtgacaacgcaaggagtgttgaccgtaggaactttgtacacatagagtacttgttgaggagagggaagaagcagcttgagcagctcaagaatcctgatattactggactcgctacccttgtagtaaagaaatgaggtccattcattgccagaacaaagtatcatcatgataccggtgtttctaatgtgaagatttggaacctgccactgatggtgtccaaataaaataaatatgaccacagattacagatttgatatccagggactttctaatcagcctattagaatctgaagataaatcttgtagcacctgtccggtgacccatagtaatattattttactcttgctgtaagcagaggttaacactaaaaaaagtattgtgattggtctgaactttttgtgcggtataaagcatgtgattcagctcaacttgacttttccaactttaccgagcatatacaattgtgattaatatagaggctcttaaggtgtttaaatgtgctatttacaaaaaaaaatcgtagagtcgtctatgaatttatcgtctgttttatcgatctaatgttgtatatgtgtatttacttctgtatttattaatagattatatttatagacacg

SEQ ID NO: 214010 - DNA, 945 bp, Zea Mays
cgcgtggttctcccgtgtcctctctctctagtgtcgacgagtgggcgaacgccgccaccgccttacgccagtcgccaggcgctcaggttttcatcttcgggcccttcaccggcgaccagcacccaacagttacatgtgcatcaggctttgatgattgctgtacaaggatgatatggcctcccgcccaaagctgtctggtattcagaagcaggttttggcgctgtacaggggattccttcggacagcacgccttaaggcccctgaagaacgccgcaggatcgagtctgttgtctttgcagagttccgtgacaacgcaaggagtgttgaccgtaggaactttgtacacatagagtacttgttgaggagagggaagaagcagcttgagcagctcaagaatcctgatattactggactcgctacccttgtagtaaagaaatgagcaacagttgtcgaaatttacaggtccattcattgccagaacaaagtatcatcatgataccggtgtttctaatgtgaagatttggaacctgccactgatggtgtccaaataaaataaatatgaccacagattacagatttgatatccagggactttctaatcagcctattagaatctgaagataaatcttgtagcacctgtccggtgacccatagtaatattattttactcttgctgtaagcagaggttaacactaaaaaaagtattgtgattggtctgaactttttgtgcggtataaagcatgtgattcagctcaacttgacttttccaactttaccgagcatatacaattgtgattaatatagaggctcttaaggtgtttaaatgtgctatttacaaaaaaaaatcgtagagtcgtctatgaatttatcgtctgttttatcgatctaatgttgtatatgtgtatttacttctgtatttattaatagattatatttatagacacg

SEQ ID NO: 214011 - DNA, 930 bp, Zea Mays
cgcgtggttctcccgtgtcctctctctctagtgtcgacgagtgggcgaacgccgccaccgccttacgccagtcgccaggcgctcaggttttcatcttcgggcccttcaccggcgaccagcacccaacaggctttgatgattgctgtacaaggatgatatggcctcccgcccaaagctgtctggtattcagaagcaggttttggcgctgtacaggggattccttcggacagcacgccttaaggcccctgaagaacgccgcaggatcgagtctgttgtctttgcagagttccgtgacaacgcaaggagtgttgaccgtaggaactttgtacacatagagtacttgttgaggagagggaagaagcagcttgagcagctcaagaatcctgatattactggactcgctacccttgtagtaaagaaatgagcaacagttgtcgaaatttacaggtccattcattgccagaacaaagtatcatcatgataccggtgtttctaatgtgaagatttggaacctgccactgatggtgtccaaataaaataaatatgaccacagattacagatttgatatccagggactttctaatcagcctattagaatctgaagataaatcttgtagcacctgtccggtgacccatagtaatattattttactcttgctgtaagcagaggttaacactaaaaaaagtattgtgattggtctgaactttttgtgcggtataaagcatgtgattcagctcaacttgacttttccaactttaccgagcatatacaattgtgattaatatagaggctcttaaggtgtttaaatgtgctatttacaaaaaaaaatcgtagagtcgtctatgaatttatcgtctgttttatcgatctaatgttgtatatgtgtatttacttctgtatttattaatagattatatttatagacacg

SEQ ID NO: 214012 - DNA, 2662 bp, Zea Mays
ctctctgtctgcgacgactgggtggtctaccgccgttgtcttctccggcgaagagcgcccaccaggaaggattggtaattggatgaaattgagtttgcgccccagttttgggagattatgttgacctaggatcagataaccatgtgctgatgcaatggacacccttcatagcgacccttattccaggagcagcttgcaactgcaaattagggatggctccatgtcctttgagaacaacagtgcagttttggataaacatgaggttgtcagccctcgagttggcatgacctttgagacggttgatctggcatatcaattctacttagagtatggctatcgtgcaggctttggggtctcaaagagaacttcccacagtgttgatggggttaaataccgtgctacatttgtttgttacaaaggtggcatagctaggattaagcctggcctcaaagctcgaaggaggcttgttgcaaagactggttgcaaagcaatgatggtagtgaagtttaatgccagtgagaaccattgggaagtggtttttgtcgagttggaacataaccacccatgcaatcctgagatggtcagattcatgatgtgctttaaagaccttcctgactggcaaagggagcaccgcccattcaatgccaaaactcgattgaacccgaagattcactctggtagaggcaggccacccaaccaaaacaaagatttcatggtgagatccttctcccagtcaaattattccatcgatggggcagggaagactggaaagttaaggtttgcagagggtgacgttgaagcactcttagttttttttgataagatgcaagctcaaaactccaacttcttctataactgggacatggacgatgaaggtcgtctcaagaacgtttgctgggttgatgctagatccagagttgcatatcaacacttctgtgatgttatttgctttgatactgtctatttgacatatcagtttgtcattccattggtcgcatttttgggaatcaaccatcatgggcagtttgtgttgttaggatgtggtctacttggagacgagtctccagagacctttgcgtggttattcaaaaaatggctaaaatgtatgaatgataaatcacctgaagcaattgttacgactcattcaaggccagtagtcaaagcagtcagtgaagtatttccaaatactcggcacagatacaacctttggcatataatgaaagaacttcctgaaatgtctggaagagttgaggataaagaagcagtcagtctgagaatgaaaaaagtagtctatgatacaattacatcagctgattttgagagggagtgggctgaaatgatcaaccaatataatctccatgataaccagtggcttacaaccttgtttgaagagagggcaaaatgggtaccagcatatgtaaaggatactttttgggctggtatctccactgttcgccgtagtgaacgattggaggccttttttgatggatatattacaccagaaaccacaataaagacgttcattgaacaattcgatactgctatgaagctcaggtctgatcgagaagcctatgatgatttccgttcatttcaacaaaggccacaagtcctgtctggtcttctgtttgaggagcaatttgcaaatgtttatacaataaatatgttccagaaattccaggatcagttgaagcagctgatgaatgtgaattgcactgaagtcagtaggaatggttcaatagtgacatacacggtgacagtaattggaaaggagaggaagtttgactacagagtgatgtataacagtgctgagaaagaagtgtggtgcatctgcaggtcattccagtttaaaggtattttatgtagccatgctcttgctgtcttgaagcaagagcttgtgatgctaatacctcccaaatatattcttgatcgatggcgaaaggactacaaatgccctgaggaacctaaggaaacccccatttcacagaaagctgctaaagatacagggaagggctcaaaaccagaaaacattcgggaagatcaagtggacaatctctacaagcatggacaccagtactttgctgacattgtggaaatgggagctactgaccctgatgcgatggaatacgtcctttctgtgatgaaagaagctaaagagaaagtgcgcaagtttgaggagtctcgaaaagagaagaggcctggagagggtccagtttctgctggtaaaaaaggggcgaagttttcgaagccatccacacaagaagttggcaatacaacatcagtttcgactccgactgaagcagtggcttcggtcacagtggtgtcatctcctccaatggcggcagccccaacaatgatggctatggcgccaccttcagcagctgtggccggaggaatgtttttagtaccaatgcacccgcatcccttggtgttcccacccttcccccctgcagtcccaccagcggtagctcctgtagcaccacctgctgcaccagcaaccaatgttgtctccaacacctcaaagaagcgaaagaaaagaaaggggaataattgatcttctgatgctgatgaaatgatgaatctaaaacaagatcagatcggcgaagtagaaaatgagtttgatctcacactacgcatcaggcctcgacatgagagtgagctatcg

SEQ ID NO: 214013 - DNA, 3041 bp, Zea Mays
attaactctggaaagtgcgtggtatgcactttacactagctggtaacagattatgttgacctaggatcagataaccatgtgctgatgcaatggacacccttcatagcgacccttattccaggagcagcttgcaactgcaaattagggatggctccatgtcctttgagaacaacagtgcagttttggataaacatgaggttgtcagccctcgagttggcatgacctttgagacggttgatctggcatatcaattctacttagagtatggctatcgtgcaggctttggggtctcaaagagaacttcccacagtgttgatggggttaaataccgtgctacatttgtttgttacaaaggtggcatagctaggattaagcctggcctcaaagctcgaaggaggcttgttgcaaagactggttgcaaagcaatgatggtagtgaagtttaatgccagtgagaaccattgggaagtggtttttgtcgagttggaacataaccacccatgcaatcctgagatggtcagattcatgatgtgctttaaagaccttcctgactggcaaagggagcaccgcccattcaatgccaaaactcgattgaacccgaagattcactctggtagaggcaggccacccaaccaaaacaaagatttcatggtgagatccttctcccagtcaaattattccatcgatggggcagggaagactggaaagttaaggtttgcagagggtgacgttgaagcactcttagttttttttgataagatgcaagctcaaaactccaacttcttctataactgggacatggacgatgaaggtcgtctcaagaacgtttgctgggttgatgctagatccagagttgcatatcaacacttctgtgatgttatttgctttgatactgtctatttgacatatcagtttgtcattccattggtcgcatttttgggaatcaaccatcatgggcagtttgtgttgttaggatgtggtctacttggagacgagtctccagagacctttgcgtggttattcaaaaaatggctaaaatgtatgaatgataaatcacctgaagcaattgttacgactcattcaaggccagtagtcaaagcagtcagtgaagtatttccaaatactcggcacagatacaacctttggcatataatgaaagaacttcctgaaatgtctggaagagttgaggataaagaagcagtcagtctgagaatgaaaaaagtagtctatgatacaattacatcagctgattttgagagggagtgggctgaaatgatcaaccaatataatctccatgataaccagtggcttacaaccttgtttgaagagagggcaaaatgggtaccagcatatgtaaaggatactttttgggctggtatctccactgttcgccgtagtgaacgattggaggccttttttgatggatatattacaccagaaaccacaataaagacgttcattgaacaattcgatactgctatgaagctcaggtctgatcgagaagcctatgatgatttccgttcatttcaacaaaggccacaagtcctgtctggtcttctgtttgaggagcaatttgcaaatgtttatacaataaatatgttccagaaattccaggatcagttgaagcagctgatgaatgtgaattgcactgaagtcagtaggaatggttcaatagtgacatacacggtgacagtaattggaaaggagaggaagtttgactacagagtgatgtataacagtgctgagaaagaagtgtggtgcatctgcaggtcattccagtttaaaggtattttatgtagccatgctcttgctgtcttgaagcaagagcttgtgatgctaatacctcccaaatatattcttgatcgatggcgaaaggactacaaatgccctgaggaacctaaggaaacccccatttcacagaaagctgctaaagatacagggaagggctcaaaaccagaaaacattcgggaagatcaagtggacaatctctacaagcatggacaccagtactttgctgacattgtggaaatgggagctactgaccctgatgcgatggaatacgtcctttctgtgatgaaagaagctaaagagaaagtgcgcaagtttgaggagtctcgaaaagagaagaggcctggagagggtccagtttctgctggtaaaaaaggggcgaagttttcgaagccatccacacaagaagttggcaatacaacatcagtttcgactccgactgaagcagtggcttcggtcacagtggtgtcatctcctccaatggcggcagccccaacaatgatggctatggcgccaccttcagcagctgtggccggaggaatgtttttagtaccaatgcacccgcatcccttggtgttcccacccttcccccctgcagtcccaccagcggtagctcctgtagcaccacctgctgcaccagcaaccaatgttgtctccaacacctcaaagaagcgaaagaaaagaaaggggaataattgatcttctgatgctgatgaaatgatgaatctaaaacaagatcagatcggcgaagtagaaaatgagtttgatctcacactacgcatcaggcctcgacatgagagtgagctatcgatttatctcttctgcgcgggttggtctttcgagaaaaatctcttctgcgcgggttggtctttcgagaaaaatctcttctgctggctgtgctactgctacctatgagactacctactgcagtctgcatattcctggggtgttggcttcactgcttcagctagatgctctgctgtggctgacgcagttcagtctaaggagagatgcattttgggctcagcacactgatcttgattactgtagattactagattagattgcctgtagtgtacattatcgtcctcagtgccggaagtaatctaacatgtagtccagcttatgaatgtaaagatctgtttctgattatggattgcatttatggggaaggatctggatcttattaagaaattctgatttacaagcatttgccgtcatttgagtttattggactatactctttccatttgg

SEQ ID NO: 214014 - DNA, 3072 bp, Zea Mays
ctctctctctgtctgcgacgactgggtggtctaccgccgttgtcttctccggcgaagagcgcccaccagattatgttgacctaggatcagataaccatgtgctgatgcaatggacacccttcatagcgacccttattccaggagcagcttgcaactgcaaattagggatggctccatgtcctttgagaacaacagtgcagttttggataaacatgaggttgtcagccctcgagttggcatgacctttgagacggttgatctggcatatcaattctacttagagtatggctatcgtgcaggctttggggtctcaaagagaacttcccacagtgttgatggggttaaataccgtgctacatttgtttgttacaaaggtggcatagctaggattaagcctggcctcaaagctcgaaggaggcttgttgcaaagactggttgcaaagcaatgatggtagtgaagtttaatgccagtgagaaccattgggaagtggtttttgtcgagttggaacataaccacccatgcaatcctgagatggtcagattcatgatgtgctttaaagaccttcctgactggcaaagggagcaccgcccattcaatgccaaaactcgattgaacccgaagattcactctggtagaggcaggccacccaaccaaaacaaagatttcatggtgagatccttctcccagtcaaattattccatcgatggggcagggaagactggaaagttaaggtttgcagagggtgacgttgaagcactcttagttttttttgataagatgcaagctcaaaactccaacttcttctataactgggacatggacgatgaaggtcgtctcaagaacgtttgctgggttgatgctagatccagagttgcatatcaacacttctgtgatgttatttgctttgatactgtctatttgacatatcagtttgtcattccattggtcgcatttttgggaatcaaccatcatgggcagtttgtgttgttaggatgtggtctacttggagacgagtctccagagacctttgcgtggttattcaaaaaatggctaaaatgtatgaatgataaatcacctgaagcaattgttacgactcattcaaggccagtagtcaaagcagtcagtgaagtatttccaaatactcggcacagatacaacctttggcatataatgaaagaacttcctgaaatgtctggaagagttgaggataaagaagcagtcagtctgagaatgaaaaaagtagtctatgatacaattacatcagctgattttgagagggagtgggctgaaatgatcaaccaatataatctccatgataaccagtggcttacaaccttgtttgaagagagggcaaaatgggtaccagcatatgtaaaggatactttttgggctggtatctccactgttcgccgtagtgaacgattggaggccttttttgatggatatattacaccagaaaccacaataaagacgttcattgaacaattcgatactgctatgaagctcaggtctgatcgagaagcctatgatgatttccgttcatttcaacaaaggccacaagtcctgtctggtcttctgtttgaggagcaatttgcaaatgtttatacaataaatatgttccagaaattccaggatcagttgaagcagctgatgaatgtgaattgcactgaagtcagtaggaatggttcaatagtgacatacacggtgacagtaattggaaaggagaggaagtttgactacagagtgatgtataacagtgctgagaaagaagtgtggtgcatctgcaggtcattccagtttaaaggtattttatgtagccatgctcttgctgtcttgaagcaagagcttgtgatgctaatacctcccaaatatattcttgatcgatggcgaaaggactacaaatgccctgaggaacctaaggaaacccccatttcacagaaagctgctaaagatacagggaagggctcaaaaccagaaaacattcgggaagatcaagtggacaatctctacaagcatggacaccagtactttgctgacattgtggaaatgggagctactgaccctgatgcgatggaatacgtcctttctgtgatgaaagaagctaaagagaaagtgcgcaagtttgaggagtctcgaaaagagaagaggcctggagagggtccagtttctgctggtaaaaaaggggcgaagttttcgaagccatccacacaagaagttggcaatacaacatcagtttcgactccgactgaagcagtggcttcggtcacagtggtgtcatctcctccaatggcggcagccccaacaatgatggctatggcgccaccttcagcagctgtggccggaggaatgtttttagtaccaatgcacccgcatcccttggtgttcccacccttcccccctgcagtcccaccagcggtagctcctgtagcaccacctgctgcaccagcaaccaatgttgtctccaacacctcaaagaagcgaaagaaaagaaaggggaataattgatcttctgatgctgatgaaatgatgaatgttttccagatctaaaacaagatcagatcggcgaagtagaaaatgagtttgatctcacactacgcatcaggcctcgacatgagagtgagctatcgatttatctcttctgcgcgggttggtctttcgagaaaaatctcttctgcgcgggttggtctttcgagaaaaatctcttctgctggctgtgctactgctacctatgagactacctactgcagtctgcatattcctggggtgttggcttcactgcttcagctagatgctctgctgtggctgacgcagttcagtctaaggagagatgcattttgggctcagcacactgatcttgattactgtagattactagattagattgcctgtagtgtacattatcgtcctcagtgccggaagtaatctaacatgtagtccagcttatgaatgtaaagatctgtttctgattatggattgcatttatggggaaggatctggatcttattaagaaattctgatttacaagcatttgccgtcatttgagtttattggactatactctttccatttgg

SEQ ID NO: 214015 - DNA, 3119 bp, Zea Mays
ggggggggtctctctctctgtctgcgacgactgggtggtctaccgccgttgtcttctccggcgaagagcgcccaccaggaaggattggtaattggatgaaattgagtttgcgccccagttttgggagattatgttgacctaggatcagataaccatgtgctgatgcaatggacacccttcatagcgacccttattccaggagcagcttgcaactgcaaattagggatggctccatgtcctttgagaacaacagtgcagttttggataaacatgaggttgtcagccctcgagttggcatgacctttgagacggttgatctggcatatcaattctacttagagtatggctatcgtgcaggctttggggtctcaaagagaacttcccacagtgttgatggggttaaataccgtgctacatttgtttgttacaaaggtggcatagctaggattaagcctggcctcaaagctcgaaggaggcttgttgcaaagactggttgcaaagcaatgatggtagtgaagtttaatgccagtgagaaccattgggaagtggtttttgtcgagttggaacataaccacccatgcaatcctgagatggtcagattcatgatgtgctttaaagaccttcctgactggcaaagggagcaccgcccattcaatgccaaaactcgattgaacccgaagattcactctggtagaggcaggccacccaaccaaaacaaagatttcatggtgagatccttctcccagtcaaattattccatcgatggggcagggaagactggaaagttaaggtttgcagagggtgacgttgaagcactcttagttttttttgataagatgcaagctcaaaactccaacttcttctataactgggacatggacgatgaaggtcgtctcaagaacgtttgctgggttgatgctagatccagagttgcatatcaacacttctgtgatgttatttgctttgatactgtctatttgacatatcagtttgtcattccattggtcgcatttttgggaatcaaccatcatgggcagtttgtgttgttaggatgtggtctacttggagacgagtctccagagacctttgcgtggttattcaaaaaatggctaaaatgtatgaatgataaatcacctgaagcaattgttacgactcattcaaggccagtagtcaaagcagtcagtgaagtatttccaaatactcggcacagatacaacctttggcatataatgaaagaacttcctgaaatgtctggaagagttgaggataaagaagcagtcagtctgagaatgaaaaaagtagtctatgatacaattacatcagctgattttgagagggagtgggctgaaatgatcaaccaatataatctccatgataaccagtggcttacaaccttgtttgaagagagggcaaaatgggtaccagcatatgtaaaggatactttttgggctggtatctccactgttcgccgtagtgaacgattggaggccttttttgatggatatattacaccagaaaccacaataaagacgttcattgaacaattcgatactgctatgaagctcaggtctgatcgagaagcctatgatgatttccgttcatttcaacaaaggccacaagtcctgtctggtcttctgtttgaggagcaatttgcaaatgtttatacaataaatatgttccagaaattccaggatcagttgaagcagctgatgaatgtgaattgcactgaagtcagtaggaatggttcaatagtgacatacacggtgacagtaattggaaaggagaggaagtttgactacagagtgatgtataacagtgctgagaaagaagtgtggtgcatctgcaggtcattccagtttaaaggtattttatgtagccatgctcttgctgtcttgaagcaagagcttgtgatgctaatacctcccaaatatattcttgatcgatggcgaaaggactacaaatgccctgaggaacctaaggaaacccccatttcacagaaagctgctaaagatacagggaagggctcaaaaccagaaaacattcgggaagatcaagtggacaatctctacaagcatggacaccagtactttgctgacattgtggaaatgggagctactgaccctgatgcgatggaatacgtcctttctgtgatgaaagaagctaaagagaaagtgcgcaagtttgaggagtctcgaaaagagaagaggcctggagagggtccagtttctgctggtaaaaaaggggcgaagttttcgaagccatccacacaagaagttggcaatacaacatcagtttcgactccgactgaagcagtggcttcggtcacagtggtgtcatctcctccaatggcggcagccccaacaatgatggctatggcgccaccttcagcagctgtggccggaggaatgtttttagtaccaatgcacccgcatcccttggtgttcccacccttcccccctgcagtcccaccagcggtagctcctgtagcaccacctgctgcaccagcaaccaatgttgtctccaacacctcaaagaagcgaaagaaaagaaaggggaataattgatcttctgatgctgatgaaatgatgaatctaaaacaagatcagatcggcgaagtagaaaatgagtttgatctcacactacgcatcaggcctcgacatgagagtgagctatcgatttatctcttctgcgcgggttggtctttcgagaaaaatctcttctgcgcgggttggtctttcgagaaaaatctcttctgctggctgtgctactgctacctatgagactacctactgcagtctgcatattcctggggtgttggcttcactgcttcagctagatgctctgctgtggctgacgcagttcagtctaaggagagatgcattttgggctcagcacactgatcttgattactgtagattactagattagattgcctgtagtgtacattatcgtcctcagtgccggaagtaatctaacatgtagtccagcttatgaatgtaaagatctgtttctgattatggattgcatttatggggaaggatctggatcttattaagaaattctgatttacaagcatttgccgtcatttgagtttattggactatactctttccatttgg

SEQ ID NO: 214016 - DNA, 3109 bp, Zea Mays
ccagcccagatcgatcctccacagcagatagggggggggggggggggtctctctctctgtctgcgacgactgggtggtctaccgccgttgtcttctccggcgaagagcgcccaccagattatgttgacctaggatcagataaccatgtgctgatgcaatggacacccttcatagcgacccttattccaggagcagcttgcaactgcaaattagggatggctccatgtcctttgagaacaacagtgcagttttggataaacatgaggttgtcagccctcgagttggcatgacctttgagacggttgatctggcatatcaattctacttagagtatggctatcgtgcaggctttggggtctcaaagagaacttcccacagtgttgatggggttaaataccgtgctacatttgtttgttacaaaggtggcatagctaggattaagcctggcctcaaagctcgaaggaggcttgttgcaaagactggttgcaaagcaatgatggtagtgaagtttaatgccagtgagaaccattgggaagtggtttttgtcgagttggaacataaccacccatgcaatcctgagatggtcagattcatgatgtgctttaaagaccttcctgactggcaaagggagcaccgcccattcaatgccaaaactcgattgaacccgaagattcactctggtagaggcaggccacccaaccaaaacaaagatttcatggtgagatccttctcccagtcaaattattccatcgatggggcagggaagactggaaagttaaggtttgcagagggtgacgttgaagcactcttagttttttttgataagatgcaagctcaaaactccaacttcttctataactgggacatggacgatgaaggtcgtctcaagaacgtttgctgggttgatgctagatccagagttgcatatcaacacttctgtgatgttatttgctttgatactgtctatttgacatatcagtttgtcattccattggtcgcatttttgggaatcaaccatcatgggcagtttgtgttgttaggatgtggtctacttggagacgagtctccagagacctttgcgtggttattcaaaaaatggctaaaatgtatgaatgataaatcacctgaagcaattgttacgactcattcaaggccagtagtcaaagcagtcagtgaagtatttccaaatactcggcacagatacaacctttggcatataatgaaagaacttcctgaaatgtctggaagagttgaggataaagaagcagtcagtctgagaatgaaaaaagtagtctatgatacaattacatcagctgattttgagagggagtgggctgaaatgatcaaccaatataatctccatgataaccagtggcttacaaccttgtttgaagagagggcaaaatgggtaccagcatatgtaaaggatactttttgggctggtatctccactgttcgccgtagtgaacgattggaggccttttttgatggatatattacaccagaaaccacaataaagacgttcattgaacaattcgatactgctatgaagctcaggtctgatcgagaagcctatgatgatttccgttcatttcaacaaaggccacaagtcctgtctggtcttctgtttgaggagcaatttgcaaatgtttatacaataaatatgttccagaaattccaggatcagttgaagcagctgatgaatgtgaattgcactgaagtcagtaggaatggttcaatagtgacatacacggtgacagtaattggaaaggagaggaagtttgactacagagtgatgtataacagtgctgagaaagaagtgtggtgcatctgcaggtcattccagtttaaaggtattttatgtagccatgctcttgctgtcttgaagcaagagcttgtgatgctaatacctcccaaatatattcttgatcgatggcgaaaggactacaaatgccctgaggaacctaaggaaacccccatttcacagaaagctgctaaagatacagggaagggctcaaaaccagaaaacattcgggaagatcaagtggacaatctctacaagcatggacaccagtactttgctgacattgtggaaatgggagctactgaccctgatgcgatggaatacgtcctttctgtgatgaaagaagctaaagagaaagtgcgcaagtttgaggagtctcgaaaagagaagaggcctggagagggtccagtttctgctggtaaaaaaggggcgaagttttcgaagccatccacacaagaagttggcaatacaacatcagtttcgactccgactgaagcagtggcttcggtcacagtggtgtcatctcctccaatggcggcagccccaacaatgatggctatggcgccaccttcagcagctgtggccggaggaatgtttttagtaccaatgcacccgcatcccttggtgttcccacccttcccccctgcagtcccaccagcggtagctcctgtagcaccacctgctgcaccagcaaccaatgttgtctccaacacctcaaagaagcgaaagaaaagaaaggggaataattgatcttctgatgctgatgaaatgatgaatctaaaacaagatcagatcggcgaagtagaaaatgagtttgatctcacactacgcatcaggcctcgacatgagagtgagctatcgatttatctcttctgcgcgggttggtctttcgagaaaaatctcttctgcgcgggttggtctttcgagaaaaatctcttctgctggctgtgctactgctacctatgagactacctactgcagtctgcatattcctggggtgttggcttcactgcttcagctagatgctctgctgtggctgacgcagttcagtctaaggagagatgcattttgggctcagcacactgatcttgattactgtagattactagattagattgcctgtagtgtacattatcgtcctcagtgccggaagtaatctaacatgtagtccagcttatgaatgtaaagatctgtttctgattatggattgcatttatggggaaggatctggatcttattaagaaattctgatttacaagcatttgccgtcatttgagtttattggactatactctttccatttgg

SEQ ID NO: 214017 - DNA, 915 bp, Zea Mays
ggcccaccaaaccagcggattaaagaaggttgcgaaggcactagccgaagccacgctccccggaacgaacgacgcagcccaacccgttcccaccaaaccagcggcaccacccatggcttcggcggcggcgagatccggtctccggtcgctggcggtgcgcgccggcccgttgaggcgccgcatgtcctcctccgtccacgacgacgcctatgagacggccaagtgggagaagatcacctacgccgggatcgtgacctgcaccctcctggcggcgtacaacctgtccaagggccaccccccacttcgatgagccgccggcgtacccctatctgcacatccgcaacaaggagttcccatggggccctgatggcttgtttgagacgaaggaccaccactgagccctgattagcacacattcaggagctggtgcatgcttaaaagagttatatggttgtttcagtgattttccttttcccttgagacctatttgctgcaacaagaaataagaatgaccaaactcttgtattgacagtgaggttttaactgtgttagctgttaccgtcttgtcttcttttctttgccgtccacgtcaaatatggtcacctgtaagttgatcttgcccggtgtcaggaaacggcatcacaattatcaaaagctgttatcatattctgatggcttaagattgcaccctgtgctcgtgatgatttcccgtatcaactatcattctatcaaggcagaacgtaatggtttgttttgtttattttccagtaaacatgtaggttggacaaggtaatattttaatgttctctattgctagtgtttgtgaatcccagctttcggtttctagctgtgtagcaacggatcagaaattgtgatcaactgtagtttcagggaaagagagacctcatcgttcat

SEQ ID NO: 214018 - DNA, 2177 bp, Zea Mays
atggccgccgcgacagagaagacggctgaggacatccgccgcgagctccaggagctccagcgccagcaccgcgaggtacaccttcttctttgtccggcgcatctcgaagcctcgagtctccgggccgtctgccctgacccccttgtcgtcccctcgcagatcaccgagcgcctgcgcgacccctgtggccttcgccgcggcacccccggccctggtcctggacctgggcccccccgcccgctccgtggcttcgtgagacccgttgatggctctgaaaataatgaagatgacacaaaggatgccgatggggaggggcaagaggcgggttcaggtgccactgaaggcagtgacaggaggactttcaacattggcgggttcagaagggacgggagcctgtggatgcagaggagggtggactataattcgctgccagagccagctccaagggagcttcccatgaatgaggacccgagtttggctgagcaaaaggttcgtgaagaaagtgaaaggctgcgacaacaggaacgtgagcaaattgcagagaagcgtaagtgtgatatgatgctccacgctcgtgtagctgctaaggcagaagaaaagagtatggagctgttgtacattcactggactgagcatcataaaaggctgtccaatttcttaagacgtttattgccagcaggttatgttcttcactaccccgtgtagctgccactgttgctagcgcatccatcgttaacccatgtgtgggaatgcacaatttgacagctatcatcacccatcagatactcggatggcaatatcctttatttttttagatatattgttgcccaaggactactgcagaattggaggcacatgtagctgatacatctcttgtgtctgctgatgcacctcgtgtgcttgctgatactgtactggatatatctggtggggagcgtgcttttattgaggcagatgaagcaaaggaactgcttagtccacttacgaaaccagggaattcatataaaagaatttgctttagcaacaggagctttggtattggtgctgctaatgttgctggtccaattcttgattcagttaagaatcagctcacagaggttgacatatcagattttgtggcaggaaggcctgaggatgaagcccttgatgtgatgcgcatattctccaaagcattagagggttctgtcctgagatatctgaacatctctgacaatgctttgggtgagaagggtaggaagctgcgaaagctctatctgagcttattcctgcaactgaagcttaaggttctccacttccacaacaacatgacgggagatgaaggtgctatgtatattgctgagatggttaagcgttctccgaatgtagagagtttcaggtgctcagcaacaaggataggatctaatggtggagtcgcattgtctgaggcattagggacatgcactcgcctgaagaaacttgatctcagggacaacttgtttggtgttgatgcagggttagctctcagcaaaacccttccaaagcttcctgatcttgttgagctttatctcagtgatctcaatcttgaaaacaagggtactatagcaattgccaaagccctcgaacagtcagcaccgcagttggagatactgttgaagatgctaccaaaatattacaatcatgtcagagcttatgataatacactcattacaaaaaaatttggcgtccacaggattactctgaaaggcggaagaaaggttcgctttgttgtgatgggaaatatgttttgcactgagctgcgaattcctcgtaagtatgacttaaagggttctacacaaggccgatcaaccaaaaagcaaaatataaatgagaacgcaacactgaaggaccttgacctatcatatgtttttcatgtcgataaaccatggcgggacacacttttcagaaatgatcatagtgggttaatgattattgtttcttctaatgttcttttatcacacaagaggagcataccccttgagaaggaccttaaggaacaacaggttgtgcatggtgaggtggaaaacactttagggcctggttttatcaacttggcattagagaatccaataccaaaggattggagaactattcatatgattggagctgaaagcaatctacttgatattgtctctaattctgttgccacatctataacttaa

SEQ ID NO: 214019 - DNA, 3160 bp, Zea Mays
tcgggtcccctcaaatcaatcgatcacacgcgtcccgccccattcggccattcccagccttcgagaggtcgccgccgccggtcgctgctccgccgactcggggatgccaccggcggtagcgcccgcctcgccgcgccaagaccctagcggctccagtctttccgccgcagccgccgcggcttccatggcgaacccggtcctagggcttggcctcgcgccaccgggcgctgagccctccgccggaacgccaccgtcttcacgccgcgcgccgcgcttggccaagcggcgccacgcgcccgcctcctcccgtttccgcgcggcgcaggcctcagtcggaacatggaacccgtttggcggcggcggcggtacggatggacagactcgaggttttgtgtttggtgctgcttccccagtgagccagcagccttcggagccagcagtggagatatcttcatccagtgaggcgcccttcgtgtttcagagtgtgagggagaaccttcctcggtttgaggagggattgtctggttcatcaatgctccctgataagatggggaagctgaacctgcgcacatcaggtgaggttggcgatggtctcggtcaggggagggatcgaaaggatggaagttcagcatttggtgttgatatatctggtttgttttctaacaaggaagataatgggctccaggagaagcttacacagttgaatttaggccacagagaacccttgcaaagtgagaagagggatagtgctaatggtgtgccacaagcatttgtgtttggatgtaatggagctgggagttttgctgattgtaagaacacagttgcctctggtgcacagtcagatgatcctagttcagtttgtggcactgatgcaaaagctatggctgggaagtcgacgcaattcaatataggcagtcaagcaccttcctggggtggagggattgagggtactaatggagcaccagaagctttcacgtttcaaagtaccgcagtaagtggtcatgtggataatataaacaatgttgtctccggtgccaataccagtgccaatacaagttcgtccactgttgctaaaggtgtgggtgatgtagatttgcttccagaaaagttaacacggttgaatataggaagtgacatgcccttgcatgagtcgaaaagtggttatcagcccaaagtgtttagagcagtccaagggacaatttttggaaatgaaacaagcagcacatcagataggagcagtgaattcctctctgcaaatagcaatacttctagttcaagcagtgatttgttctctacagcaaatagcaacacttctaattcagctaatggcacttactgttttcctccagagaagacaccagatttgaatgcaggagagggagtcatgtcggagagcttggaaagtgatagttctaactgtccaccacaaacctttttatttgaaagaaatgaaacccgaagctctgtttcacactctgcaagcatagccatggatgacggtggcaattttgtcaatcacaaaaatactgacacctgtagttcagctcgtggtacatttgattatgcaggtgctctcccagagaagatgacgaaattaaatataggatgcagaaattcataccatagcaggaaagatgaaactgctactgaaccaccagaagtatttgtatttgggtgtaatgtttctagcttttcttctacccatactgcaagtaaatcacatgatcccacgactcctgaattttgttttcaaagtaaagcagaggcaacttcaggatatggggctgttccccaaaccaaagttcaggagtcatacttgtttacgactttgaataattcttgtagtccctctacttttgagaatgcagttcctgctttcagttttgggacaatggatgcagaaatagaaactgctccagatgatcatttttctgtcaaacaggatttgcctgggttttccagggagaccttatttggtttagacagtataaaatctgcatacaaggacaaaagggaagcacacaaaggcaaaatgaaaaataaaaggccaactaggctaaagcaacatgctcagctccatcaggttatttctaaggaagcctgtaacgatggaaaatcatcagatttagcaggtgactattcaccaatggattgttcgccatatcctgcagaagctgaacatgtgccaacagaggcatatgtggcttctggtcagcccgttcacattggtgatagtgttatctcaaactggaacaccagctgtgctgaagatgatgtagtttctgcaaccgagcacttgattattgatgtaaacctaccaatgtttggagatgaaggtagaggaccgaaactagatgcatctgagagcaattttggtagcagcttttctagttttcaaggagatcaaagtaatggaccacagcattctttcactaatattgggcaagactgtaacgataatacctacagaactccccatgattttgttgagcctcctgcttttcaatcaagctcatcaaatttcagtgggctgaactttagattcggtgtgtcatcctctccacaaatctctgcagcagcacaaagacgtaacacaagaaggaagttaagaacaaagggcagtctggcatcgaaaccttcaactatcggctcttttgaacagtcaaaatcttcacaagatactaagggcatgcggtttttctgtgaaacaagcaaaaatgaagacccagtgaaagagcaaccgtcaagaaagtcttctacttctgcggccttggaggcttgtgaaacctggcgtactagaggattattatacccgtggaataaactctgttacccactatggtgtttctggacattgttctcgcgcattgatgctgtgttacagcaaccgtgcagctacaagaatgtcgcttggcatgatgtgggaagcacttcaagattgtttgactgctacatcaattgaccccacctttcttaaagctaaagttagagctgccaattgccatcttgcattgggcgatcttgaagatgcattaaaggagttacatggcctgtttgaacagtaacactgggagttcttctgaccctaaaaatattagccgaggcttctgatggcctggaaagagtcaagatctagtgctagaggctcttacatgagtgg

SEQ ID NO: 214020 - DNA, 3191 bp, Zea Mays
tcgggtcccctcaaatcaatcgatcacacgcgtcccgccccattcggccattcccagccttcgagaggtcgccgccgccggtcgctgctccgccgactcggggatgccaccggcggtagcgcccgcctcgccgcgccaagaccctagcggctccagtctttccgccgcagccgccgcggcttccatggcgaacccggtcctagggcttggcctcgcgccaccgggcgctgagccctccgccggaacgccaccgtcttcacgccgcgcgccgcgcttggccaagcggcgccacgcgcccgcctcctcccgtttccgcgcggcgcaggcctcagtcggaacatggaacccgtttggcggcggcggcggtacggatggacagactcgaggttttgtgtttggtgctgcttccccagtgagccagcagccttcggagccagcagtggagatatcttcatccagtgaggcgcccttcgtgtttcagagtgtgagggagaaccttcctcggtttgaggagggattgtctggttcatcaatgctccctgataagatggggaagctgaacctgcgcacatcaggtgaggttggcgatggtctcggtcaggggagggatcgaaaggatggaagttcagcatttggtgttgatatatctggtttgttttctaacaaggaagataatgggctccaggagaagcttacacagttgaatttaggccacagagaacccttgcaaagtgagaagagggatagtgctaatggtgtgccacaagcatttgtgtttggatgtaatggagctgggagttttgctgattgtaagaacacagttgcctctggtgcacagtcagatgatcctagttcagtttgtggcactgatgcaaaagctatggctgggaagtcgacgcaattcaatataggcagtcaagcaccttcctggggtggagggattgagggtactaatggagcaccagaagctttcacgtttcaaagtaccgcagtaagtggtcatgtggataatataaacaatgttgtctccggtgccaataccagtgccaatacaagttcgtccactgttgctaaaggtgtgggtgatgtagatttgcttccagaaaagttaacacggttgaatataggaagtgacatgcccttgcatgagtcgaaaagtggttatcagcccaaagtgtttagagcagtccaagggacaatttttggaaatgaaacaagcagcacatcagataggagcagtgaattcctctctgcaaatagcaatacttctagttcaagcagtgatttgttctctacagcaaatagcaacacttctaattcagctaatggcacttactgttttcctccagagaagacaccagatttgaatgcaggagagggagtcatgtcggagagcttggaaagtgatagttctaactgtccaccacaaacctttttatttgaaagaaatgaaacccgaagctctgtttcacactctgcaagcatagccatggatgacggtggcaattttgtcaatcacaaaaatactgacacctgtagttcagctcgtggtacatttgattatgcaggtgctctcccagagaagatgacgaaattaaatataggatgcagaaattcataccatagcaggaaagatgaaactgctactgaaccaccagaagtatttgtatttgggtgtaatgtttctagcttttcttctacccatactgcaagtaaatcacatgatcccacgactcctgaattttgttttcaaagtaaagcagaggcaacttcaggatatggggctgttccccaaaccaaagttcaggagtcatacttgtttacgactttgaataattcttgtagtccctctacttttgagaatgcagttcctgctttcagttttgggacaatggatgcagaaatagaaactgctccagatgatcatttttctgtcaaacaggatttgcctgggttttccagggagaccttatttggtttagacagtataaaatctgcatacaaggacaaaagggaagcacacaaaggcaaaatgaaaaataaaaggccaactaggctaaagcaacatgctcagctccatcaggttatttctaaggaagcctgtaacgatggaaaatcatcagatttagcaggtgactattcaccaatggattgttcgccatatcctgcagaagctgaacatgtgccaacagaggcatatgtggcttctggtcagcccgttcacattggtgatagtgttatctcaaactggaacaccagctgtgctgaagatgatgtagtttctgcaaccgagcacttgattattgatgtaaacctaccaatgtttggagatgaaggtagaggaccgaaactagatgcatctgagagcaattttggtagcagcttttctagttttcaaggagatcaaagtaatggaccacagcattctttcactaatattgggcaagactgtaacgataatacctacagaactccccatgattttgttgagcctcctgcttttcaatcaagctcatcaaatttcagtgggctgaactttagattcggtgtgtcatcctctccacaaatctctgcagcagcacaaagacgtaacacaagaaggaagttaagaacaaagggcagtctggcatcgaaaccttcaactatcggctcttttgaacagtcaaaatcttcacaagatactaagggcatgcggtttttctgtgaaacaagcaaaaatgaagacccagtgaaagagcaaccgtcaagaaagtcttctacttctgcggccttggaggcttgtgaaacctggcgtactagtggaaataaagcctatgaaaatgggcactttgctactgcagaggattattatacccgtggaataaactctgttacccactatggtgtttctggacattgttctcgcgcattgatgctgtgttacagcaaccgtgcagctacaagaatgtcgcttggcatgatgtgggaagcacttcaagattgtttgactgctacatcaattgaccccacctttcttaaagctaaagttagagctgccaattgccatcttgcattgggcgatcttgaagatgcattaaaggagttacatggcctgtttgaacagtaacactgggagttcttctgaccctaaaaatattagccgaggcttctgatggcctggaaagagtcaaggggaagtgattgggactggc

SEQ ID NO: 214021 - DNA, 620 bp, Zea Mays
ctccagccgaagaactggccgtgataacagcgccctctctgtctctctcctagtgttgtctccatcgtcctcctccccctttgcctccctcccaagttccaacgccgtgttcgccgccctctccctctaccggcctccacaccgtctccatcggccggcccgccccattgcccacacgacgacagttctcagctcgtctaacgcttagccgctgaagccattggagaggcgatatgggaagcccccggtgacgatgcggctaccgcagcacacggagcgtgcgggttcgccgaaaacctgcagcatcttccaagcgtggctgccccgtcaccttcgctgtcccggtcctgtctcgcagctgctggtcctgtgcgctgtccctggatgcccacgccgtcgatgccacggacacctcataggctccggttaccgtcggtgcccacaccgaggaaggcgtaatccacgccaagcaacccagttactgagctactgagctgcaacctccgatatcgcgcacgtgtccaggagcattgaggaggcttggtacgattgcttggcgatgagcgagtcggatgtcgaagacgatttccaatgtgcaagatgggcttgttcggttagct

SEQ ID NO: 214022 - DNA, 2220 bp, Zea Mays
gttgaagaatcagatagctgtctcaaatagctgaaatgtgtaaaaaaatgcggatacagatctggattataactacacaaattaaggagtatcctcgcaaaagaaaaaaaagaaatgaggagaagagacaaccgatcggattccgaatttccgatccgagagaatcggccaggccactcgcaccgcgaccactcgtcattagtcgcgctcctcccgcggcgaaccccacgtggaggccgcgcgcagctatataatggactatccttggatccccgcatatcgttgagcgagttccgagggtgaggcggcgattgctgcgttccgtccgttcgtttttgtgtggggcagaagccaactaagaccgcgaggagatcggaggatgttcgcggagagcttccgggtggagagcccgcgggtgcggtacggcgacggcgagattcagtcggagtaccgctacgacactaccgaggtcgtcccgccggggaatagcggcgcagggtgggtggtgcgcccaaagtccgtcacctacaacttcaagaccagcaccaacgtcccaaagctcggggtgatgctcgtaggatggggcggcaacaacgggacaacgctcacggccggggtgatcgccaacagggaaggaatttcgtgggagacaaaggagaaggttcacagggcgaactacttcggctccctgacccaggcttcaaccatcaggatcggcagccacaacggggaggagatctacgcgcctttcaagagcctcgtgcctatggttaaccccaacactatcgtctttggtgggtgggacatcagtaacctgaacatggccgacgccatggccagggcccaggtcctagacattcaccttcagaagcagctcaggccctacatggaatccatgcagccactcgccggcattttcaacccagacttcgtcgccgcaaaccaaggtgcccgtgctaacaatatcattaagggaaccaagaaagagcaggtggagcagatcaggaaggacatcagggagttcaaggaaaagaccaaggtcgacaaggtagtcgtgctatggacagcaaacaccgagaggtatagcaacgtggttgcagggcttaacgacaccatggacaacctcttggcatcgctggacaagaatgaagcagagatctcaccatccaccttgtacgcaatagcctgtgtctttgagggtgttccattcgtcaatggcagccctcagaacaccttcgtgcctgggctgatggagcttgccataaaaaagaattcggtgataggaggcgacgactttaagagtgggcagaccaagatgaagtctgtgttggtcgatttcctcgtcggtgctggaattaaggaaacaatgatggcatgaatctctctgcgccacaagtcttccggtctaaagagatctccaagagcagcgtggtggacgacatggtcgctagcaatccgatcctctacaagcccgatgaacatcctgatcacgtaatcgtgatcaagtacatcccctatgtgggtgacagcaagagagccatggacgaatatacctccgagatcttcatgggcggcaagaacaccatcgtgctgcacaacacctgtgaggactcgcttctcgcctcgccgatcatccttgacttggtgctcctagctgagctcagcactcggattcagctcaaggctgaagggcaggataagttccactccttccatcctgtcgccactattttgagctatcttagcaaggctcctcttgtaccccctggcacacccgtggtgaatgctctagccaagcagagggccatgctggaaaatatcttgcgggcctgcatcggccttgcccctgagaacaacatgatgcttgagcacaagtgaaagagtttcatatccctaatgaccacagaataggatgaatggaatggtgggatcgagcgagcccaatgaagaaataacaggaggccagaaaaagtgtacggagagaagatcaagtatggatgatgccacatagacccttttttaacgttatcattttttttagatttgactcgttttggggtgattagattgtgtactggctatccattgtatgcagcatgaaacctttatttatttgttgtgtgatagaggttatagaagtatctaacctaatttcttaaactcttagttgattaatatttttaattgatcgctgaagaacacatttgatatgctcgatca

SEQ ID NO: 214023 - DNA, 940 bp, Zea Mays
acgggttttccggttaatataacaactaaagctttttttgtcagtctgagtctcataggagagctgctgcagccacgacctctggaaaattcaaggatgagatcgtccccgtgccaacaaaggcaattccagtcaagtgagtgatggtgctggagctgttcttctcatgaaaagatctgtggctctgaagaaagggctgcccattcttggtgttttcaggttgcccaacctgccctatcttgattagtccacattgtgtttgtcgtcgatgttcagacacattttgctcaattccttgttacatttaacgctgcttggcatcgtccattagaagctttgccactgttggagtggatctagctgttatgggcgctggtcttactgtggccattcctgctgctgtgaagtctacttacctgctatattttttctgagcaaagtcggttaaacttgtgattctttgtatgttcaggtgcccggcgcgtggctactcttctaaatgaaatgaagcgccggggcagagactgcagatttggtgttgtcaccatgtgtatcggatctagaatgggggcagcagctatgttcgagctgtgttcggcccggctggaggtatcgaccatcactcaacactgtaacccgatggtgatcggcgaccgtgagcttccatgttattgcgttctgatacttgagacttttattatgactatgtatgagatattgtctcttattagtactggatgatgagatgtgtcttattatgactatggatgagacttttgtgatgtaattgatgagacttttgtgatgtaattgatgagactatggatttaaatattgttatgtgattgtgtgtgagatgttttatgtgaaaatatgttgtgctatatagctgttgatatatttgttatgttgtggaatgtggtgtaaaataaaaataaac

SEQ ID NO: 214024 - DNA, 1973 bp, Zea Mays
ctggaataattcttggccaaatccggcataaacgaacgcgtccttaaccgaaatggcggaatcggcctcgcagagggatagccggaggcccagaagcgtccggaaagacagcgcacgaagcaatctttccctttccccaagatgggattcggcttcgttcgtctcgccgcccgcgccgcggtttctcgccggggcatgacgccagcaacctccgcccgccgcgcgctcgccccacccgccgtgccggcggagccccgctgcgggccccactggctcgtggccgcccgcggccacgtgggccactcgcaccaccgcggcggggaggacgagggcgagacatccgagaggatctttcgtctgggactcgccgctgacgtcgtactcaccgcggggaaggccgtcacaggctatctctccggcagcaccgccatcgccgccgatgccgcccactccctctcggacatagtgcttagcggggtggctctgctgtcttacagggcggccaaggctcccagagacaaggaacatccctatgggcatggaaagtttgaaagtttaggagctcttggaatttcaagtatgctgttggttacttcagggagttatgtcttctgctcctgatataattggcaatacattgcatgcacaccatgaccatggtagcagtgggcatcatcatggaatagatttggaacatccagttcttgcattgagcatgacaactttagcaatatctatcaaagaagggctatactggataacaaaaagagctggggaaaaggaaggcagtggtctgatgaaagctaatgcatggcaccatcgtgcagatgctatttcatctgtcgttgccctagtaggggtaggtggttccattcttgggttgcctcttcttgatccactagctggacttgttgtctctggcatgattctgaaagctggtattaagactggatatgagagtgttctggaattagttgatgctgctgtggatccttcacttttagaaccaatcaaggaaactattttgagggttcacggtgtgaagggatgtcatcgattgaggggaagaaaagctgggacatcattatatcttgatgtgcatatagaggtatatccttttctgagtgttagtgcagcacatgatatcggtgaaactgttcgtcatcaaattcaaaaggagcacaatcaagttgctgaagttttcatacacatagatccctcgtacttagtaggcccgaccatggacctaaaaaggatcctgaaggactctgatggaacaaattcagaagctatcccacggcaacaaagtgcagaagccatcgtgtctaatattatttcatctcatttttcggagaaaatggcgctcgaacatctaatgctgcattacgtgcaaggaagagtgttgctccaggtccaagtttcaatgtctccagaaattttgattcgggatgcaatggaagtcgcgaagcaagccgaagaggagatactcagggctgatgccagcataagccaaatcagcttgcagctaagattgggccaacaaatcaagcaacttcagctagcatcgcaagaacgtcgctgatctacatgcaggagatcactgatccatttgctggctgcttcatgagtctactcgggagtatttccttttgctaatttttctgacatacatgagcttggtctgctgatgaggcagtaggctataggattctaggaaccgactgtgtacattgtaatcagagtgttcggagacgtgaagctgagtttgtaataatacacaagcagccttgctcagaaatgtactgggcaacaaattgtctgccacatactgtcaatgtaaaatgtatgaacaagttcctcactggccccgctataataacaacgaaccatggctactgatgcaaaataaaatgaatattgttttttttctgtgcacatctcacatttatttcattccattaacgaaatactac

SEQ ID NO: 214025 - DNA, 708 bp, Zea Mays
gaactgctttagaatacgagtggtggttccattcttgggttgcctcttcttgatccactagctggacttgttgtctctggcatgattctgaaagctggtattaagactggatatgagaggggggtaagacagccctcgggcattatattaagaagaagctctcacgcaggtcgagaaaacccccgaacccctgccccacccatacacagcggcaccgtagcccatgtgagaagcgaccgggacgggacggcgggaccaggaccaggccttagacctgtgctttggcgtgggacagccggggagatttttgtaaccacaccctgaaattcgctcccacggggagtcgaacctaggacctgaggagtgctactcagaccgcctaaccaactcggctagaggctcttccacactgcaatctgattacatctgttgcttgtattaagtgattatttttctgtacttccagaaatattattgtcgatgtgtagctttctgaagccaatggctgaaaatattcatgaaataaaagatgacatatgctcattttctgtgtgcctgcgctgctaggatcattgctttttcagtctcattcagctgatatcacttttgaacctaataagcacaaacctttcaaatattaacaaattattcttatatacaatttagtatacatgatgcttcacctttgtagtttgcatgatgttactt

SEQ ID NO: 214026 - DNA, 1410 bp, Zea Mays
ctgacctttagatttacatagtgtggctgcagctcattgcttggggagtacttgcaaccattccagttacaggggatgcgtttccaactctaatggcatgcattctcattggaaatctaggagcatctgtcacagaagtcgtaagtgatgctgttgtcacggagttcagtaggacacagaaggctggtgtactacagtcatatgcattcgtagccctggctgcaggatccttgctggggaacttgtctggtggttacattctgcttaaaacacaggaaccaaagatcatgttcacagcattctcagtccttcttggcttccagctagcactgtccctaagtacaaaagagacattgccaagctctcgaggaaactccagaaatcgtcttgtcaaaagctctttggcagctaacttccgcaagcaattctcaaacttgatgacagcgatcagagaggaaaggatcttataccctcttgcatggatcatgacatcctttgctgttgtgcctgttctttctggaaccatgttctgctttcaaacacagtatttgaatctcgatccatcggttattggtctatcgaaagttgtgggacaggtcatggtcttatcactaactgtactctacaatcgatatcttaaaaggataccactgaggtgccttaccacaggacttcagatactatatgctctggcagttttgtcagatttgatccttgtgaaacaagtaaaccttgtgctagggataccgaacgagattcatgttctttgcttctcagctctagctgaagctctagctcagttcaaggtattgccattctcggttttgttgtcaagtctctgcccaccaggctgtgaaggttctttgttcgccttcttcacatctggactggtgctttcagcaatacttagtggagtattcggagttggattgtccaccctgatcggtgtgtcttctgtggactactccagcttgcctttgggtattttgctgcaaagtttggctgcattgctaccgttgggatggatatcctttgtgcctgagaaatggactgccgatgacacggttgtaataaaaagatgaagtgttttcaccatacaaatttccaggcaagatcctgttaggcaatgacacaatgtagataaatgtagcccacccagtcaacactggtgaggttacatgtataggtatccagattctcttcaattagaatagttcttattattactgtactatatgcaatacaggatagcccttatgctcctgctgaatatagcacacaaattgcattgaattagttgtctcgtgaaacgagattggactataaaatttgcttcacatgcatttgttcccataccattagatcctaaactgacgctcagatacatcttctccataaagataaaaaaaa

SEQ ID NO: 214027 - DNA, 1332 bp, Zea Mays
tactatgatatggacagcttgttgagaatgtggctgcagctcattgcttggggagtacttgcaaccattccagttacaggggatgcgtttccaactctaatggcatgcattctcattggaaatctaggagcatctgtcacagaagtcgatccttgctggggaacttgtctggtggttacattctgcttaaaacacaggaaccaaagatcatgttcacagcattctcagtccttcttggcttccagctagcactgtccctaagtacaaaagagacattgccaagctctcgaggaaactccagaaatcgtcttgtcaaaagctctttggcagctaacttccgcaagcaattctcaaacttgatgacagcgatcagagaggaaaggatcttataccctcttgcatggatcatgacatcctttgctgttgtgcctgttctttctggaaccatgttctgctttcaaacacagtatttgaatctcgatccatcggttattggtctatcgaaagttgtgggacaggtcatggtcttatcactaactgtactctacaatcgatatcttaaaaggataccactgaggtgccttaccacaggacttcagatactatatgctctggcagttttgtcagatttgatccttgtgaaacaagtaaaccttgtgctagggataccgaacgagattcatgttctttgcttctcagctctagctgaagctctagctcagttcaaggtattgccattctcggttttgttgtcaagtctctgcccaccaggctgtgaaggttctttgttcgccttcttcacatctggactggtgctttcagcaatacttagtggagtattcggagttggattgtccaccctgatcggtgtgtcttctgtggactactccagcttgcctttgggtattttgctgcaaagtttggctgcattgctaccgttgggatggatatcctttgtgcctgagaaatggactgccgatgacacggttgtaataaaaagatgaagtgttttcaccatacaaatttccaggcaagatcctgttaggcaatgacacaatgtagataaatgtagcccacccagtcaacactggtgaggttacatgtataggtatccagattctcttcaattagaatagttcttattattactgtactatatgcaatacaggatagcccttatgctcctgctgaatatagcacacaaattgcattgaattagttgtctcgtgaaacgagattggactataaaatttgcttcacatgcatttgttcccataccattagatcctaaactgacgctcagatacatcttctccataaagataaaaaaaa

SEQ ID NO: 214028 - DNA, 1278 bp, Zea Mays
aaaaacacaaaacgcactgggtgcaccgtgcacgaggcccatccctccacggcccggcctgctttcctgaggccagttctgcgcccaccacgaagcgcaccaagatccgacggctagaaatctccttccgccgcctatataaccagcagcgaaatgcgcgtggtcaaaccctagccgcctgcctctcctcctccagagctcgtcgccaccggccaccgccaccctcgatcacgccgtccgtcgaggtaaggtcagcatggtgagggtcagtgtgctcaacgatgcgctcaagtccatgtacaacgctgagaagatcggcaagaggcaggtcatgatcaggccgtcgtccaaggtcatcatcaagttcctgacggtcatgcagcgccacggctacattggagagttcgagtacgttgatgaccaccgatcgggcaagatcgtggtcgaactcaacgggaggctgaacaagtgcggcgtcatcagccctcgctttgatatcggcgtgaaagacattgagggatggactgcaaggctgctcccgtccaggcagttcggatacatcgtcctcacaacttcggcaggcatcatggaccacgaggaggcccgccggaagagcgtaggaggcaaggttctaggtttcttctattgaagaagctgagaatctttgttatggcctgcctgcctgtcttactctctcagactagagtacctgttattttactttaatatgtctctctcagactagagcgccttcttttacttgaatattggtgactgcattggtctttcactttaaaatcggtgactgcattgatcgaattatctgagccggttcttcagatactagttggcacaacccttagttgcccatggtaatttgagcagttcggattactaaaaagattagtcacggacatcttattttcccaaggtgctcaaacagtcaaactaactgcaccttggggtcctacatttcgtgcgtgcaaggcaaatgcgctgcaattcgcaagtaaacagcaaagcgaaatcttgaggccaacgtaggtataagcgtggtaatgggttggtaaagtgtttcataataataaggtgctgtttggttttttatatttgtaacatggggtgctgtttggcagatttgtaatgtgatggtaaccgataatgttgcattggatagcaaattagaaagtgatattggcctatttaaacttattaactaagttagagcctttatgggtgcttaaatgtagactgtgtccggtgcacaggctggtccag

SEQ ID NO: 214029 - DNA, 670 bp, Zea Mays
atttgtctgccttctgctaccaggaaaaggctagaagcactgaaccatggcatggaaaaacgagagaaccaaagttctacggcggagaggacaaaatctccagctgggaagaagtggttcttttggtagtacgtgttgtgtgcaatatgcaaactccaacgatggtccagctgtgtggtccaaatgggatgacttgttaggcaagttgcattctaagcggctaagcctgaagcaatgtgatagcagctaacaaagctacaatttgtttgcaacatgtacctctagggtctactccccctaaagtttgtgccatactcatgtgtttccatttgcatctggtcctctttggatgcaaagtagcattggataaagctagggttttgtaaaatatgttgttttttaaaagcgacgaactctgtttggatatgacaaatcttggtagtttataaaagccatggttttattaaaactgtgcagtcatttggagttcttagtaactcacaagttgtggcctcttttttggcttatagaaccacactttttcgagaagtacatccaaacaagaggctgtattggatgtttgtggtttgagaaactgtagtgtcagtaaactttgattttagaacaagatgtgtgccagactttggtataaagaggtgtggtatttctc

SEQ ID NO: 214030 - DNA, 1601 bp, Zea Mays
gtgctagggtttcccccgtcttatcgcttcctcgttcccgcagccgccgcccaaaccctagcaaacccgtcctccgccatggccgacgaccactactcgtccaagcggaagtacgacgacccctcgccgccgccgcggcgcacggggttctcttctggcccgccgcctgcctcgccgcccgctggcggcgccccgtcgtacaacagcgttgcgccgccccccgatgagatccagctcgcgaagcagcgtgcgcaggagatcgcggcgcggatctttaacgccgcagaggccaagcgccctcgcgtcgacaacggcgacgatgacgtcggcggcttcggtggaggaagttccctgggtggcagcggtggtggtggtggtggccgcatcgggggcgcaggacttggcttctcgtcctctgccggtggtgggcatggggcttctatcccaccgttatcttctcagagcagtgcaccacagtactcatatggtggacatcagggtacaagcaaaaagattgaaattccaaatggaagggagcaaagattcaagttacgagagaccatgaagctgaacctggtgcactgacaaggcaagttgagctttctggcaatcctgagcagataagcaaagctgaacagttgatcaaagaagttatagcagaggctgatgctgggtcatccggtgctgtatctggtggccggaaatacaatgcaccacagccaggcgctgagacattccagatgaaaattgctaataataaggtgggattgattattgggaagggtggtgagaccataaagtctatgcaggccaaatctggagcccgcattcaggttattcctttgcatctgcctgctggtgatacttcaactgaaagaactgtgcatattgatggcactcaagaacaaattgaacatgcaaagcagctggtggctgaggttaccagtgaggtctgctttctttctcttgttgtgtctgatatctgtgattgctttgctctcttgtgctttaacctgtcatttaggttgcttctggttcgttctgtttattatattgttttatgattttcccctgttctttttgaaaatcttgtttcttttgcttctttgccgccgtacattgattatactgctgtgctaaccaatgtctgaaacatattgttcgtgggtacagccacaacatgcaaggagattgttatacgacttattccctttttctgaacatagcttattaatagttttgggcaaggttttcatgacttaagtattatataataaagcgaagagttgtatttgtaaactaacttgttctttatcaattagccactaccgtaggcctgttaaatggtattccatagaatctgcagctaaagttttgacaagtcttgatttgaaattcatatgattgttcacgtcatatggaatatggatgatactcttgggcaaagaccaatgagtccttgttgctcagtggttattgtttattcatttctccacaaagagccaattagtgtcaatagcttgccaggaggactgcaaactatcctggagagcaggtttgttactgtttaatgtcaatgtcctactggatagaacaatgtg

SEQ ID NO: 214031 - DNA, 1659 bp, Zea Mays
gtgctagggtttcccccgtcttatcgcttcctcgttcccgcagccgccgcccaaaccctagcaaacccgtcctccgccatggccgacgaccactactcgtccaagcggaagtacgacgacccctcgccgccgccgcggcgcacggggttctcttctggcccgccgcctgcctcgccgcccgctggcggcgccccgtcgtacaacagcgttgcgccgccccccgatgagatccagctcgcgaagcagcgtgcgcaggagatcgcggcgcggatctttaacgccgcagaggccaagcgccctcgcgtcgacaacggcgacgatgacgtcggcggcttcggtggaggaagttccctgggtggcagcggtggtggtggtggtggccgcatcgggggcgcaggacttggcttctcgtcctctgccggtggtgggcatggggcttctatcccaccgttatcttctcagagcagtgcaccacagtactcatatggtggacatcagggtacaagcaaaaagattgaaattccaaatggaagggttggtgttattattggaaaagctggggaaactattaggtatatccaacttcaatcaggagcaaagattcaagttacgagagaccatgaagctgaacctggtgcactgacaaggcaagttgagctttctggcaatcctgagcagataagcaaagctgaacagttgatcaaagaagttatagcagaggctgatgctgggtcatccggtgctgtatctggtggccggaaatacaatgcaccacagccaggcgctgagacattccagatgaaaattgctaataataaggtgggattgattattgggaagggtggtgagaccataaagtctatgcaggccaaatctggagcccgcattcaggttattcctttgcatctgcctgctggtgatacttcaactgaaagaactgtgcatattgatggcactcaagaacaaattgaacatgcaaagcagctggtggctgaggttaccagtgaggtctgctttctttctcttgttgtgtctgatatctgtgattgctttgctctcttgtgctttaacctgtcatttaggttgcttctggttcgttctgtttattatattgttttatgattttcccctgttctttttgaaaatcttgtttcttttgcttctttgccgccgtacattgattatactgctgtgctaaccaatgtctgaaacatattgttcgtgggtacagccacaacatgcaaggagattgttatacgacttattccctttttctgaacatagcttattaatagttttgggcaaggttttcatgacttaagtattatataataaagcgaagagttgtatttgtaaactaacttgttctttatcaattagccactaccgtaggcctgttaaatggtattccatagaatctgcagctaaagttttgacaagtcttgatttgaaattcatatgattgttcacgtcatatggaatatggatgatactcttgggcaaagaccaatgagtccttgttgctcagtggttattgtttattcatttctccacaaagagccaattagtgtcaatagcttgccaggaggactgcaaactatcctggagagcaggtttgttactgtttaatgtcaatgtcctactggatagaacaatgtg

SEQ ID NO: 214032 - DNA, 1675 bp, Zea Mays
atcgacaccttgaagcgtgctagggtttcccccgtcttatcgcttcctcgttcccgcagccgccgcccaaaccctagcaaacccgtcctccgccatggccgacgaccactactcgtccaagcggaagtacgacgacccctcgccgccgccgcggcgcacggggttctcttctggcccgccgcctgcctcgccgcccgctggcggcgccccgtcgtacaacagcgttgcgccgccccccgatgagatccagctcgcgaagcagcgtgcgcaggagatcgcggcgcggatctttaacgccgcagaggccaagcgccctcgcgtcgacaacggcgacgatgacgtcggcggcttcggtggaggaagttccctgggtggcagcggtggtggtggtggtggccgcatcgggggcgcaggacttggcttctcgtcctctgccggtggtgggcatggggcttctatcccaccgttatcttctcagagcagtgcaccacagtactcatatggtggacatcagggtacaagcaaaaagattgaaattccaaatggaagggttggtgttattattggaaaagctggggaaactattaggtatatccaacttcaatcaggagcaaagattcaagttacgagagaccatgaagctgaacctggtgcactgacaaggcaagttgagctttctggcaatcctgagcagataagcaaagctgaacagttgatcaaagaagttatagcagaggctgatgctgggtcatccggtgctgtatctggtggccggaaatacaatgcaccacagccaggcgctgagacattccagatgaaaattgctaataataaggtgggattgattattgggaagggtggtgagaccataaagtctatgcaggccaaatctggagcccgcattcaggttattcctttgcatctgcctgctggtgatacttcaactgaaagaactgtgcatattgatggcactcaagaacaaattgaacatgcaaagcagctggtggctgaggttaccagtgaggtctgctttctttctcttgttgtgtctgatatctgtgattgctttgctctcttgtgctttaacctgtcatttaggttgcttctggttcgttctgtttattatattgttttatgattttcccctgttctttttgaaaatcttgtttcttttgcttctttgccgccgtacattgattatactgctgtgctaaccaatgtctgaaacatattgttcgtgggtacagccacaacatgcaaggagattgttatacgacttattccctttttctgaacatagcttattaatagttttgggcaaggttttcatgacttaagtattatataataaagcgaagagttgtatttgtaaactaacttgttctttatcaattagccactaccgtaggcctgttaaatggtattccatagaatctgcagctaaagttttgacaagtcttgatttgaaattcatatgattgttcacgtcatatggaatatggatgatactcttgggcaaagaccaatgagtccttgttgctcagtggttattgtttattcatttctccacaaagagccaattagtgtcaatagcttgccaggaggactgcaaactatcctggagagcaggtttgttactgtttaatgtcaatgtcctactggatagaacaatgtg

SEQ ID NO: 214033 - DNA, 1618 bp, Zea Mays
atcgacaccttgaagcgtgctagggtttcccccgtcttatcgcttcctcgttcccgcagccgccgcccaaaccctagcaaacccgtcctccgccatggccgacgaccactactcgtccaagcggaagtacgacgacccctcgccgccgccgcggcgcacggggttctcttctggcccgccgcctgcctcgccgcccgctggcggcgccccgtcgtacaacagcgttgcgccgccccccgatgagatccagctcgcgaagcagcgtgcgcaggagatcgcggcgcggatctttaacgccgcagaggccaagcgccctcgcgtcgacaacggcgacgatgacgtcggcggcttcggtggaggaagttccctgggtggcagcggtggtgggcatggggcttctatcccaccgttatcttctcagagcagtgcaccacagtactcatatggtggacatcagggtacaagcaaaaagattgaaattccaaatggaagggttggtgttattattggaaaagctggggaaactattaggtatatccaacttcaatcaggagcaaagattcaagttacgagagaccatgaagctgaacctggtgcactgacaaggcaagttgagctttctggcaatcctgagcagataagcaaagctgaacagttgatcaaagaagttatagcagaggctgatgctgggtcatccggtgctgtatctggtggccggaaatacaatgcaccacagccaggcgctgagacattccagatgaaaattgctaataataaggtgggattgattattgggaagggtggtgagaccataaagtctatgcaggccaaatctggagcccgcattcaggttattcctttgcatctgcctgctggtgatacttcaactgaaagaactgtgcatattgatggcactcaagaacaaattgaacatgcaaagcagctggtggctgaggttaccagtgaggtctgctttctttctcttgttgtgtctgatatctgtgattgctttgctctcttgtgctttaacctgtcatttaggttgcttctggttcgttctgtttattatattgttttatgattttcccctgttctttttgaaaatcttgtttcttttgcttctttgccgccgtacattgattatactgctgtgctaaccaatgtctgaaacatattgttcgtgggtacagccacaacatgcaaggagattgttatacgacttattccctttttctgaacatagcttattaatagttttgggcaaggttttcatgacttaagtattatataataaagcgaagagttgtatttgtaaactaacttgttctttatcaattagccactaccgtaggcctgttaaatggtattccatagaatctgcagctaaagttttgacaagtcttgatttgaaattcatatgattgttcacgtcatatggaatatggatgatactcttgggcaaagaccaatgagtccttgttgctcagtggttattgtttattcatttctccacaaagagccaattagtgtcaatagcttgccaggaggactgcaaactatcctggagagcaggtttgttactgtttaatgtcaatgtcctactggatagaacaatgtg

SEQ ID NO: 214034 - DNA, 1793 bp, Zea Mays
ctgatttttatatatcctgtcatttagcaatgaattgaatattttagatggtagtgaaagcacctttctatatcacatacatctctagacatctattggaactctattccacggcattgctattcaacatatgtatatgtatatgttcgtctagtccaatcttcattagccccatagttttgcacatgggcaacgctagatgggcatcactagcctgacgattttgatcgaatcgtgccaggaatccaatgtctggtggctattctcagcagggctatcaccctcctcgtcctcagtcaaactggggcccgccttctgcgccaccccagcagtctggttatggttatatgcagcctggggcttatcctggggcaccgccacagtatggtgcacctcagcaaccttatggtagctatcccccaacatctggtggctatcagactgggtgggatcagtctcaaaaccagcaatctcatacaactccccctggtactgggtatgattattatagccagcagcagcaacctcaacaacaacaatctgcccctgggactgctgcttctactgatgccactagctacaattatggccagccttcaacatatgcttcacaaggatatgattctacctatactcagcatagtggtgggcagcaagcatatggacatgatggctactctggttaccagacccaaggccagcagcagggctactctcagcagactggttatgaccagcagggatatggtgcatctgcttatggatcagctgcgaactcgacccaggatgggtccagctatggtggtcctggtggggccacccaggcatctccggggcagcaaacttcaaccccagctgctggaagccaccctggctatgccagtcaaccgcctactagtgctgcagcaagctatccagttcaaggttcagctccatctggatatggtgctccaccaccccagcctggctatggcacccaacctccacagcaaggtggatatggtccgggcgcttatgggcagccttctccacacggcgagaaacctcctgcatcttcaccttatggacaagctccgcctcctggatctgctcagggtggttatgtgcagtatggttacagccaacctgcatacggtgcaccaccagcttaccctggtgcacccactgcaagccacccgggctatggccaacagcagtcttatggcgatgcttatggtagtggaagctatgggcagcctacagcctacactactgaagcagcagctcctgctgcatcccaggatcactctgccgcacctgccgcggcccctggaacaacagctgcgccagctcctgacaacaatgggggtgccaaaacttctgcggaaacttgatcttcaacagctaattgggaacaaactttttacaagcctctgttgtgtcgtttcctccactgttgcttaatattacacatctagtttaggctccacatctacaggttatatctttctgcctgttgttttgaccccatgaatcgctctttccgtgctgttgattagtactttgttgtttttttattgctggttagatgtttggactggtgatatatgtgtttgtgcggttactcttgttggactctaatgggtacctaccggcttggtctggacatatactgtcctatatttgtttttagcctccttttacattggttattatgtgtgctgtacaactgtcggacgtttccataagctggtgatagttatggatgaaaatttggtttcaatattgtctaagatgatcataaaaggtttaag

SEQ ID NO: 214035 - DNA, 768 bp, Zea Mays
cacttggacgggctcgcgtctcgcgcacgcagctttctactgccatcctccgtgtatgtatatatcgtcacgcgcgagccttgtcacccgtcttctctccgcctcgcgcacccggttccgcgtgcctttccccacctactctcgcggctctcgccagccagtctagggtttcggtcccggcgtgcttatccgcccccgccggccatgtcgaagcaaggagggaaggccaagccgctgaaggcgcccaaggccgacaagaaggagtacgacgagacggatcttgcatatctgcagaagaagaaagatgaggaaaagcactgaaggagcttaaggccaaggcacagaagggcgcgattgggggctcgggtctgaagaaaagtggaaagaaatgagactggtcacccgtctccaatacctagaggatgataaggcagctgtctatctgtgttgcgcttcactaagtgtgattgtaacagtggtacctcttgtgttctgtgttccgcgatgttgcagttggttgcttgatcgaaagatgtttcaacctcccatctgctagctatgatacagatggtcccctgataataatgatgacatattctgtgatggatgccacagcattttttgtttttgtttttgcattcagatatttcagcttccttatagttttacatgtcccaactaggaatgagaagtcattctgttggtccaatctaaattttatgtgtgttagtggagtgccaaagagagtggatatgtagaacaatggtt

SEQ ID NO: 214036 - DNA, 2098 bp, Zea Mays
tatcttcgtctgttcctagattctactaggacgagcccaaatccaaatcgtcctgaggaaagggtaaagaaagtgaagcaaggggctgcctggcttagggtttcttgacggctccttgccctctccgccatggacgcgcagcgagccctccttgacgagctcatgggcacagctcgtaacctaacggaggaggagaagaaggggcacaaggagctgaagtgggacgatccggacgtgtgcggcccctacatggtccggttctgtccccacgaccttttcgtcaacaccaagagcaatctcgggccgtgcttgaggatccatgatccgaagctcaaggaaagctttgagaaatctcccaggcatgatacttatatgcaaaggtttgaggcagagcttgcacaacaatgtgagaaattggtaatggatttggatagaaagataagacgtggtcgagaaaggttggctcacgattctgctgtgccaatgccaatccctggaaaaatagctgagcagctttcagcgcgagaagaacaggtcaagaagctactggagcaaatcgaggagcttggtgaggctggtaaagtggatgaagctgaggcacttatgaaacggttttggtttacaggttgacattctaaacgctgagaagacagctttatctaaccaagcagacagcaaagtggctatgcttgagaagaagatggagctttgcgaaacgtgtggatcattcttagttgctgatgatgctcttgagagaacccagtcccacgtgactgggaaacaacacattggatatggtatggttagagatttcctggtggaatacaaggcggcaatagagaagtcaaaagaggaagataggcttgcaagggagcagaaagcagaggagcgtcggaagcagagaggaaaagagtatgataatgggggcagggatagagataccagaagggagaagtctggggagcgtgactatgaccgtgatcgtcagtatgagcgaagccgtggaagagacaggtcttatgattacagagagagaggatcagagcaccgaagcaatctctacagaaatgggagggattccgaaagaggtggacacagatacaggagtggtgatatgacaaacgaccgggggagaatgaggagcagatcacgttctccaacaaggcatggctatggaagatctggaagtccaaatcattagctgaatatttagatagttttattcacagttgggactcatgaggtagaccgttcccttctgctatttattactgtacaatgggttttattgaagtgtcgcacttgtttgagtctctgctctgctgtaacagctctgttggaaccctacagtcttcctttttacatgagaaaaaaaaaattctcagttaaactcgtaaggccggtactggacttcatgtatggatgatgatgtttacagaattacagtctatagcaggtaaaccttgaacatcaatgtttcgtgttacacatttttttatttcccttgacaactctgctagaaaccttagtcctgctctttggcttagattttttacactactcaggccaggtatcttttttttaccaaaatttatgtgcataaattatgagttatgtacctttaatagttgactagttatcaatttgtcatgaagtagtattgtgttcaggaagaacaatcagacaaaatgatccagtcattgacaaccatcaacaaattctttttctggaaccgttgtagtgtacaagagatcaagctttggttttgtacataatggtgccctggttagacctatttcctgactgtagttattggcttgaagtctagtttggggaaggttctgtttgccagctaccttgcagttgcggtatttgagcagatagtgtattctaactatgcaaactaatagatgacaggcttcggtgtttttgacatatttttatgttttggatcaattggcgtcatgatctcggtgggggcaatgtccactgatgttatgttgtttgcatgacattcctgcgcctttttacacttgacataacaacatgtttttccataattgagttgtgcgtgggtgacttcgacgagactgaggtc

SEQ ID NO: 214037 - DNA, 1724 bp, Zea Mays
ccaaacgcgccttatcttcgtctgttcctagattctactaggacgagcccaaatccaaatcgtcctgaggaaagggtaaagaaagtgaagcaaggggctgcctggcttagggtttcttgacggctccttgccctctccgccatggacgcgcagcgagccctccttgacgagctcatgggcacagctcgtaacctaacggaggaggagaagaaggggcacaaggagctgaagtgggacgatccggacgtgtgcggcccctacatggtccggttctgtccccacgaccttttcgtcaacaccaagagcaatctcgggccgtgcttgaggatccatgatccgaagctcaaggaaagctttgagaaatctcccaggcatgatacttatatgcaaaggtttgaggcagagcttgcacaacaatgtgagaaattggtaatggatttggatagaaagataagacgtggtcgagaaaggttggctcacgattctgctgtgccaatgccaatccctggaaaaatagctgagcagctttcagcgcgagaagaacaggtcaagaagctactggagcaaatcgaggagcttggtgaggctggtaaagtggatgaagctgaggcacttatgaaacgggttgacattctaaacgctgagaagacagctttatctaaccaagcagacagcaaagtggctatgcttgagaagaagatggagctttgcgaaacgtgtggatcattcttagttgctgatgatgctcttgagagaacccagtcccacgtgactgggaaacaacacattggatatggtatggttagagatttcctggtggaatacaaggcggcaatagagaagtcaaaagaggaagataggcttgcaagggagcagaaagcagaggagcgtcggaagcagagaggaaaagagtatgataatgggggcagggatagagataccagaagggagaagtctggggagcgtgactatgaccgtgatcgtcagtatgagcgaagccgtggaagagacaggtcttatgattacagagagagaggatcagagcaccgaagcaatctctacagaaatgggagggattccgaaagaggtggacacagatacaggagtggtgatatgacaaacgaccgggggagaatgaggagcagatcacgttctccaacaaggcatggctatggaagatctggaagtccaaatcattagctgaatatttagatagttttattcacagttgggactcatgagctctgttggaaccctacagtcttcctttttacatgagaaaaaaaaaattctcagttaaactcgtaaggccggtactggacttcatgtatggatgatgatgtttacagaattacagtctatagcagtgtacaagagatcaagctttggttttgtacataatggtgccctggttagacctatttcctgactgtagttattggcttgaagtctagtttggggaaggttctgtttgccagctaccttgcagttgcggtatttgagcagatagtgtattctaactatgcaaactaatagatgacaggcttcggtgtttttgacatatttttatgttttggatcaattggcgtcatgatctcggtgggggcaatgtccactgatgttatgttgtttgcatgacattcctgcgcctttttacacttgacataacaacatgtttttccataattgagttgtgcgtgggtgacttcgacgagactgaggtc

SEQ ID NO: 214038 - DNA, 4628 bp, Zea Mays
tccgatccgcctccgccgccgtctcccctgcccaggcgccggaagtccacctcgggctccagcatatccgcgatgcatctggacggcgtcgacgacgagctcggaggcggcagctgcgccccctcccccgcgcgctttgagctccaagaggatccttccttctggaaggacaacaatgtgcaggttgcgatccgtatccggccgctgagcggcagtgaggtgtcgatgcaggggcagaagcggtgcgtcaggcaggatagtagccagagccttacctggattggacaccccgagtccaggttcactttcgatcttgtcgctgacgaacatgtcacgcaggagggcatgttcaatgttgccggggtgcccatggtggagaactgcatagctggctataacagctgcatgtttgcttacgggcaggaaaaagaattaaggagagatgaaaagctcatgtttacttgtaaatgctcatttttggagatttataatgagcagattctggatctgctcaacccaaattctgtaaacttgcagataagggaggatgccagaaagggtatacatgttgagaatttgacggaacatgaaatctccaatgctcgagaagcgctgcaacaacttattgagggagcagcaaacagaaaggtagcagccaccaatatgaaccgagcaagtagccgctctcatagtgttttcacctgccttatagaaagtaagtgggagtcacaaggtatcaagcaccaccgcttttctcgactcaaccttgttgaccttgcgggctcagagaggcaaaagagctcaggtgctgaaggggagcgattgaaggaagctaccaacatcaacaaatcactatcaactttgggacttgtcattacgaacctaattgctgtgtcaaacaaaaagtcacagcatgttccatacagagattcaaaattaacattcctcctccaggattcccttggaggaaattcaaaaacgaccataattgcaaacataagcccatccagctgttgtgctgctgagacattaagcacattgaaattcgcgcaacgagctaaatatataaggaataatgctataattaatgaggatgcttctggtgatgttcttagcatgcgtttacagatccagaaccttaagaaaagtaatcagccgtttgcaaggacaattgggttctgataaaacagaaagcattgcctctcatgggtttgtctgcgagtcccctagcacattcaaatgggatcagggtcatggcatgttcactccacttacttttgataaaagggctacacagaggaacgattgtgatgctgcccttgtcgctgcttttaggagggaacaagagaaggaagcacaattgaaggcagtaatagatgcaaagcagactgctgaacagctggtagctcaaaagacagaagaggtaagaagtttcaagatgaggcttaagtttcgtgaagaacggatcaaaagattggagcaggttgcttcagggaagttatctgctgaagcacatcttttgcaagagaaggaaaaccttgtaaaggaattagaggtcctgcggggtcaattagatcgtaatccagaaattacaaaatttgcaatggagaatctacaattaaaggaagagctacgaaggttgcagtcatttgttgatgaaggtgaacgagaaatgatgcatgagcaaatcattgttttacaagataagctgcttgaggcacttgactggaagcttatgaatgagaaggaacctattaacaagggtctctcattatttggggagtcagctggcgatgaggaaaatgagtttcttcgtttgcaggctattcaaaatgagagagaaattgagtcgttgcgtaaaaaaatgacattctgccttgaagcaaaagataatcttgaaaggcatgtcaatgagttgaccacagagttggagcttacaaagaaacacaacaacacatataaagagttcaaggctgcccagctccaggagcaaggagaagcagatttacataacttgtctgacgctcagatggaacttaagactttggttgatgcaatagcttctgcgagtcaacgggaggcagaagctcatgaaactgctatcggtttggccaaagagaatgaagaattgaggctgcagcttaaggttttgattgaggataacaagagattggttgagctctatgaacacactgttgtcaatgttgaggcaaatcaagatggaaaccctgtagatgatctgttgaatgcccaaccagcagccacatcagatttccatgcacataactcatctagtgtggcacaggagtctaagatagtagacgaaaaatgcaccaatgaggacaatttctcaagagttacatctgttgaattgcgtcttcagctggaggagatgcatgaggaaaatgatagacttatggggttgtatgagaaagctatgcaggaaagagatgaattcaaacggaaaattttagagcaaagcgactctgaagctgtaaaacatattcagttggacgagaaagatgtcgaaatgagtgaagcagctgagaatcctgaagtgaaacatattcatgactccacaattgcagctttgaaagaagtgctgcagattgttcggagtaagttggagcttgtccaagataaggttgtgtctgctcaggatgcagtaaaatattttaaggcactcgaaatagctagtggtaaggccgaagaactttctgcaagaattgagcttcagcgtctaggtgcgcagcgtggtcaggaagaaatcactttcctgaagtctgtgctatcagaatcacagaagaagaaaaatgcttttgaaggcaagtatttcttgcctgcagcatcatgttggaacttggttttgaagaccaaaagtcttgcggagtccaagtttgatgccagctttggatcaatgaatcagaagaaagaacagttgaatcatctccaaactcgcaaaattgaactatctgctgcaagaacgagagcacgtgaatctgaaactgagttgaaaagcaaaattgatggccttaaagcgaaacttcgcgctcatgaagctcaaagaaaggaggaagaaaaggtcctgtttgctattgataacctggatacttccactacactaatgcataaacccaagaactatggcaaggcaaccgacctgctgaaatctgaggaggatcggatgaagcttctgtgtgaactacagaaggcccgcgaacagcgctccatggtacataaggaaataagaagcatgaatgagtgtgattatattgatcgtgagattggagtccttgaagcagaaatagaggattcctgcatctccatactggaaactgacattgagaagtttgtccgtgacaacactttagcagagatttgggagggtagcgcaaaggatctggaggcattgctggtcgattaccaagactgtgttttccaagtcaacttgaaggaggaagagatcaaggtgtgcagtgagtccttgcagtatcaagccagggacatggataaacttcagtcgaagctgaaccaagcgatccgggagctgggtgagcttctgcaagatagaagaagcctaaccgcttgcagtctggatgaacccacgctgcccgttggtgaaaaggtgtgccagccggcggcaacctgtgcggggagcgccaagggctccaggaaagaatcggcggcgggctcgcgatcgggaaggggagcggggcgcatgcgcgagcactggcacggcgacggcgacggcgacggcgaggacgagcatgagccccagccggggtgcggggagggcgcggggcaggcggcggcgaactgcgcggcggtgtgctgctgctgcccgctggcgctgctcgacgtgctgctgctcgtcaccgtccggctccccgcgggcgtcatgcggcgggtgaggaggaggcgccggcgccgccgcggccacggaggtgccggagccaaccggaagaggccggcgcccgcgtcgccttcgggaagcagcggcaaggcgatgatcggagcggcgacgctagacatcgacgaggaggcgcgcggcgaggtggagtcggcggcggcggcggagctggagcgcgagatcatgagctcgcacttctacggcgccggcttctggcgcagcgtctcctccaactccagctcctcgtccaggcgctaccaatagatgcgcgttctggcgtaaatagtgagcactcggtcgctactaaactacccacgattactccatctgttcttggagtctcctccaactgccagtcagcgcagcatgcatggcaaaaggagcagcagccttcggcatcgtgcaagtgcacttattctgaatggacacgtgcgaaactggcacgtgcgggttgcatcattgtactgctacgccattgtctcgagcatggaccacgccagcagctgcagcttgggatggagaagcgaaaggggtcagtgattgtgcttaggtttttcatctctctcctaatcttttttgtgtaactggagcaggaaatgctgaaacctcaagcttctgtccaaacgatgtactcctatttagtattattgattgattgagaggccgatcgataacaaatgaacaaatagaacactgttcatgacgcagtgcttttttt

SEQ ID NO: 214039 - DNA, 1146 bp, Zea Mays
acatcgtgctccccgtcgccacaggcgctcacgcccggctggagaagaagggcggcagcctgctggtgacggacctggacagcaccaacggcacctacatcaacgagcgccggctcaacccgggcttccccgcgtccgtcgaccccggcagcctactcatcttcggtgacatccacttggccatgttccgtgtaaggaagacggtggtggttgaggcgcccagtactagtaccgaggaggccgagggagctcagcaagaggccaccgcagctgaagatatttgacatgtgcctttattacagtaacagtagccccattttacaaattacatggtgatcgtgatccatctacttccagtctcctcaaaagctacattattgatcggcttatatatccaatatataaattacatgatcagataaaagctgacagatcaacaaagaattgccgtaacactagcaatgtacagaaccattccatcgtttcgatttacttgacggcgtaacaccagtaatgctcaaacaaagtttatggtgaatgagacgtaaggatggacctctgattcacctcccagaccagcaactgccacgtcatcttcgcctttccaataaatactgtaatccaaatgttgcgtttcagtgggaaaaaaaaagatactatatgacttaacaaagtagttactgcagcagtccaagcactgaagaatcacctatggacattgccgcaaaggtcctctaagatgctcctcactttcttctcgccctttgtagacggagcaagaacggcagactgatgcaatagagagatcagacaacaagacacacaagatagagttaagtatcacaacaaagagtcagagactagcagagcggattaccaggaacgatggtggcagaccgtatctaagaatgctctctacaaatatgcgcacggcgcagaagtgcatccaggaactgaaaacctgcacagaaataattacagccgttcaaggaacaggcccttgtgaaggaacttttacgcaaaagagacttgacccagccaaccacacaaggtggagtcgttgttgcgcaagcaagataagcatgggaaagaaaccaaatcaaacattagcaaactgcataaccacaacaatgaagcatctgatca

SEQ ID NO: 214040 - DNA, 2860 bp, Zea Mays
aattcgcataggccgtgctactgtgctagcaagcaactgatcctagtcatacactgggcagcaggcagcgagcattccactccacgacgcaaccatccggcgccggtctccgttcgtcgtcccagtctccgcgccgtcccgtaacaatcacaacactgcaggtagtagctcagtttcagtggtcgccggcgagccactcgactcgagcgcacggccaaattgttggaccgaaatccggttcctccccaccgaacggctacgcatccgccatgctcgtcgccctcctctgcctcctcgcctgctgcgccggcgccggcgcagcaggcgccgccgcgccgaacgcgcgcccgtgcgcgtcgccctactcgaccagcgcctacccgttctgcgacgcgtcgctctccatcccggcccgcgcgcgcgcgctcgtctcgctgctcaccctggacgagaagatcgcgcagctgtccaacacggcgggcggcgtcccgcgcctgggcatcccgccctaccagtggtggtccgagtcgctccacggcctcgccgacaacgggcccggggtcaacttctcctcgggccccgtccgcgccgccaccgacttcccgcaggtcatcctgtccaccgccgccttcaaccgctcgctgtggcgcgcggtcgccgaggccgtcgccacggaggccctcggcatgcacaacgccggccaggccggcctcacgtattgggcgcctaacatcaacatcttccgagacccaaggtggggccgcggccaggagacgtccggggaggaccccgctgtcgctgccgcgtactccctcgagtatgtcaagggtttccagggagaggaaggagaggaaggcagaatcaggctctctgcgtgctgcaagcactatacagcgtatgacatggagaaatgggaaggcttctcgcggtacaccttcaatgccaaggtaaatgcacaagatttggaagacacgtaccagccgcctttcaagacctgcatccaggaggctcgtgctagctgcttgatgtgtgcatataaccaggtcaatggtgtgcctatgtgtgctcacaaagatcttctgcagaagaccagggatgaatggggcttccaggggtacattacatctgattgtgatgctgtggcaattattcatgaaaaccagacatacactaaatcaggcgaagattcaatagcaattgttcttaaggaatggatatcaactgtggttctttcctagttcggcatactaagtcagcaattgagaagggaaaaattcaagaagaagatatcgaccgtgccctttttaatctattctcggttcagttgcgtcttggaatatttgataagcccagcaacaaccaatggttctctcaactagggcccaacagtgtgtgcacgaaagagcatagagagcttgcagcagaagctgtaaggcagggtgctgtccttctgaagaatgaccataattttttgcctctgaagagaagcgaagttagacatgttgccatcattggaccatctgcaaatgacgcgtatgcgatgggcggagactatacaggtgttccctgcaatcctacgaccttccttaagggcattcaagcatatgctacacaaacaagctttgcccctggatgcaaggatgcttcctgtaactcaacagatttgtttggcgaagctgttgaagcagctaaaagagccgatattgttgtcgtaattgctggcttgaacctgacagaagagcgtgaggacttcgacagagtgagccttctccttccaggcaagcagatgggcctcatacatgccattgctagtgtagcgaagaagccccttgtgttggttctcctgggtggtggtcctgttgatgtttcgtttgcaaagcaagatccacgaatcgcaagcattctttggctcggatatcctggcgaggttggtggacaagtccttccagaaattcttttcggagagtacaacccaggaggaaagctgcctataacttggtatcctgaatcctttactgctattcccatgactgatatgaacatgagagctgatccttcacgaggctaccctgggagaacatatcgattttacactggagatgtagtgtatggctttggatatggtttaagttactccaaatattcatatagcatctcctcggctccgaagaagatcaccgtgtcgcgttcatccgatttgggcattatcagcagaaagcctgcatacacaaggagggatggactaggctctgtgaaaactgaagatatcgcttcatgtgaagctctggttttctctgttcacgtcgctgtttcgaatcatggtagcatggatgggagtcatgctgttcttctgttcgcgagatcgaaatcaagcgtcccgggctttcctataaaacagctggttggctttgagagtgtccacacggcggctggcagtgcatccaatgtggagattactgttgacccctgcaagcaaatgagcgcagccaatcctgaaggcaaaagggtacttctgttgggtgcccatgttctaacggtgggtgatgaagagttcgaattatccattgaactctgacagggatgtgccaagtcctaccattttatggagttcaaagttgggaataatctgatgaaacttgtaaagaaacacgttgtaaagattcattattgagctggatgcgtgtacggtaaacatgctgtgacctgtgaagattcatcatttgagttgggtgctagtacaattgcagccattttgcggtataaactgccgaaaaatacatccagcacactactctgaatcgtatagatagatttaattaaaaggttggaacaaacagcacactactgccagaaataaaaa

SEQ ID NO: 214041 - DNA, 1827 bp, Zea Mays
ttgcgttccttcaaaattcccatctgcagcggcactccagttcttcttcgattcattgctctgctcctgctcctacctacagaatcgcaggcgcagcatgaggcgcgtcgtgaggtggctcaggcagctactggctggcaggaaggacgagcgcggaggaggactcgaggtgagccatgtcggtagcggctggagcgacgggccggagaaggagaagaggaggtggagcttcgcgaagcagaggaagagcggaggcggaggcgcgcggtcgtcgggtccggacgccgtcgctcctgctgccgcggtggaacggtcgcagctggtggggaggccaggggaggacgcgagggctcgagaacaccgtgccgcgatcgccatccagaaaaccttcagaggctacctggctaggagagcgctccgagctctccggtcgctcgtcaagatccaggcgctggtacggggctacctggtgaggaagcaggcgaccatgacgctgcacagactgcagacgctcatgcggctgcaagccgactccatcgccgtcaagaatgcatcgtaccggagatccatggaacaagaagtaacccacatggttttttttctctctctctctcgaacttttgctgcatgtgattcacgacgttcgtgttgatgaagttgcacctcggggctgggcgccggcctgggttctgttgatcttatatatgtcgtgcttcgtgcaggagagggtctatgctcgggacgtccaggtgaagccgctcgcgacggcgccggtgcaccgccggatgctgtctgacagctcggactccatctacgagcgcagcccgcggatcgtggagatggacacttgccacctccgctcccggtcctcacggatcaccagcaggtacaacaagtacaagtacaacccggatggcttaccagagtaccaccaccgccacgcggcgccgacgccgtcgtgctcgccccttcccggcggcaacggcaagcatcagcccgcgcgggtctcgttccggcagagcgcccgcgaccgcgagcgcgacccccggggctccaagactgcgcagagcacgccccggctcgcctccccccacgactcctcctcgcccgccaagagcgtcgagcacagccagctggccagcacgccgcggcggcgccccgcgacgcagcgggaccgggaccgggacgcgctcgtcagcccgcggcacatggccggcaccgcgtcctccgcggccaggacgcggtgccacagcgcgccgaggcagcggaaggcgacggactccgagcaggcgccgtcgccgaggacgggcgcctgctgccaagaaggggcgtcgaggaggtcgtgctcgcacgcgcacgcccgcgggttctgcttccagtgctcggaatcgacccggacggacggattgtccgggatcagcgtcagcgacgaggtgggtgccagagactactacctggacagcttttggtgatcaggcacggatttgtacatactcgtagtcagtcatagacgctaaaacacctagcaaatcacggaacgagtggaagataacacgggatagccagacagtctcacagaagagtgtagatgctgaaacatacttgtacacacttgttgcttgggtgttggatggaagtgttcttatgtgaaggatgaagctaacagcattgtcagacagtggtactggctatgtagttatgctgttatggtcgtcagagcgcagttctttgtttggacccagttgttctataagctacctaagtgggccgggccatactagttgggcttgatttcacgtcggttttcatttagcctttttatttcct

SEQ ID NO: 214042 - DNA, 1881 bp, Zea Mays
ctgcgggcagcctgatccgcgcggacgtggttttcctcttcggggctggacctgcactgcacgagggccgcgcgtaaacctcgccggggcgctgtcatctgctgctgcctaattccaagccctctcttttgccgccgctccaaagtttctcgctcccatctcgtgagcttctctttctgacgctggtgcaagccgatcttggctccaatccgctcgtacaattggcctccgtttggcagctctgccgttcccctaccgaacgagagagaaaaaaagagaatcgcaggcgcagcatgaggcgcgtcgtgaggtggctcaggcagctactggctggcaggaaggacgagcgcggaggaggactcgaggtgagccatgtcggtagcggctggagcgacgggccggagaaggagaagaggaggtggagcttcgcgaagcagaggaagagcggaggcggaggcgcgcggtcgtcgggtccggacgccgtcgctcctgctgccgcggtggaacggtcgcagctggtggggaggccaggggaggacgcgagggctcgagaacaccgtgccgcgatcgccatccagaaaaccttcagaggctacctggctaggagagcgctccgagctctccggtcgctcgtcaagatccaggcgctggtacggggctacctggtgaggaagcaggcgaccatgacgctgcacagactgcagacgctcatgcggctgcaagccgactccatcgccgtcaagaatgcatcgtaccggagatccatggaacaagaagagagggtctatgctcgggacgtccaggtgaagccgctcgcgacggcgccggtgcaccgccggatgctgtctgacagctcggactccatctacgagcgcagcccgcggatcgtggagatggacacttgccacctccgctcccggtcctcacggatcaccagcaggtacaacaagtacaagtacaacccggatggcttaccagagtaccaccaccgccacgcggcgccgacgccgtcgtgctcgccccttcccggcggcaacggcaagcatcagcccgcgcgggtctcgttccggcagagcgcccgcgaccgcgagcgcgacccccggggctccaagactgcgcagagcacgccccggctcgcctccccccacgactcctcctcgcccgccaagagcgtcgagcacagccagctggccagcacgccgcggcggcgccccgcgacgcagcgggaccgggaccgggacgcgctcgtcagcccgcggcacatggccggcaccgcgtcctccgcggccaggacgcggtgccacagcgcgccgaggcagcggaaggcgacggactccgagcaggcgccgtcgccgaggacgggcgcctgctgccaagaaggggcgtcgaggaggtcgtgctcgcacgcgcacgcccgcgggttctgcttccagtgctcggaatcgacccggacggacggattgtccgggatcagcgtcagcgacgaggtgggtgccagagactactacctggacagcttttggtgatcaggcacggatttgtacatactcgtagtcagtcatagacgctaaaacacctagcaaatcacggaacgagtggaagataacacgggatagccagacagtctcacagaagagtgtagatgctgaaacatacttgtacacacttgttgcttgggtgttggatggaagtgttcttatgtgaaggatgaagctaacagcattgtcagacagtggtactggctatgtagttatgctgttatggtcgtcagagcgcagttctttgtttggacccagttgttctataagctacctaagtgggccgggccatactagttgggcttgatttcacgtcggttttcatttagcctttttatttcct

SEQ ID NO: 214043 - DNA, 1555 bp, Zea Mays
gccatgagcgcgaggtgtagcgagcgcgcgtcctagggagggtcggagccgccccccgagttgccagcagcagccgcagagcggatccaggtcgcccggcgccccgcgtgcgtgctctgctcgcttccaagagaagacgctaccccagtcccagtgggcgcccgcgaagccacgaccggcagatcttggcgtcatcgaatcggccggccgatctgatcccccccctcctccccggtgaccggcgccgggcggccgttctaggctaggagagcgctccgagctctccggtcgctcgtcaagatccaggcgctggtacggggctacctggtgaggaagcaggcgaccatgacgctgcacagactgcagacgctcatgcggctgcaagccgactccatcgccgtcaagaatgcatcgtaccggagatccatggaacaagaagtaacccacatggagagggtctatgctcgggacgtccaggtgaagccgctcgcgacggcgccggtgcaccgccggatgctgtctgacagctcggactccatctacgagcgcagcccgcggatcgtggagatggacacttgccacctccgctcccggtcctcacggatcaccagcaggtacaacaagtacaagtacaacccggatggcttaccagagtaccaccaccgccacgcggcgccgacgccgtcgtgctcgccccttcccggcggcaacggcaagcatcagcccgcgcgggtctcgttccggcagagcgcccgcgaccgcgagcgcgacccccggggctccaagactgcgcagagcacgccccggctcgcctccccccacgactcctcctcgcccgccaagagcgtcgagcacagccagctggccagcacgccgcggcggcgccccgcgacgcagcgggaccgggaccgggacgcgctcgtcagcccgcggcacatggccggcaccgcgtcctccgcggccaggacgcggtgccacagcgcgccgaggcagcggaaggcgacggactccgagcaggcgccgtcgccgaggacgggcgcctgctgccaagaaggggcgtcgaggaggtcgtgctcgcacgcgcacgcccgcgggttctgcttccagtgctcggaatcgacccggacggacggattgtccgggatcagcgtcagcgacgaggtgggtgccagagactactacctggacagcttttggtgatcaggcacggatttgtacatactcgtagtcagtcatagacgctaaaacacctagcaaatcacggaacgagtggaagataacacgggatagccagacagtctcacagaagagtgtagatgctgaaacatacttgtacacacttgttgcttgggtgttggatggaagtgttcttatgtgaaggatgaagctaacagcattgtcagacagtggtactggctatgtagttatgctgttatggtcgtcagagcgcagttctttgtttggacccagttgttctataagctacctaagtgggccgggccatactagttgggcttgatttcacgtcggttttcatttagcctttttatttcct

SEQ ID NO: 214044 - DNA, 1428 bp, Zea Mays
gtatttgatgtacttgatgtcgctaaagatgggtcagagtggatatttacaaacaaaaaagctgatgaagcccatcagttcacaatgcatgtgaattttgataagttttctgaaggcattttggttggtgatgagcttgtaatagatggtggaatggcaacatttgaagttactgagaaaataggaaatgatttgcgctgtaagtgcacggacccaggattgggctgacatcgaatttgggatagctgaaggagttgattgcattgctctatcatttgtaaatgatgctaatgatataaagcagttgaaagcttacctctctagaagatcgttagagcacatcaaagtatttgcaaagattgagagtctagaatctctcaagaacctgaaagacatcatagaggcatctgatggagttatggtagcacgaggggatcttggagttcagattcctcttgaacagatcccagccattcaagaatcaattgttaaactatgtagacacctgaacaagcctgtgatagttgcttctcagcttctcgaatcaatggttgaatacccaacaccaactcgagcagaggtggccgatgtttccgaagcagtgcggcaatatgcagacgctgtgatgctatcagcagagtcagctataggtgcatatccccaaaaagcgctatctgtacttcgtgcagccagtgaaaggatggaatcatggagccgtgaggaaaacatgcagaaacttcttccacggcatcagcttgcaattgcattgcctgaccggatctcagagcagatttgcagctgtgctgtagaaatggcaaacaaccttgctgtggatgccatatttgtctacacaaagcatggtcacatggcatcacttctatcgcgcaaccgacccaaccctcccatattcgcgttcactgataatgccaattcaagaaagagcatgaacctctactggggagtgattccacttcatctaccattgtcaaatagcatggaggataacttcaacaaaaccatcagcctgatgaggtcgaagggttcagtgaaacccggagacacggtcttggtggtatcagattctgatctaaaccaaccttgtgctgccacctcggtgttccaatccattcaggtccggctagtggagtaggttccatgagatgagatcctactagccgtttggttggctaaaatgtaacgtaaccaactactactatgcgttaccattgcaaaccattcccaccgtctataattagatcctatttccatctccaaataaagattgaaccactgcgattacagtggtgtctgatttcatttccttcgtgtcaccgttcattgaatcaaacaccgtctagtttcagtactgggttgctgcaaatgtctcgttgaaccaaacacgaattaaagccagctgtttctatattc

SEQ ID NO: 214045 - DNA, 1664 bp, Zea Mays
cgccgaacacacacacgtcggtccaaacacgcgccgtccgctcgcggcttctccaaccaaagccgtgcagccaaatccgaagggtagcgtagcacggggacgacgccatgagccgcgcgctcctctcccacgtcctccaccgtccgccgcacttcgcgtacacctgcttaaggagtggcgttggtgcccgaggaggagtgctcgcttctggcatccacccactccgtcgtctcaattgcagcgcggttgaagccgttcccggccccaccgaggaggcgcctgctcctcaggcaaggaagaaaagagtagtttctggtgtacagccaacaggatcggttcaccttggaaattatctaggggcaattaagaattgggttgcacttcaggattcatatgagacattctttttcatcgtggatcttcatgcaattactttaccatatgaggcgccactgctttctaaagcaacaagaagcactgctgcaatatatcttgcatgtggcgtcgacagctccaaggcttctatctttgtacagtctcatgtccgtgctcatgttgagttgatgtggctattgagttcttctactcctattggctggctgaatagaatgatccagttcaaagagaagtctcgcaaggcgggtgatgaaaatgttggggttgcacttttgacttatcctgttctaatggcttctgacattcttttgtaccagtccgatctggtacctgttggtgaagatcaaacacaacatttagaattaactcgtgaaatagctgagcgtgtaaataatctttatggtggaagaaagtggaagaaattgggagggagagggggtttgctatttaaggttcctgaagcccttattcctccagcaggggctcgtgttatgtccctaactgatggtctctccaagatgtccaagtctgctccttcagaccagtctcgtattaaccttcttgacccaaaagatgtgattgcaaataagatcaagcgctgcaaaactgactcattcccagggtttctctcttctcgcttctgcgctctctctacctctcttttcattattatggaaactcattccattgaactcatatttcagtatggagtttgacaacccagagaggccggaatgcagaaatcttctctctatataccagattatcactgagaagactaaggaggaagttgttagtgagtgccaacacatgaactggggtacattcaagactacactcacggaagctctaattgatcatttgcagcctattcaggttcgttatgaggagataatgtctgatccagcctacttggataatgtccttttagaaggagcagtaaaagctgctgagatagcggacatcaccctgaacaatgtttaccaagccatgggtttcttgcgtagataatggccttcattttacgacttcaaccccctttgagtcgtctcatgatttccatatcatttgattcatgtgataattttctgtctgctgttccttcagattctgctggggaaatgttctagtttctatgtttgagcaatttttattttgagtttctttacatattagagtgaagtaaacaagaaactgacctacatgtattgaatctaccaaaagaacctaacaagttgtttggacctaccaaaaaaaacagctttagc

SEQ ID NO: 214046 - DNA, 2447 bp, Zea Mays
cagaaatgttagggcgattttgtatcaccaactaccaattcacttaatttcactatccaccaaattagtccggctggactagtggacccgagtccacatctgacctccgcctgctcgccctctctctctcgatggtcgtcttctccacgagaccacgaccgatcaaccccaatcgtagggaactgggaacccggacccagatctcccctagatcctcaatcccaatctgccctccgccgtatcgatcatacctcccgatgcgaccccaagtctggtcgatgcgagtagcggcggcgatttagcgaactgcgcgttcgctagggttagggtttcgagggtttgcgctagggtttgggcgcacgatggggcggtcgcgaggggtgcagaattccggcgacgacgacaccgtacacaggtcgaagcggaggagggtcgcatcgggcggggatgcgacggactccgtttccgctggcatcgggggagctggagaaggagggggcaagaaagcgctctaccactgcaattactgcaacaaggacatctctgggaagatacggatcaaatgctccaagtgccctgacttcgacctttgcgtggagtgcttctctgttggcgctgaagtcaccccacatcgcagcaaccatccttacaaagtcatggacaacctgtctttcccacttatttgcccagattggaatgcagacgaagaaattctcctccttgagagcatgttggtaccaagtctaagttacagtgtattgatcattacacaacagcatacatgaactcaccttgttatcccctaccggatatgtctcatgttaatggcaagaacaggaaggagcttctagctatggctaaagtgcagggtgaaagtaaaaaagggacttcactgttgcctggagagctgactcctaaggctgaatctccattttctccctccagggtcaaggtggaagatgcacttggagaaggtctagcaggtcgatcaccttcgcacatagctgttggtgcaaataaaaaagcttcaaatgtgggacatattaaagatgggtctaatgtatcaaaagttgaagatggtcatgtcgatagaagtgttggtgtgaagaagcccagatattctgcagatgaaggcccttcgttgactgaactgagtggatacaatgcaaagagacacgagtttgacccagagtatgataatgatgccgaacaagcgcttgctgagatggaatttaaagaaactgattcagaaactgatcgtgaactgaaactccgtgtgctgcgtatttatctgtccaggcttgatgaaagaaaaaggagaaaagagttcatattggaaaggaatttattgtttcctaatcccttggagaaggatcttacaaatgaagacagggaagtttaccatcggtataaggtcttcatgcgttttctttccaaggaggaacatgaagcccttgttaggagtgtcattgaagagcgaaaaattcggaggagaattcaagaactccaggaatgtcgttctgctggatgccgcacacttgctgaagcaaagatacacatagagcaaaagaggaaaaaagaatacgagctgaatgcccaaaaagctaaggaaagtaaccaccttattgcaaatactaaattggtgcagaagatgaatcgacctatgaagattgagtctgatgggaatttggatccaaagaaaggtggtgttggcttagattctcctaaaactacaggacttacaagtgttaagcagtgggatgactgggatatagttggtcttcctggggcggagctattaagtgctagcgaaaagcttctatgttgccagaacagactgctacccagtcattacctgagaatgcaggaggtgctgatgcaggagatattcaagggtagtgtcctaaagaaggaagacgcacacgtcttgtttaaggttgatcctaccaaagtagatagtgtttatgatatggtaacaaaaaagctgggcaaccatgtggagttgcctacggtctagcttatgcctttgggcttgcctgctgtgacatgccgaagaaaacaagtcttggtttcgccccttgcagcgtgtctgaaccatagctgaaggtggaactgtactagatcaaatcggccatagttaactgaaattcgtatcagttgtcagaagcacaataaggcattccagccaagttgtaaaattattgcccttagcagaatgtgtagcgtgagttgtcatttcctttctgccattgttgtgcactgtttcagctgtggtagtgccttgtagtaggtataggtgcctgagtttatatgtatcatcgtgtatgtaccattgggagctcaattatatgccattgtaccaaccccagacattgattattacaattcatctagcagccagattcttgtctctaatggaatgcatggcgtcaatatatttttttttc

SEQ ID NO: 214047 - DNA, 2190 bp, Zea Mays
cagaaatgttagggcgattttgtatcaccaactaccaattcacttaatttcactatccaccaaattagtccggctggactagtggacccgagtccacatctgacctccgcctgctcgccctctctctctcgatggtcgtcttctccacgagaccacgaccgatcaaccccaatcgtagggaactgggaacccggacccagatctcccctagatcctcaatcccaatctgccctccgccgtatcgatcatacctcccgatgcgaccccaagtctggtcgatgcgagtagcggcggcgatttagcgaactgcgcgttcgctagggttagggtttcgagggtttgcgctagggtttgggcgcacgatggggcggtcgcgaggggtgcagaattccggcgacgacgacaccgtacacaggtcgaagcggaggagggtcgcatcgggcggggatgcgacggactccgtttccgctggcatcgggggagctggagaaggagggggcaagaaagcgctctaccactgcaattactgcaacaaggacatctctgggaagatacggatcaaatgctccaagtgccctgacttcgacctttgcgtggagtgcttctctgttggcgctgaagtcaccccacatcgcagcaaccatccttacaaagtcatggacaacctgtctttcccacttatttgcccagattggaatgcagacgaagaaattctcctccttgagggaattgaaatgtatggtctgggaaactggcttgaagttgcagagcatgttggtaccaagtctaagttacagtgtattgatcattacacaacagcatacatgaactcaccttgttatcccctaccggatatgtctcatgttaatggcaagaacaggaaggagcttctagctatggctaaagtgcagggtgaaagtaaaaaagggacttcactgttgcctggagagctgactcctaaggctgaatctccattttctccctccagggtcaaggtggaagatgcacttggagaaggtctagcaggtcgatcaccttcgcacatagctgttggtgcaaataaaaaagcttcaaatgtgggacatattaaagatgggtctaatgtatcaaaagttgaagatggtcatgtcgatagaagtgttggtgtgaagaagcccagatattctgcagatgaaggcccttcgttgactgaactgagtggatacaatgcaaagagacacgagtttgacccagagtatgataatgatgccgaacaagcgcttgctgagatggaatttaaagaaactgattcagaaactgatcgtgaactgaaactccgtgtgctgcgtatttatctgtccaggcttgatgaaagaaaaaggagaaaagagttcatattggaaaggaatttattgtttcctaatcccttggagaaggatcttacaaatgaagacagggaagtttaccatcggtataaggtcttcatgcgttttctttccaaggaggaacatgaagcccttgttaggagtgtcattgaagagcgaaaaattcggaggagaattcaagaactccaggaaaagcttctatgttgccagaacagactgctacccagtcattacctgagaatgcaggaggtgctgatgcaggagatattcaagggtagtgtcctaaagaaggaagacgcacacgtcttgtttaaggttgatcctaccaaagtagatagtgtttatgatatggtaacaaaaaagctgggcaaccatgtggagttgcctacggtctagcttatgcctttgggcttgcctgctgtgacatgccgaagaaaacaagtcttggtttcgccccttgcagcgtgtctgaaccatagctgaaggtggaactgtactagatcaaatcggccatagttaactgaaattcgtatcagttgtcagaagcacaataaggcattccagccaagttgtaaaattattgcccttagcagaatgtgtagcgtgagttgtcatttcctttctgccattgttgtgcactgtttcagctgtggtagtgccttgtagtaggtataggtgcctgagtttatatgtatcatcgtgtatgtaccattgggagctcaattatatgccattgtaccaaccccagacattgattattacaattcatctagcagccagattcttgtctctaatggaatgcatggcgtcaatatatttttttttc

SEQ ID NO: 214048 - DNA, 1613 bp, Zea Mays
cgctaaccctaggtttgctcgcgtaccctccccggtctatatgttgcctcggtctagaaatcgacgcgttcttctcgcttctcgtctacatctaagcatgcctacacctgcggtttccagatagggtgtttggtacgatcgagcaacggtgaatctcgctctgttatttgtttgttcgaaacgcgtggttttgtttttgagatgatgtgcaggttccgatctgattggtttgattgatgagtggcgaatcggattgaagcgagacgaggctgcatggtttccgtgctccgaggcttctgatctgcgtgtttgctccgagactattggtgcctgacccggcaaattgcaatctgccgaccttcagagccgggtcgttctggcgagatctagacgtcgaagggctattaaagcgtggctggatctctttctgcaccgcgcctctcgatgatgtctctgtgttgataattattggatgaaatttcgataattattagatctgagagatgttggtcggagcgatccgcgcctaaatggcaaggtaagttaaacacatgtaactacagagttgcgtgtgtgaagtcaaaagagggggaaagatactgagaagggaggaaaaaatatgaaagaagtgaggtgtgacatcttgaaggcctttgccattgtgggtgcgctcgcatggcaggccaccataataaagatgctggttttgtgtgctgggtgggagatcgcacggggagttttcatccctgggttctgccacccttttgtgtccctgtgccctgcttacgattcatcacggcgtgtttcaaatgaatggagctacagcgcaacacaaagatttggagctttacgatgaaatcatccttttgcaagcatgcaattgtcacacagacggaccccaaagaatattgaatatgtcataatcagtgggggccagaataaaatagaagattttgatgttgagtctacagagacgggattgaggagttgaggacaggacacatgagttttggttcaagaagaacaaaacaaagtaccaaatctgcatgctccaagagtgttagatagcagcaaagtctctaacaaaaatgaacagcggacaatgatccgactgatggctcaacgggacgcgacgaaaaaggctgcacgcaccgtgccagggatggagattgtcacgctgttcgtaccgtcgcacagtgttttcgcccatagacaacctacgcccaagcgttcgagacttcgggggtggatcccgagcttccgcttgctacggagcagagagccacgacaggggtggatcccgagcttccgcttgctgcggagcagagagccacggcagagcgagctcaacaagagggcccctatcatgccttttgatggaagctatcctccatattgtgctgctaatataacatctagatattttttactgtaagaaccctcagtgtagtctccaagcggtaagcaccactgcagtctgcagttaaaatgcgtgtttcctctacattggttctgcatttatttaagtttggcaatgttgtgctcaacaaatttggttaacatatcagcaacaataccgtttggaagacaatttctgctaatgccaacggttt

SEQ ID NO: 214049 - DNA, 2952 bp, Zea Mays
cgctaaccctaggtttgctcgcgtaccctccccggtctatatgttgcctcggtctagaaatcgacgcgttcttctcgcttctcgtctacatctaagcatgcctacacctgcggtttccagatagggtgtttggtacgatcgagcaacggtgaatctcgctctgttatttgtttgttcgaaacgcgtggttttgtttttgagatgatgtgcaggttccgatctgattggtttgattgatgagtggcgaatcggattgaagcgagacgaggctgcatggtttccgtgctccgaggcttctgatctgcgtgtttgctccgagactattggtgcctgacccggcaaattgcaatctgccgaccttcagagccgggtcgttctggcgagatctagacgtcgaagggctattaaagcgtggctggatctctttctgcaccgcgcctctcgatgatgtctctgtgttgataattattggatgaaatttcgataattattagatctgagagatgttggtcggagcgatccgcgcctaaatggcaaggtaagttaaacacatgtaactacagagttgcgtgtgtgaagtcaaaagagggggaaagatactgagaagggaggaaaaaatatgaaagaagtgaggtgtgacatcttgaaggcctttgccattgtgggtgcgctcgcatggcaggccaccataataaagatgctggttttgtgtgctgggtgggagatcgcacggggagttttcatccctgggttctgccacccttttgtgtccctgtgccctgcttacgattcatcacggcgtgtttcaaatgaatggagctacagcgcaacacaaagatttggagctttacgatgaaatcatccttttgcaagcatgcaattgtcacacagacggaccccaaagaatattgaatatgtcataatcagtgggggccagaataaaatagaagattttgatgttgagtctacagagacgggattgaggagttgaggacaggacacatgagatttctggtgactgcattctttgattgcaaaaaaatatctacagttttggttcaagaagaacaaaacaaagtaccaaatctgcatgctccaagagtgttagatagcagcaaagtctctaacaaaaatgaacagcggacaatgatccgactgatggctcaacgggacgcgacgaaaaaggctgcacgcaccgtgccagggatggagattgtcacgctgttcgtaccgtcgcacagtgttttcgcccatagacaacctacgcccaagcgttcgagacttcgggggtggatcccgagcttccgcttgctacggagcagagagccacgacaggggtggatcccgagcttccgcttgctgcggagcagagagccacggcagagcgagctcaacaagagggcccctatcatgccttttgatggaagctatcctccatattgtgctgctaatataacatctagatattttttactgtaagaaccctcagtgtagtctccaagcgaacactggagatggctacctgaacttatgatgagaatcaagaatgtttgagtgcagtggagcatgattctctattttgtgctgtgacaactgtcaattatggtgaagcaaagttttctttagtaactcgtcttttggtcgatatattgtattgctaccataaacttgttaaaatattttacatgttgttaagaaatggattgtgttcatcaacctttttggtactcttagcctgttcagttcaaaaaccaatacacaaatttcctatattctctagcatttgtttactttgttagggaatggttgcctctcccaaacattattcgttctatatcaagctttagagttcaagttcacaaacagtcatgacgtatgcattggactgtcccattgatctaaaattcatactactctctgtttctgcttattatataaactgtctaatttactatacattagcttctatcttcggtcactatagggcgcccgacgggcccctcatgttctagttcactaaatggatcggaaactttgctgtctgaaggtatatatatgattattaataacacaatttttacttgtcttgttgctttctgaataccgctgatagcagccatttgttactgatactattcatcaaggcgcgtagaaaattgcttgtgcaatttgatttcgtatttgacagcacaattctatcttatataagaattaaattatttaaaaaatggttttagattttgatcagcgaagtgtagatacgctattagtcatgtatgtctcttaactgtggatcttgtctcaacacggtgaggttctctctggactgttcgttacagtcctggacggaaggtggttcgattccaccaagatcctgtagtccttatttaaataaatacacaagataatataccatcagaggtttgaggaattcagacacatgatgtgcttggaagaattcttagacgtgggttcttggatgttgaagtagattaaagaagaaaacttggagagctagaagcatgttgctcgtccaacaagacaaacaagataagtgcatcatttaaagacaacaatcaagaagacgattgaggtctcttcaagtgaagatgaatcaagcttcaaagttgaggacgagttagacttgttcatgacgaaattcaagaagcacttgaagaaggaagatcttcaattatcaagaagccattttctagacctgttgtatcagaatagtttgtgtgcatctattttggatgtgaacaatgttttttttctattgcaaaaaggtcctaagtattgttttctatttaagaaaaagaataagcttaaaagtaggggtagaaatagtctaaatattttctgaccgtatgattcatattcatttacaagagttcaactgtttcagtatgtttgtatcctgagtccagatattcaatattcgatactgaagac

SEQ ID NO: 214050 - DNA, 3681 bp, Zea Mays
cctaggtttgctcgcgtaccctccccggtctatatgttgcctcggtctagaaatcgacgcgttcttctcgcttctcgtctacatctaagcatgcctacacctgcggtttccagatagggtgtttggtacgatcgagcaacggtgaatctcgctctgttatttgtttgttcgaaacgcgtggttttgtttttgagatgatgtgcaggttccgatctgattggtttgattgatgagtggcgaatcggattgaagcgagacgaggctgcatggtttccgtgctccgaggcttctgatctgcgtgtttgctccgagactattggtgcctgacccggcaaattgcaatctgccgaccttcagagccgggtcgttctggcgagatctagacgtcgaagggctattaaagcgtggctggatctctttctgcaccgcgcctctcgatgatgtctctgtgttgataattattggatgaaatttcgataattattagatctgagagatgttggtcggagcgatccgcgcctaaatggcaaggtaagttaaacacatgtaactacagagttgcgtgtgtgaagtcaaaagagggggaaagatactgagaagggaggaaaaaatatgaaagaagtgaggtgtgacatcttgaaggcctttgccattgtgggtgcgctcgcatggcaggccaccataataaagatgctggttttgtgtgctgggtgggagatcgcacggggagttttcatccctgggttctgccacccttttgtgtccctgtgccctgcttacgattcatcacggcgtgtttcaaatgaatggagctacagcgcaacacaaaggtacaactggatctaaattttcaattcaattgcaatttagaacgcatatatttatttaaatccatgtatgcacagctgcctgaagttactgaaatcatcatcaatcgttaaaaccgtacacgcctacactgctccttccatgctttttcattcacccaacgttgctctcccaaaggccataaaccactgacacatgagggaggtgttctctatagagtatcgacgacgataacgctgaactgcataaatttggttatatcatctgaaatatagaaatcgggtgcaaatgaaattagttactatttgttcattcaaactatgatgtctgaaaattcaggcaattacagattctcacacgagattatgaggttgtgatccaaatcgacaattatctgttgatttgttcaatgtcttatggctgatcctgttggagtttattgggtttggtccatttactcaacaacttttaaaggccccctctgtttctgaccttaccttgtgcgttgagttcataattgaatccatgaaatcgtggataccgtaaccgaactaaatccatggataccgtgactgagttagtttcagttttctatcttttgtgtctggttattatgagtaatttttctgtgtaaagacgattctctcctcgaaagatatgagaaataaccaacctgctatgtggtatggttttaggcaaaaggagcattcggtgttgtgtgattttaggctcctgtcaacactagtgtgacgacgaaaacagtctttgaaatcttactctgctgaagaacctgaagggttattgcttgtcgagttgtgatttgatgatctgtagtgttacgtcaatggacttgaacaatatcgtgaactcatatttgattgtttggagcaatctctgttgtgagtaataatgattttatcgcttttggttttgttagatacatttaagatagattttactcttatttgctatgcgtggtttatccattgtttatatagtggttgtcttagaaattactttaatccttaaaaaggtgtgcaatcttccaacacatcatgtggactcaaaattactctctagttgatttgtctaaatatactgcagctgttcttgttggtttgtcagctatcatcattcttccattattaattattatcaattaaggtttcacaaggtattatgaaagattgttctttcttagtttgtactctatccattctaaattataagtcattctaatattgtttgagccacaagtttgattaaagctatagagaaaattatgaagattcatatcaaatgtaaaatctaaattaataagaatctagtgacatttagtatcataaatgttattattttaatgtacaacttaggttagacttaatatttctttgactcctcaagaaagttggactgacttaccatttaggatggagtatgatttattattgtcttataaaagcctggatcggtatactctgaatatctgagtacctacatgatgagtatttgtaagatgtgtgaaggtcgactgctaggtatacattgtcagtatgaaatggctatcgtcttcagctttctttcctggtcagtggacagtgaaatatttatacgatgtgttaatgtggactgctctgtataaatcgttggtacaaaatggctatggtcttcagcttcatttcctggtcactggacagtgaactgctcaagcacacttagtagatactaggcacaatcagagcttatcgaacttgtgcgatatagttcgtttcagtactccatggttatgatgttattgatcactattgagctgaagcactacaatctgtgacaaaaaaatttgatacagcagcaaccaccgctgaagcttggcagaagggatgaaattaggaatacgaaacccattaggcctgtttggttgttcggtcgattatgtgtttatgttgattttgaatggattttaccaggtcaattcttatagaagcaagctcagaagctgaaaaaagctgaggcccaatatgccatagatgggagatctgttttctttttgttcccgggcaaatatgctttgctctagatttggagctttacgatgaaatcatccttttgcaagcatgcaattgtcacacagacggaccccaaagaatattgaatatgtcataatcagtgggggccagaataaaatagaagattttgatgttgagtctacagagacgggattgaggagttgaggacaggacacatgagttttggttcaagaagaacaaaacaaagtaccaaatctgcatgctccaagagtgttagatagcagcaaagtctctaacaaaaatgaacagcggacaatgatccgactgatggctcaacgggacgcgacgaaaaaggctgcacgcaccgtgccagggatggagattgtcacgctgttcgtaccgtcgcacagtgttttcgcccatagacaacctacgcccaagcgttcgagacttcgggggtggatcccgagcttccgcttgctacggagcagagagccacgacaggggtggatcccgagcttccgcttgctgcggagcagagagccacggcagagcgagctcaacaagagggcccctatcatgccttttgatggaagctatcctccatattgtgctgctaatataacatctagatattttttactgtaagaaccctcagtgtagtctccaagcggtaagcaccactgcagtctgcagttaaaatgcgtgtttcctctacattggttctgcatttatttaagtttggcaatgttgtgctcaacaaatttggttaacatatcagcaacaataccgtttggaagacaatttctgctaatgccaacggttt

SEQ ID NO: 214051 - DNA, 2544 bp, Zea Mays
atggcaacacgactgattgttgtagtggtagtttctcttcacaaaccatgttgcttagttatgaatttcagaacggctgatttctggcttccaagtccgaaactgcggcgtatgatcacgaaaacatgtgctatatgcttgaccacaatgaagcctggtcagggccacgctctcttcacagcagagtgctcgcacaccttccacttccactgtatttcagcaaacgttaagcacgggagcagcagctgcccggtatgccgtatcaaatggaaggagctcccgttccgaggtcccttgcctgctgaattgccccaaggaaatgcgaggatcaatccagttcatgggtaccagaatgggggccatatgaccataccgcggccacttccacttcctcgcgcacgctcttttggccggcttcatcatctggccacgctgctgcctgacgctgaccctggcactttcaacgacgacgaacccttggatttgtcgtgcgaagaggctaacggcactcagcagggctgtttgagaacggtagagataaaagcatatccagagttcacccaagtgcctgaaaatacatcagaaagaaacttcactgttctagttcacctcaaggcaccgcctgctcagcaccttctgcagtcatccagcgatctcggcgacggcaacggagtaagcacgactcgtgcccctgttgatctcatcacggttcttgatgtcagtggaagtatggctggtaccaagctcgcgttgttgaagagggctatggggtttgtcatccagaaccttgggtcctctgaccggctctccgtcatcgccttctcgtcgtccgcacgcaggctcttcccgctccgtaggatgaccgagtctggccggcagcagagcttgctggctgttaactcactgacggcaaacggagggaccaatatcgcagagggcctcaggaagggctccaaggtgatcgaagagcgtcagtcgaagaatccagtgtgcagcatcatccttctatcagatggccaggacacttacacggtctcgccgaccgctggtgtacacaaaggagcgacagagtattgcgcgctcttgccatccacgaccacgaatggcagccagcaggtgcccgttcacgtcttcggattcggcgccgaccatgactcggtctcgctgcactccatctcgcagacttctggcgggaccttctcgttcatcgagacagaggccaccatccaagacgcgttcgcgcagtgcattggcgggcttctgagcgtggtcgcgcagggtctgcatgtgaaggtcgagagcctccaccctgacgtgcacttcggctccatcaggtcaggcagctactctagcagagtctcggatgacagcaggaatggctccgtggacgttggggacctgtacgctgaggaggagcgggattttctcgtgtctgtgaacgttccgccaggctgtggcgagacggcgctcctcaaggttggctgcgtctacaaggacccgctgatgaaggagacggtgaacatgtccggcgtgcaggtgaagatctccaggccagcgttcgtctcggcgcagagcgtgtcggtcgaggtggaccgccagaagaaccgtctccacgccgccgaggtgatggccgaggcgaggttgtccgcggagcgcggtgacctggccaacgcggtctcgctgctcgaggactgccggaggatgatcacggggtcggcgtcgggacagtccggtgaccgtctgtgccaggcgctggacgcggagctgaaggagatgcaggaccggatggccagccggcagaggtacgaggcgtccggccgggcgtatgtgctctcgggcctgagctcccactcgtggcagcgggcgaccgcgcgcggagactcgacggacagcgcgagcctggtccaggcctaccagacctcgtccatggtggacatgctgctgcgctcgcagacgatgagccgcccgtcgacccctcgaccagctccgcagatcaggcacgcgaagtcgttccccgcacgcccgcagccaaggtaaactgcatgcagctgggtgttgccgccgagaaggatttttgtggcgggaggacggcaccagggtatagtttgtgtgggtataagaggggatgtaggtgtaaatttggtgtggggtggtggaggtaaatggtgagaggtatgatattttataattgggggtaggggggctggtatacgtcctgggggaactgggcaggatggtggcctatttatttttgttttgttttttaatatttggtggtgacttggtatactctagtattgtactagctcctttgtgtggtgatgtacataagggaagggtatacacttggactctttgaggagggatggatacctgatcctggtccttgtccttgcaaggtttgtttcctcaacctagaaatggaagaaatggaaaaaggtttgctgccttttactgcaaatggaattaatgatgatcttgggtgcgttttcttgtggatatatcacgtggcatctcctcttggttcatatggtttgcatcact

SEQ ID NO: 214052 - DNA, 2471 bp, Zea Mays
ctcggcgtggcgcacgaagcagagagcaggcgccatggaaatacgggaaaacatgtgctatatgcttgaccacaatgaagcctggtcagggccacgctctcttcacagcagagtgctcgcacaccttccacttccactgtatttcagcaaacgttaagcacgggagcagcagctgcccggtatgccgtatcaaatggaaggagctcccgttccgaggtcccttgcctgctgaattgccccaaggaaatgcgaggatcaatccagttcatgggtaccagaatgggggccatatgaccataccgcggccacttccacttcctcgcgcacgctcttttggccggcttcatcatctggccacgctgctgcctgacgctgaccctggcactttcaacgacgacgaacccttggatttgtcgtgcgaagaggctaacggcactcagcagggctgtttgagaacggtagagataaaagcatatccagagttcacccaagtgcctgaaaatacatcagaaagaaacttcactgttctagttcacctcaaggcaccgcctgctcagcaccttctgcagtcatccagcgatctcggcgacggcaacggagtaagcacgactcgtgcccctgttgatctcatcacggttcttgatgtcagtggaagtatggctggtaccaagctcgcgttgttgaagagggctatggggtttgtcatccagaaccttgggtcctctgaccggctctccgtcatcgccttctcgtcgtccgcacgcaggctcttcccgctccgtaggatgaccgagtctggccggcagcagagcttgctggctgttaactcactgacggcaaacggagggaccaatatcgcagagggcctcaggaagggctccaaggtgatcgaagagcgtcagtcgaagaatccagtgtgcagcatcatccttctatcagatggccaggacacttacacggtctcgccgaccgctggtgtacacaaaggagcgacagagtattgcgcgctcttgccatccacgaccacgaatggcagccagcaggtgcccgttcacgtcttcggattcggcgccgaccatgactcggtctcgctgcactccatctcgcagacttctggcgggaccttctcgttcatcgagacagaggccaccatccaagacgcgttcgcgcagtgcattggcgggcttctgagcgtggtcgcgcagggtctgcatgtgaaggtcgagagcctccaccctgacgtgcacttcggctccatcaggtcaggcagctactctagcagagtctcggatgacagcaggaatggctccgtggacgttggggacctgtacgctgaggaggagcgggattttctcgtgtctgtgaacgttccgccaggctgtggcgagacggcgctcctcaaggttggctgcgtctacaaggacccgctgatgaaggagacggtgaacatgtccggcgtgcaggtgaagatctccaggccagcgttcgtctcggcgcagagcgtgtcggtcgaggtggaccgccagaagaaccgtctccacgccgccgaggtgatggccgaggcgaggttgtccgcggagcgcggtgacctggccaacgcggtctcgctgctcgaggactgccggaggatgatcacggggtcggcgtcgggacagtccggtgaccgtctgtgccaggcgctggacgcggagctgaaggagatgcaggaccggatggccagccggcagaggtacgaggcgtccggccgggcgtatgtgctctcgggcctgagctcccactcgtggcagcgggcgaccgcgcgcggagactcgacggacagcgcgagcctggtccaggcctaccagacctcgtccatggtggacatgctgctgcgctcgcagacgatgagccgcccgtcgacccctcgaccagctccgcagatcaggcacgcgaagtcgttccccgcacgcccgcagccaaggtaaactgcatgcagctgggtgttgccgccgagaaggatttttgtggcgggaggacggcaccagggtatagtttgtgtgggtataagaggggatgtaggtgtaaatttggtgtggggtggtggaggtaaatggtgagaggtatgatattttataattgggggtaggggggctggtatacgtcctgggggaactgggcaggatggtggcctatttatttttgttttgttttttaatatttggtggtgacttggtatactctagtattgtactagctcctttgtgtggtgatgtacataagggaagggtatacacttggactctttgaggagggatggatacctgatcctggtccttgtccttgcaaggtttgtttcctcaacctagaaatggaagaaatggaaaaaggtttgctgccttttactgcaaatggaattaatgatgatcttgggtgcgttttcttgtggatatatcacgtggcatctcctcttggttcatatggtttgcatcact

SEQ ID NO: 214053 - DNA, 1405 bp, Zea Mays
cgaaacgggcccgaaagaatgggccatgtggcgcctcgggcttatctgcagaaaggggatctccgattcgcacctccaccacctgccgcgccggccggcgagcctcttcctcttcctccggtcgctccccttcccatctccatcttgatttcgattctctggtggctgggaaagcctgcgagagcgcgataaccggaaagatctgagctgctgcaaccgatctccggcgccatggggttcctcgaggacttccaagccagtgttgaagcattgccatctatgctgcatcggaactattcattaatgcgagagttggataaaagtttgcatggtgtgcaactagaaaatgagcagcgctgtcaacaagaaatagaggacattaagcatggacttgaatctggaagtattacatatgacccagcaaaattgaaattttccgaagaagcaatggaggagcagaaacattgtgttagaattgctgacgagaaggtggctttagccactcagacttatgacttagttgatgctcacatccaacagctagatcagtttatgaggaagcttgaagaaatccggcaaggaaaagaggcagctgctgctgttactgcagggactgctgttgctactactgccactccaaccgtgaatgctggagcgacaactgctgatgctaatccgaagagtggacgatctggcgaaagaggcagaggggggccaaggtacccacggagcagtcagtgccagtgccagtgccactgccacctattgacttagagttgcctgtggatcctaacgaaccgacatactgcctctgcaaccaagtcagctatggtgagatggtggcatgcgacaatcctaatgtatgtgacatgccctttgtttactccagttttgacaagttccatttttcatgcccgtgctttggctgtatatcactttcgtatccatttggcagtgcaaaatcgagtggtatcactatggctgtgtgggcgtcaaggagcaacccaagggaaagtggtattgcccaaactgcatcggattccagaagaagcgaaaaggcaagtgatatgcagtccacaggctgctgtgctagtgtgtccttgcttgttaattgtgttgctgatgttgggtaacaaatgtagtagtagttgctgcctgtgacagtgcataccgttgtagatccagtgttctgtacatgttactcctccttcggtgctcgtagtttagggccatcaaccatttgttaacttcatggcctttttggcgattcatgccccttgtatgggtttcgcaatatcatgtctccttttcctggtatcacaatattatgcaatacagccggtttgtaacttttccctctttgaaaaaagaatatctaattagaattcctaaaatttgattgtct

SEQ ID NO: 214054 - DNA, 2024 bp, Zea Mays
caccagctcggcacccgcgcgcccggccaaatcgcggcgtacgtgccgcctgctgtctccggccgaacgatcgccagctcgcgcgcccggccaaaatcgcgggcgtgcggctggcctggcttggcctggcgcgtgtggtgtgcgtccgccgcccggtctagttctctgcctagtatatatgatcagcagcccgccacccgcgcgcgcgccgggccaaatggcggcggcgtcgacgggcttggaaccaggccagaatccagcgcggcctggagccgggggcgctgccgcgcgtcctggggcgctccgacccggttttggattcagtgactagggggatatcgaatcattgggcaagtacgtagtgtgtgattcatcggagtcggggcatcttgaatcctggattgtcagtcaaaatcaacctccctgcctgtgcctgcctccatctccatgccaaaacagcagcagagacagcgtggaatattcggatcccttggggaggctgggacccagtcccaccacctgaacaacacgaagctgcattaaaaggcgtccggcgggtggagaccagagcagcgcacaagcagcaacgccaacgccaacccaacccaaccctaacccgatctcaccgaggacacacagacaccagaccaccggagcggaccaagtacgagcatgggcggcgccgcggaggaggcgttgcggcgggagtacgtggtcggcgaggagatcgggcgcggccggttcgggacggtccgccgctgctacgccgccgccacgggggagccgttcgcgctcaagacgacgcccaaggcggcgctgcgggcggacccgctggacctggcgctggcggagcaggagcccaaggtgcaccacctggcgtctgccgccagccgccacgtggtcgcgctgcacgccgccttcgtggacgccgacgccgtgcacctggtgctggacctgtgcgcgggcggggacctgttcgcgctcgtctccgcgcggggcgcgctcccggagcccgaggcggcggagctgatggcgcagctcgccgacgcgctcgccggctgccaccgccgcggggtcgcgcaccgcgacgtcaagcccgacaacctcctcttcgacgccgccgccggcggcgcgctcaggctcggggacttcggctccgccgcctggttcggggacggcaggcccatgacggggctggtcgggacgccctactacgtcgcgcccgaggtggtggccggcagggagtacaccgagaaggtggacgtctggagcgccggggtcgtgctctacatgatgctctccgggaccgtgcccttctccggcgccaccgcgggggagatcttccaggccgtgctccgcgggaacctgcgcttccctccgcgcgccttcgccgccgtctcgcccgaggccaaggacctcctgcgccgcatgctctgcagggacgtctggcgcaggctctccgccgagcaagtcctgagtcacccatggattgtgactcgcggcggaagtgtgcctggcggtagactggtttagatgctccgcgccgcatccgatgaatctccatccgaagtgtacatagtggcgtcctccatccaatccaagaggagtagagaaggaccttttgctgttgatctcttcgctatggttctggcaaatgatcgtgaatttggacactagtgctgtagttggttaccagtagcacgcagaaagaagtaatcgttaggctaagcagggatttaggagggctgcctcttcctgggtttgctctgttctgcagtaatcctgtgctcgtcttagcttgtttgcattgcaacccaaacccatgtatgtgtatagcacagccttcttatggctgaggaagagacgactagctctgttcaggagaaaatgcttccgggttcactgtgactgtgagtttctactgtgttggaaccttgaatgaaatatacatcctgaatgtgttaggcttcaaacgattactccctccgtttctttttacttgttactggatagatgaatttaat

SEQ ID NO: 214055 - DNA, 3838 bp, Zea Mays
cgcccttttgtcgaagtgagggcacgtcacggatgacgtacacaaactgtacgtctgatccatgcacatggtcgcatggaccgaatccggacgttcgcaccgatccaaaagaccaaaacagatgacgatctacatggagccatggactgaatgctgatgttcgcagaacggatagtccagagttcaaagaaactcgagactacagactactcacaggtcactgtctcactcacttgaagctctaacagcaagccatggcaggacgagaagcggacaaagacccagagctgaaggtgctcggcgtgtggtcgagcccgttcgttatcagggcccgcgtcgcgctaaacctcaagggcctcgcctaccgatacgtggaggacaacctggacagcaagagcgagctcctcctcgcctccaaccacgtgcacgggaaggtgccggtgctcctccacgacggcaggcccgtctgcgagtcccgggtcatcgtggagtatatcgacgaggccttcccggccagcggcccctgcctcctccccgccgacccgtaccgccgcgcggtcgaccgcttctgggcctcctacgtcgacgacaagctctttcccacctggatacccgtctacaacggcaggacgagcgaggacagggtcgcggcggcgaggcaggtagtggccgtgctggagaagtttgagcgggcgttcgatgagtgctccggaggcaaggcgttcttcggcggggacgctgctggcctcgtggacgtcgtgctaggcggcttcctcgggtggctgcgcgcgtctgaggtgatgtgtggcgtgagggtcatcgaccccgccaagacgccgctgctggcggcgtgggcggaccggttcgccgcgctcgacggcgtcagggaggtgatacctgacgtgcagaggctgctggagtataacaagattaggcgagctcgtcgtgggctgccgtaggtgctgggccttgggccatctatctgccagcatgtggtcagtcaactctaagcaggagactttgacaaggttaaagtttagttcatgaaggtgggcaatctaattaggatgctcatgctttagctaggagtgccattagttttcctgttgaaaggcatgtttggttcctctttcctactgaaagagtttgtaatatctttactactattaagaaggtaaggggtatgctgccattactagttctgtcattcccattcctaccgttctcattcctattcccattcccggttctgtctccacccccgatgcccctcccccgcgtaacccccgtggctcaccgcaccacacgaaacctctgatcccatgacctcgacggcggccatggccggcaagcaggtgcaataccgtgccccaactcgccccgcacgtcgcccatcctgtcacccccacgcgatggccgcaactccgcgagacaaccgctgtccgccccccaccaccctcccccgcgacgccccctcccacgacgctttgtgcgcgtgagtctgcgactgccgacagccgtcgccgtactggagcccgatctgctggctccccctcaacctcaccaccatgcccccatcggacctcgtcacgccgtgcgtggcggtgccggtgatggacgcggcgttgctagccgtcatcgtcccgcctcgacgttcgatccatgctcgccacggttggtgctcgcacgcgatgtggcgtggcgaggttaccgcgggcgccgcggaggtggagggggaaggggaggatgagggcacgggcaagagagtgcatcgcggtggacggtctcgtgagtgagtgctgctgcctgcccctctctctctgcctgcgttctcctggtgctgctctccctctcctcccctgcttcgacctcccgcctttccccaccgtttcttggatttctaggatccagacaaccgcccttgtgagcctgccttcctgcctactacctgcgtacatacaggagggaccttgggtgatccgggtgcttggtttcttggttctgcggctttcgctgctgttggatttgccgagccggagccgccggagatgaccgtcgacgagctgaagctgcaggcaagggccagcggcggccacgacctaaggaccagttccccgtcggcatgcgcgtgctcgccgtcgacgatgacccgacctgcctcaaggtccttgagaacctcttgttccgctgccagtaccatgtgacaacaatgggacaggcaaccacgaccttgagctgctgagggagaaaaaggaccagtttgaccttgtgatcagcaacgtccacatgctggacatggacggcttcaagctcctcaagcttgtgggtctcgagatggaccttccggggattaacagctgaaaacctcgcccgatttgtaaagaagttttcttgttcaatgcggcattgaatttgggaggaatggcaagtctcatgaaaacttctatatgccctacacgtgaccactaaaagaaagagttagacaggacaaaaggctgcaggtgaagcggcagaagaagagcttttacaataaaccctaaacccttacaatgctgattttgatggagatgaaatgaatttgcatgtccctcagacggaggaagctcgcactgaagcgcttaattctcataggggttcaaaataatttatgtactcctaagaatgtgatggggggtacttcaatgcaataatgagcttcccacaaaattacccaaacagcccgccatcagtcagatttacctctgaaatgtggcatccaaatgtctatcctgatgggtgggtttgtatctctattcttcatccacccagtgaagatccaaacggttatgagctcgcaagtgagcgatggacacctgtgcacacagtatggcttcgtatactttgtttacatatcttttccccattgtaatgatactcatctcccttttatgtgtatactttttagagagaatattaccttgtagtctcattgtttcagtttatggtccaatttacaatggcttcactgtaaatgggaaaacaactcggtaggaatgcttttttgaattataaattatttatatttcatacaatgcttataggtatgtgatgagtcctccaatctgagaagtagagcatggtaaagcactccaagctgctctttcatcgggaaatttataggtgacacttgtgtcatacattgaactatggagtcaaacaaattacatattatccttcaacatttttcaccagtgggaactgtagttattgcatagaatagatggtatattaatcgttgagagccaatgtttacattaactgttatgcagaagaaaatttatgttttattttatatctaactgtactttgttgcagcttgtaggtactgatcacagcacattcaactccacacagattgtccatgtttcttttagtcaccattgatttatcactaggtcattgtgtttgtggccaacgagtattgtttctaacagttatgttcccatagctagctggattcattgttgtgttttgttcagggtactttcaccacttctggtatggttctgtctgtaatgtgccagggattattatattgtttttggtttggatttggaatggtttggggtccacaacgatgatgcgtcagagctgttccaaggattggatgatttccattcccctgctgccaattcgactaggctcgccgtctccgctctgcccaactggcaccaagcagccaatggaacttgagcagccaatggatgatttccattcccctgctgccaattctctgaactgcttcgacccttcaactcaatctgcatgtacccaggattctttgcttgctcttctactt

SEQ ID NO: 214056 - DNA, 2198 bp, Zea Mays
tccggacgttcgcaccgatccaaaagaccaaaacagatgacgatctacatggagccatggactgaatgctgatgttcgcagaacggatagtccagagttcaaagaaactcgagactacagactactcacaggtcactgtctcactcacttgaagctctaacagcaagccatggcaggacgagaagcggacaaagacccagagctgaaggtgctcggcgtgtggtcgagcccgttcgttatcagggcccgcgtcgcgctaaacctcaagggcctcgcctaccgatacgtggaggacaacctggacagcaagagcgagctcctcctcgcctccaaccacgtgcacgggaaggtgccggtgctcctccacgacggcaggcccgtctgcgagtcccgggtcatcgtggagtatatcgacgaggccttcccggccagcggcccctgcctcctccccgccgacccgtaccgccgcgcggtcgaccgcttctgggcctcctacgtcgacgacaagctctttcccacctggatacccgtctacaacggcaggacgagcgaggacagggtcgcggcggcgaggcaggtagtggccgtgctggagaagtttgagcgggcgttcgatgagtgctccggaggcaaggcgttcttcggcggggacgctgctggcctcgtggacgtcgtgctaggcggcttcctcgggtggctgcgcgcgtctgaggtgatgtgtggcgtgagggtcatcgaccccgccaagacgccgctgctggcggcgtgggcggaccggttcgccgcgctcgacggcgtcagggaggtgatacctgacgtgcagaggctgctggagtataacaagattaggcgagctcgtcgtgggctgccgtaggtgctgggccttgggccatctatctgccagcatgtggtcagtcaactctaagcaggagactttgacaaggttaaagtttagttcatgaaggtgggcaatctaattaggatgctcatgctttagctaggagtgccattagttttcctgttgaaaggcatgtttggttcctctttcctactgaaagagtttgtaatatctttactactattaagaaggtaaggggtatgctgccattactagttctgtcattcccattcctaccgttctcattcctattcccattcccggttctgtctccacccccgatgcccctcccccgcgtaacccccgtggctcaccgcaccacacgaaacctctgatcccatgacctcgacggcggccatggccggcaagcaggtgcaataccgtgccccaactcgccccgcacgtcgcccatcctgtcacccccacgcgatggccgcaactccgcgagacaaccgctgtccgccccccaccaccctcccccgcgacgccccctcccacgacgctttgtgcgcgtgagtctgcgactgccgacagccgtcgccgtactggagcccgatctgctggctccccctcaacctcaccaccatgcccccatcggacctcgtcacgccgtgcgtggcggtgccggtgatggacgcggcgttgctagccgtcatcgtcccgcctcgacgttcgatccatgctcgccacggttggtgctcgcacgcgatgtggcgtggcgaggttaccgcgggcgccgcggaggtggagggggaaggggaggatgagggcacgggcaagagagtgcatcgcggtggacggtctcgtgatgacaacaatgggacaggcaaccacgaccttgagctgctgagggagaaaaaggaccagtttgaccttgtgatcagcaacgtccacatgctggacatggacggcttcaagctcctcaagcttgtgggtctcgagatggaccttccggggattaacagctgaaaacctcgcccgatttgtaaagaagttttcttgttcaatgcggcattgaatttgggaggaatggcaagtctcatgaaaacttctatatgccctacacgtgaccactaaaagaaagagttagacaggacaaaaggctgcaggtgaagcggcagaagaagagcttttacaataaaccctaaacccttacaatgctgattttgatggagatgaaatgaatttgcatgtccctcagacggaggaagctcgcactgaagcgcttaattctcataggggttcaaaataatttatgtactcctaagaatgttatgttttctgacatcatgcataatat

SEQ ID NO: 214057 - DNA, 2133 bp, Zea Mays
gcagaacggatagtccagagttcaaagaaactcgagactacagactactcacaggtcactgtctcactcacttgaagctctaacagcaagccatggcaggacgagaagcggacaaagacccagagctgaaggtgctcggcgtgtggtcgagcccgttcgttatcagggcccgcgtcgcgctaaacctcaagggcctcgcctaccgatacgtggaggacaacctggacagcaagagcgagctcctcctcgcctccaaccacgtgcacgggaaggtgccggtgctcctccacgacggcaggcccgtctgcgagtcccgggtcatcgtggagtatatcgacgaggccttcccggccagcggcccctgcctcctccccgccgacccgtaccgccgcgcggtcgaccgcttctgggcctcctacgtcgacgacaagctctttcccacctggatacccgtctacaacggcaggacgagcgaggacagggtcgcggcggcgaggcaggtagtggccgtgctggagaagtttgagcgggcgttcgatgagtgctccggaggcaaggcgttcttcggcggggacgctgctggcctcgtggacgtcgtgctaggcggcttcctcgggtggctgcgcgcgtctgaggtgatgtgtggcgtgagggtcatcgaccccgccaagacgccgctgctggcggcgtgggcggaccggttcgccgcgctcgacggcgtcagggaggtgatacctgacgtgcagaggctgctggagtataacaagattaggcgagctcgtcgtgggctgccgtaggtgctgggccttgggccatctatctgccagcatgtggtcagtcaactctaagcaggagactttgacaaggttaaagtttagttcatgaaggtgggcaatctaattaggatgctcatgctttagctaggagtgccattagttttcctgttgaaaggcatgtttggttcctctttcctactgaaagagtttgtaatatctttactactattaagaaggtaaggggtatgctgccattactagttctgtcattcccattcctaccgttctcattcctattcccattcccggttctgtctccacccccgatgcccctcccccgcgtaacccccgtggctcaccgcaccacacgaaacctctgatcccatgacctcgacggcggccatggccggcaagcagtgacaacaatgggacaggcaaccacgaccttgagctgctgagggagaaaaaggaccagtttgaccttgtgatcagcaacgtccacatgctggacatggacggcttcaagctcctcaagcttgtgggtctcgagatggaccttccggggattaacagctgaaaacctcgcccgatttgtaaagaagttttcttgttcaatgcggcattgaatttgggaggaatggcaagtctcatgaaaacttctatatgccctacacgtgaccactaaaagaaagagttagacaggacaaaaggctgcaggtgaagcggcagaagaagagcttttacaataaaccctaaacccttacaatgctgattttgatggagatgaaatgaatttgcatgtccctcagacggaggaagctcgcactgaagcgcttaattctcataggggttcaaaataatttatgtactcctaagaatgtgatggggggtacttcaatgcaataatgagcttcccacaaaattacccaaacagcccgccatcagtcagatttacctctgaaatgtggcatccaaatgtctatcctgatgggtgggtttgtatctctattcttcatccacccagtgaagatccaaacggttatgagctcgcaagtgagcgatggacacctgtgcacacacttgtaggtactgatcacagcacattcaactccacacagattgtccatgtttcttttagtcaccattgatttatcactaggtcattgtgtttgtggccaacgagtattgtttctaacagttatgttcccatagctagctggattcattgttgtgttttgttcagggtactttcaccacttctggtatggttctgtctgtaatgtgccagggattattatattgtttttggtttggatttggaatggtttggggtccacaacgatgatgcgtcagagct

SEQ ID NO: 214058 - DNA, 3034 bp, Zea Mays
aaactcgagactacagactactcacaggtcactgtctcactcacttgaagctctaacagcaagccatggcaggacgagaagcggacaaagacccagagctgaaggtgctcggcgtgtggtcgagcccgttcgttatcagggcccgcgtcgcgctaaacctcaagggcctcgcctaccgatacgtggaggacaacctggacagcaagagcgagctcctcctcgcctccaaccacgtgcacgggaaggtgccggtgctcctccacgacggcaggcccgtctgcgagtcccgggtcatcgtggagtatatcgacgaggccttcccggccagcggcccctgcctcctccccgccgacccgtaccgccgcgcggtcgaccgcttctgggcctcctacgtcgacgacaagctctttcccacctggatacccgtctacaacggcaggacgagcgaggacagggtcgcggcggcgaggcaggtagtggccgtgctggagaagtttgagcgggcgttcgatgagtgctccggaggcaaggcgttcttcggcggggacgctgctggcctcgtggacgtcgtgctaggcggcttcctcgggtggctgcgcgcgtctgaggtgatgtgtggcgtgagggtcatcgaccccgccaagacgccgctgctggcggcgtgggcggaccggttcgccgcgctcgacggcgtcagggaggtgatacctgacgtgcagaggctgctggagtataacaagattaggcgagctcgtcgtgggctgccgtaggtgctgggccttgggccatctatctgccagcatgtggtcagtcaactctaagcaggagactttgacaaggttaaagtttagttcatgaaggtgggcaatctaattaggatgctcatgctttagctaggagtgccattagttttcctgttgaaaggcatgtttggttcctctttcctactgaaagagtttgtaatatctttactactattaagaaggtaaggggtatgctgccattactagttctgtcattcccattcctaccgttctcattcctattcccattcccggttctgtctccacccccgatgcccctcccccgcgtaacccccgtggctcaccgcaccacacgaaacctctgatcccatgacctcgacggcggccatggccggcaagcaggtgcaataccgtgccccaactcgccccgcacgtcgcccatcctgtcacccccacgcgatggccgcaactccgcgagacaaccgctgtccgccccccaccaccctcccccgcgacgccccctcccacgacgctttgtgcgcgtgagtctgcgactgccgacagccgtcgccgtactggagcccgatctgctggctccccctcaacctcaccaccatgcccccatcggacctcgtcacgccgtgcgtggcggtgccggtgatggacgcggcgttgctagccgtcatcgtcccgcctcgacgttcgatccatgctcgccacggttggtgctcgcacgcgatgtggcgtggcgaggttaccgcgggcgccgcggaggtggagggggaaggggaggatgagggcacgggcaagagagtgcatcgcggtggacggtctcgtgatgacaacaatgggacaggcaaccacgaccttgagctgctgagggagaaaaaggaccagtttgaccttgtgatcagcaacgtccacatgctggacatggacggcttcaagctcctcaagcttgtgggtctcgagatggaccttccggggattaacagctgaaaacctcgcccgatttgtaaagaagttttcttgttcaatgcggcattgaatttgggaggaatggcaagtctcatgaaaacttctatatgccctacacgtgaccactaaaagaaagagttagacaggacaaaaggctgcaggtgaagcggcagaagaagagcttttacaataaaccctaaacccttacaatgctgattttgatggagatgaaatgaatttgcatgtccctcagacggaggaagctcgcactgaagcgcttaattctcataggggttcaaaataatttatgtactcctaagaatgtgatggggggtacttcaatgcaataatgagcttcccacaaaattacccaaacagcccgccatcagtcagatttacctctgaaatgtggcatccaaatgtctatcctgatgggtgggtttgtatctctattcttcatccacccagtgaagatccaaacggttatgagctcgcaagtgagcgatggacacctgtgcacacagtatggcttcgtatactttgtttacatatcttttccccattgtaatgatactcatctcccttttatgtgtatactttttagagagaatattaccttgtagtctcattgtttcagtttatggtccaatttacaatggcttcactgtaaatgggaaaacaactcggtaggaatgcttttttgaattataaattatttatatttcatacaatgcttataggtatgtgatgagtcctccaatctgagaagtagagcatggtaaagcactccaagctgctctttcatcgggaaatttataggtgacacttgtgtcatacattgaactatggagtcaaacaaattacatattatccttcaacatttttcaccagtgggaactgtagttattgcatagaatagatggtatattaatcgttgagagccaatgtttacattaactgttatgcagaagaaaatttatgttttattttatatctaactgtactttgttgcagcttgtaggtactgatcacagcacattcaactccacacagattgtccatgtttcttttagtcaccattgatttatcactaggtcattgtgtttgtggccaacgagtattgtttctaacagttatgttcccatagctagctggattcattgttgtgttttgttcagggtactttcaccacttctggtatggttctgtctgtaatgtgccagggattattatattgtttttggtttggatttggaatggtttggggtccacaacgatgatgcgtcagagct

SEQ ID NO: 214059 - DNA, 2789 bp, Zea Mays
agactactcacaggtcactgtctcactcacttgaagctctaacagcaagccatggcaggacgagaagcggacaaagacccagagctgaaggtgctcggcgtgtggtcgagcccgttcgttatcagggcccgcgtcgcgctaaacctcaagggcctcgcctaccgatacgtggaggacaacctggacagcaagagcgagctcctcctcgcctccaaccacgtgcacgggaaggtgccggtgctcctccacgacggcaggcccgtctgcgagtcccgggtcatcgtggagtatatcgacgaggccttcccggccagcggcccctgcctcctccccgccgacccgtaccgccgcgcggtcgaccgcttctgggcctcctacgtcgacgacaagctctttcccacctggatacccgtctacaacggcaggacgagcgaggacagggtcgcggcggcgaggcaggtagtggccgtgctggagaagtttgagcgggcgttcgatgagtgctccggaggcaaggcgttcttcggcggggacgctgctggcctcgtggacgtcgtgctaggcggcttcctcgggtggctgcgcgcgtctgaggtgatgtgtggcgtgagggtcatcgaccccgccaagacgccgctgctggcggcgtgggcggaccggttcgccgcgctcgacggcgtcagggaggtgatacctgacgtgcagaggctgctggagtataacaagattaggcgagctcgtcgtgggctgccgtaggtgctgggccttgggccatctatctgccagcatgtggtcagtcaactctaagcaggagactttgacaaggttaaagtttagttcatgaaggtgggcaatctaattaggatgctcatgctttagctaggagtgccattagttttcctgttgaaaggcatgtttggttcctctttcctactgaaagagtttgtaatatctttactactattaagaaggtaaggggtatgctgccattactagttctgtcattcccattcctaccgttctcattcctattcccattcccggttctgtctccacccccgatgcccctcccccgcgtaacccccgtggctcaccgcaccacacgaaacctctgatcccatgacctcgacggcggccatggccggcaagcagtgacaacaatgggacaggcaaccacgaccttgagctgctgagggagaaaaaggaccagtttgaccttgtgatcagcaacgtccacatgctggacatggacggcttcaagctcctcaagcttgtgggtctcgagatggaccttccggggattaacagctgaaaacctcgcccgatttgtaaagaagttttcttgttcaatgcggcattgaatttgggaggaatggcaagtctcatgaaaacttctatatgccctacacgtgaccactaaaagaaagagttagacaggacaaaaggctgcaggtgaagcggcagaagaagagcttttacaataaaccctaaacccttacaatgctgattttgatggagatgaaatgaatttgcatgtccctcagacggaggaagctcgcactgaagcgcttaattctcataggggttcaaaataatttatgtactcctaagaatgtgatggggggtacttcaatgcaataatgagcttcccacaaaattacccaaacagcccgccatcagtcagatttacctctgaaatgtggcatccaaatgtctatcctgatgggtgggtttgtatctctattcttcatccacccagtgaagatccaaacggttatgagctcgcaagtgagcgatggacacctgtgcacacagtatggcttcgtatactttgtttacatatcttttccccattgtaatgatactcatctcccttttatgtgtatactttttagagagaatattaccttgtagtctcattgtttcagtttatggtccaatttacaatggcttcactgtaaatgggaaaacaactcggtaggaatgcttttttgaattataaattatttatatttcatacaatgcttataggtatgtgatgagtcctccaatctgagaagtagagcatggtaaagcactccaagctgctctttcatcgggaaatttataggtgacacttgtgtcatacattgaactatggagtcaaacaaattacatattatccttcaacatttttcaccagtgggaactgtagttattgcatagaatagatggtatattaatcgttgagagccaatgtttacattaactgttatgcagaagaaaatttatgttttattttatatctaactgtactttgttgcagcttgtaggtactgatcacagcacattcaactccacacagattgtccatgtttcttttagtcaccattgatttatcactaggtcattgtgtttgtggccaacgagtattgtttctaacagttatgttcccatagctagctggattcattgttgtgttttgttcagggtactttcaccacttctggtatggttctgtctgtaatgtgccagggattattatattgtttttggtttggatttggaatggtttggggtccacaacgatgatgcgtcagagctgttccaaggattggatgatttccattcccctgctgccaattcgactaggctcgccgtctccgctctgcccaactggcaccaagcagccaatggaacttgagcagccaatggatgatttccattcccctgctgccaattctctgaactgcttcgacccttcaactcaatctgcatgtacccaggattctttgcttgctcttctactt

SEQ ID NO: 214060 - DNA, 2529 bp, Zea Mays
gtccagaaggctggcctgtttgtacatctccgcatcggtccctacatttgtggcgagtggaacttcggcggcttcccagtttggttgaagtatgtaccgggcatcagcttcaggacagacaacgaacctttcaagggtttcactgagaaaattgtgggaatgatgaagagcgaaaacctctttgcatcccaaggtggcccaattatcctctctcaggcaagtataatcttttccttagatttgattgagaatgagtatgggccagaaggcagggagtttggtgccgcaggtcaggcatatatcaactgggcagcaaagatggcagtcggattgggtactggtgtgccgtgggtgatgtgcaaggaggaggatgcacctgatccagtgatcaatgcatgcaatggtttctactgtgatgcattttctcctaacaaaccttacaagcccacaatgtggactgaagcttggagtggctggttcacggaatttggtgggaccatccgccaacgaccggttgaagatcttgcatttgctgttgctagatttgtacaaaagggtggttcttttatcaattactacatgtatcatggaggaacaaattttgggcgcactgctgggggtcccttcatcacaacaagctatgattatgatgctccaattgatgaatatggacttgttagagaaccaaagcacagtcatcttaaagaactccacagagctgttaagttatgcgagcaggctttggtttctgttgacccagcaattactacccttggtaccatgcaagaggcccgcgtcttccaatctccatctggttgtgcagctttccttgcaaactacaattctaactcctatgcgaaagttgtgttcaacaatgagcaatacagcctaccaccttggtcgattagcatccttcctgattgcaaaaatgttgtttttaacagtgccacagttggtgttcagacatctcagatgcaaatgtggggagatggtgcctcatcaatgacgtgggagaggtatgatgaggaggttgattctctggcagctgctccattgctcaccacaactggtttgcttgagcagcttaatgtcacgagagacagcagtgattatttgtggtacatcaccagtgttgacataagctcatctgaaaactttctacaaggtggcggcaagcctctgtctctcagtgtgcagtctgctggtcatgccttgcatgtctttgtcaatggacaacttcaaggttctgcttatggtaccagggaagatcgaagaatcaaatataatggcaatgctagccttcgagctggtactaacaaaattgcactgctgagtgttgcctgtggattgccgaatgttggagtgcattatgagacgtggaacactggtgttggtggtcctgttgtgcttcatgggctggatgaaggttcacgagaccttacttggcagacttggtcctatcaggttggcctgaaaggcgaacagatgaatctgaactccatagaaggctcaagctcagttgaatggatgcaagggtcattgatagctcaaaaccagcagccattggcctggtatagggcttactttgagactcccagcggggacgagccattggctttggatatgggtagcatgggcaagggccaaatctggataaatggacaaagcattggacgctactggacagcatatgcagatggggactgcaaagaatgcagttacacgggaaccttccgggcacccaaatgtcaatcaggctgtggtcagcccacgcaacgatggtatcatgtgccaaagtcctggctgcagcccaccagaaacctgctggtagtcttcgaggaacttggtggggattcatcgaagatcgccctagtgaagaggtcagtctcaagtgtctgtgctgatgtatctgaggatcacccaaacatcaagaactggcagatcgaaagctacggcgagcgcgagtaccacagggcccaaagtgcacttaagatgtgcacgtgggcagtccatttccgcaatcaaattcgcaagctttgggacacctacgggaacctgtggagatttccagcaaggagattgccactcagctaactctcacacagtcctagagaagaaatgcattgggctccaaagatgcgtcgtcgccatctcccccgagagctttggaggagacccctgcccgagcgtgacgaaaagggtggcggtccaggcagtatgttctcccgtcgcgtagccttacttctccaagcaatggatttggaaggcggtcgacaaaaaaaaaaaaataaaaaatggtcgaaaccagtgcagggtgagtggaactgtaagtatcgtcgactttgattattagatgtggctggcttgagaggttagcagcattcgttgtcggattccagattaggatttgtagtctgctgcatctccatgaattgttcaaagcggccggctggataatgttgtagctggtccaggaatgcagctgtagagagagagagagagagagagagagagagagagagagagaga

SEQ ID NO: 214061 - DNA, 2278 bp, Zea Mays
ggtccagaaggctggcctgtttgtacatctccgcatcggtccctacatttgtggcgagtggaacttcggcggcttcccagtttggttgaagtatgtaccgggcatcagcttcaggacagacaacgaacctttcaagatcaatgcatgcaatggtttctactgtgatgcattttctcctaacaaaccttacaagcccacaatgtggactgaagcttggagtggctggttcacggaatttggtgggaccatccgccaacgaccggttgaagatcttgcatttgctgttgctagatttgtacaaaagggtggttcttttatcaattactacatgtatcatggaggaacaaattttgggcgcactgctgggggtcccttcatcacaacaagctatgattatgatgctccaattgatgaatatggacttgttagagaaccaaagcacagtcatcttaaagaactccacagagctgttaagttatgcgagcaggctttggtttctgttgacccagcaattactacccttggtaccatgcaagaggcccgcgtcttccaatctccatctggttgtgcagctttccttgcaaactacaattctaactcctatgcgaaagttgtgttcaacaatgagcaatacagcctaccaccttggtcgattagcatccttcctgattgcaaaaatgttgtttttaacagtgccacagttggtgttcagacatctcagatgcaaatgtggggagatggtgcctcatcaatgacgtgggagaggtatgatgaggaggttgattctctggcagctgctccattgctcaccacaactggtttgcttgagcagcttaatgtcacgagagacagcagtgattatttgtggtacatcaccagtgttgacataagctcatctgaaaactttctacaaggtggcggcaagcctctgtctctcagtgtgcagtctgctggtcatgccttgcatgtctttgtcaatggacaacttcaaggttctgcttatggtaccagggaagatcgaagaatcaaatataatggcaatgctagccttcgagctggtactaacaaaattgcactgctgagtgttgcctgtggattgccgaatgttggagtgcattatgagacgtggaacactggtgttggtggtcctgttgtgcttcatgggctggatgaaggttcacgagaccttacttggcagacttggtcctatcaggttggcctgaaaggcgaacagatgaatctgaactccatagaaggctcaagctcagttgaatggatgcaagggtcattgatagctcaaaaccagcagccattggcctggtatagggcttactttgagactcccagcggggacgagccattggctttggatatgggtagcatgggcaagggccaaatctggataaatggacaaagcattggacgctactggacagcatatgcagatggggactgcaaagaatgcagttacacgggaaccttccgggcacccaaatgtcaatcaggctgtggtcagcccacgcaacgatggtatcatgtgccaaagtcctggctgcagcccaccagaaacctgctggtagtcttcgaggaacttggtggggattcatcgaagatcgccctagtgaagaggtcagtctcaagtgtctgtgctgatgtatctgaggatcacccaaacatcaagaactggcagatcgaaagctacggcgagcgcgagtaccacagggcccaaagtgcacttaagatgtgcacgtgggcagtccatttccgcaatcaaattcgcaagctttgggacacctacgggaacctgtggagatttccagcaaggagattgccactcagctaactctcacacagtcctagagaagaaatgcattgggctccaaagatgcgtcgtcgccatctcccccgagagctttggaggagacccctgcccgagcgtgacgaaaagggtggcggtccaggcagtatgttctcccgtcgcgtagccttacttctccaagcaatggatttggaaggcggtcgacaaaaaaaaaaaaataaaaaatggtcgaaaccagtgcagggtgagtggaactgtaagtatcgtcgactttgattattagatgtggctggcttgagaggttagcagcattcgttgtcggattccagattaggatttgtagtctgctgcatctccatgaattgttcaaagcggccggctggataatgttgtagctggtccaggaatgcagctgtagagagagagagagagagagagagagagagagagagagagaga

SEQ ID NO: 214062 - DNA, 2266 bp, Zea Mays
aagacggtccagaaggctggcctgtttgtacatctccgcatcggtccctacatttgtggcgagtggaacttcggcggcttcccagtttggttgaagtatgtaccgggcatcagcttcaggacagacaacgaacctttcaagacggccatgcagggtttcactgagaaaattgtgggaatgatgaagagcgaaaacctctttgcatcccaaggtggcccaattatcctctctcaggcaagtataatcttttccttagatttgattgagaatgagtatgggccagaaggcagggagtttggtgccgcaggtcaggcatatatcaactgggcagcaaagatggcagtcggattgggtactggtgtgccgtgggtgatgtgcaaggaggaggatgcacctgatccagtgatcaatgcatgcaatggtttctactgtgatgcattttctcctaacaaaccttacaagcccacaatgtggactgaagcttggagtggctggttcacggaatttggtgggaccatccgccaacgaccggttgaagatcttgcatttgctgttgctagatttgtacaaaagggtggttcttttatcaattactacatgtatcatggaggaacaaattttgggcgcactgctgggggtcccttcatcacaacaagctatgattatgatgctccaattgatgaatatggttggtgttcagacatctcagatgcaaatgtggggagatggtgcctcatcaatgacgtgggagaggtatgatgaggaggttgattctctggcagctgctccattgctcaccacaactggtttgcttgagcagcttaatgtcacgagagacagcagtgattatttgtggtacatcaccagtgttgacataagctcatctgaaaactttctacaaggtggcggcaagcctctgtctctcagtgtgcagtctgctggtcatgccttgcatgtctttgtcaatggacaacttcaaggttctgcttatggtaccagggaagatcgaagaatcaaatataatggcaatgctagccttcgagctggtactaacaaaattgcactgctgagtgttgcctgtggattgccgaatgttggagtgcattatgagacgtggaacactggtgttggtggtcctgttgtgcttcatgggctggatgaaggttcacgagaccttacttggcagacttggtcctatcaggttggcctgaaaggcgaacagatgaatctgaactccatagaaggctcaagctcagttgaatggatgcaagggtcattgatagctcaaaaccagcagccattggcctggtatagggcttactttgagactcccagcggggacgagccattggctttggatatgggtagcatgggcaagggccaaatctggataaatggacaaagcattggacgctactggacagcatatgcagatggggactgcaaagaatgcagttacacgggaaccttccgggcacccaaatgtcaatcaggctgtggtcagcccacgcaacgatggtatcatgtgccaaagtcctggctgcagcccaccagaaacctgctggtagtcttcgaggaacttggtggggattcatcgaagatcgccctagtgaagaggtcagtctcaagtgtctgtgctgatgtatctgaggatcacccaaacatcaagaactggcagatcgaaagctacggcgagcgcgagtaccacagggcccaaagtgcacttaagatgtgcacgtgggcagtccatttccgcaatcaaattcgcaagctttgggacacctacgggaacctgtggagatttccagcaaggagattgccactcagctaactctcacacagtcctagagaagaaatgcattgggctccaaagatgcgtcgtcgccatctcccccgagagctttggaggagacccctgcccgagcgtgacgaaaagggtggcggtccaggcagtatgttctcccgtcgcgtagccttacttctccaagcaatggatttggaaggcggtcgacaaaaaaaaaaaaataaaaaatggtcgaaaccagtgcagggtgagtggaactgtaagtatcgtcgactttgattattagatgtggctggcttgagaggttagcagcattcgttgtcggattccagattaggatttgtagtctgctgcatctccatgaattgttcaaagcggccggctggataatgttgtagctggtccaggaatgcagctgtagagagagagagagagagagagagagagagagagagagagaga

SEQ ID NO: 214063 - DNA, 2714 bp, Zea Mays
aaattgttttagccgcccctctttcttccacgatgtgggaagggctgattcagaaagctaaagacggaggcttggatgtcattcagacctatgtcttttggaacggacatgagcctacgcctggaaattactatttcgaggagaggtacgatttagtcaggttcataaagacggtccagaaggctggcctgtttgtacatctccgcatcggtccctacatttgtggcgagtggaacttcggcggcttcccagtttggttgaagtatgtaccgggcatcagcttcaggacagacaacgaacctttcaagacggccatgcagggtttcactgagaaaattgtgggaatgatgaagagcgaaaacctctttgcatcccaaggtggcccaattatcctctctcaggcaagtataatcttttccttagatttgattgagaatgagtatgggccagaaggcagggagtttggtgccgcaggtcaggcatatatcaactgggcagcaaagatggcagtcggattgggtactggtgtgccgtgggtgatgtgcaaggaggaggatgcacctgatccagtgatcaatgcatgcaatggtttctactgtgatgcattttctcctaacaaaccttacaagcccacaatgtggactgaagcttggagtggctggttcacggaatttggtgggaccatccgccaacgaccggttgaagatcttgcatttgctgttgctagatttgtacaaaagggtggttcttttatcaattactacatgtatcatggaggaacaaattttgggcgcactgctgggggtcccttcatcacaacaagctatgattatgatgctccaattgatgaatatggacttgttagagaaccaaagcacagtcatcttaaagaactccacagagctgttaagttatgcgagcaggctttggtttctgttgacccagcaattactacccttggtaccatgcaagaggcccgcgtcttccaatctccatctggttgtgcagctttccttgcaaactacaattctaactcctatgcgaaagttgtgttcaacaatgagcaatacagcctaccaccttggtcgattagcatccttcctgattgcaaaaatgttgtttttaacagtgccacagttggtgttcagacatctcagatgcaaatgtggggagatggtgcctcatcaatgacgtgggagaggtatgatgaggaggttgattctctggcagctgctccattgctcaccacaactggtttgcttgagcagcttaatgtcacgagagacagcagtgattatttgtggtacatcaccagtgttgacataagctcatctgaaaactttctacaaggtggcggcaagcctctgtctctcagtgtgcagtctgctggtcatgccttgcatgtctttgtcaatggacaacttcaaggttctgcttatggtaccagggaagatcgaagaatcaaatataatggcaatgctagccttcgagctggtactaacaaaattgcactgctgagtgttgcctgtggattgccgaatgttggagtgcattatgagacgtggaacactggtgttggtggtcctgttgtgcttcatgggctggatgaaggttcacgagaccttacttggcagacttggtcctatcaggttggcctgaaaggcgaacagatgaatctgaactccatagaaggctcaagctcagttgaatggatgcaagggtcattgatagctcaaaaccagcagccattggcctggtatagggcttactttgagactcccagcggggacgagccattggctttggatatgggtagcatgggcaagggccaaatctggataaatggacaaagcattggacgctactggacagcatatgcagatggggactgcaaagaatgcagttacacgggaaccttccgggcacccaaatgtcaatcaggctgtggtcagcccacgcaacgatggtatcatgtgccaaagtcctggctgcagcccaccagaaacctgctggtagtcttcgaggaacttggtggggattcatcgaagatcgccctagtgaagaggtcagtctcaagtgtctgtgctgatgtatctgaggatcacccaaacatcaagaactggcagatcgaaagctacggcgagcgcgagtaccacagggcccaaagtgcacttaagatgtgcacgtgggcagtccatttccgcaatcaaattcgcaagctttgggacacctacgggaacctgtggagatttccagcaaggagattgccactcagctaactctcacacagtcctagagaagaaatgcattgggctccaaagatgcgtcgtcgccatctcccccgagagctttggaggagacccctgcccgagcgtgacgaaaagggtggcggtccaggcagtatgttctcccgtcgcgtagccttacttctccaagcaatggatttggaaggcggtcgacaaaaaaaaaaaaataaaaaatggtcgaaaccagtgcagggtgagtggaactgtaagtatcgtcgactttgattattagatgtggctggcttgagaggttagcagcattcgttgtcggattccagattaggatttgtagtctgctgcatctccatgaattgttcaaagcggccggctggataatgttgtagctggtccaggaatgcagctgtagagagagagagagagagagagagagagagagagagagagaga

SEQ ID NO: 214064 - DNA, 2610 bp, Zea Mays
atgcaatgctctcaaaagcaaattgttttagccgcccctctttcttccacgatgtgggaagggctgattcagaaagctaaagacggaggcttggatgtcattcagacctatgtcttttggaacggacatgagcctacgcctggaaattactatttcgaggagagcggcttcccagtttggttgaagtatgtaccgggcatcagcttcaggacagacaacgaacctttcaagacggccatgcagggtttcactgagaaaattgtgggaatgatgaagagcgaaaacctctttgcatcccaaggtggcccaattatcctctctcagattgagaatgagtatgggccagaaggcagggagtttggtgccgcaggtcaggcatatatcaactgggcagcaaagatggcagtcggattgggtactggtgtgccgtgggtgatgtgcaaggaggaggatgcacctgatccagtgatcaatgcatgcaatggtttctactgtgatgcattttctcctaacaaaccttacaagcccacaatgtggactgaagcttggagtggctggttcacggaatttggtgggaccatccgccaacgaccggttgaagatcttgcatttgctgttgctagatttgtacaaaagggtggttcttttatcaattactacatgtatcatggaggaacaaattttgggcgcactgctgggggtcccttcatcacaacaagctatgattatgatgctccaattgatgaatatggacttgttagagaaccaaagcacagtcatcttaaagaactccacagagctgttaagttatgcgagcaggctttggtttctgttgacccagcaattactacccttggtaccatgcaagaggcccgcgtcttccaatctccatctggttgtgcagctttccttgcaaactacaattctaactcctatgcgaaagttgtgttcaacaatgagcaatacagcctaccaccttggtcgattagcatccttcctgattgcaaaaatgttgtttttaacagtgccacagttggtgttcagacatctcagatgcaaatgtggggagatggtgcctcatcaatgacgtgggagaggtatgatgaggaggttgattctctggcagctgctccattgctcaccacaactggtttgcttgagcagcttaatgtcacgagagacagcagtgattatttgtggtacatcaccagtgttgacataagctcatctgaaaactttctacaaggtggcggcaagcctctgtctctcagtgtgcagtctgctggtcatgccttgcatgtctttgtcaatggacaacttcaaggttctgcttatggtaccagggaagatcgaagaatcaaatataatggcaatgctagccttcgagctggtactaacaaaattgcactgctgagtgttgcctgtggattgccgaatgttggagtgcattatgagacgtggaacactggtgttggtggtcctgttgtgcttcatgggctggatgaaggttcacgagaccttacttggcagacttggtcctatcaggttggcctgaaaggcgaacagatgaatctgaactccatagaaggctcaagctcagttgaatggatgcaagggtcattgatagctcaaaaccagcagccattggcctggtatagggcttactttgagactcccagcggggacgagccattggctttggatatgggtagcatgggcaagggccaaatctggataaatggacaaagcattggacgctactggacagcatatgcagatggggactgcaaagaatgcagttacacgggaaccttccgggcacccaaatgtcaatcaggctgtggtcagcccacgcaacgatggtatcatgtgccaaagtcctggctgcagcccaccagaaacctgctggtagtcttcgaggaacttggtggggattcatcgaagatcgccctagtgaagaggtcagtctcaagtgtctgtgctgatgtatctgaggatcacccaaacatcaagaactggcagatcgaaagctacggcgagcgcgagtaccacagggcccaaagtgcacttaagatgtgcacgtgggcagtccatttccgcaatcaaattcgcaagctttgggacacctacgggaacctgtggagatttccagcaaggagattgccactcagctaactctcacacagtcctagagaagaaatgcattgggctccaaagatgcgtcgtcgccatctcccccgagagctttggaggagacccctgcccgagcgtgacgaaaagggtggcggtccaggcagtatgttctcccgtcgcgtagccttacttctccaagcaatggatttggaaggcggtcgacaaaaaaaaaaaaataaaaaatggtcgaaaccagtgcagggtgagtggaactgtaagtatcgtcgactttgattattagatgtggctggcttgagaggttagcagcattcgttgtcggattccagattaggatttgtagtctgctgcatctccatgaattgttcaaagcggccggctggataatgttgtagctggtccaggaatgcagctgtagagagagagagagagagagagagagagagagagagagagaga

SEQ ID NO: 214065 - DNA, 3155 bp, Zea Mays
cacacacacgggtcgcggctagccggctagagtctcttttccaagcccactcttttttctcctctccacttcgttacgcggacagtgggaggagccacagccattataatagcacgccatacgccaaaagctccactggagccgagcagctactcctcccagtcccaggctcactgtcgctcctcccaagaacccgcccaaagaatcctagaaatccaagaaagggagcaaccaaaacaggaggaggtctgcaggaggaggagcaggtcagcaggaggaggtggtgctgaaggggaagatctcacaagtgtgtgaagaccacacagtctcgcgcactcgcaaacccagtgcgcgctgcggtcttcctcttcgcccaccttcttggagcggggaggttggccatgaggaggtggtggccggctgccctgctgggctgcgcagtggcggtgtccgttctggtggccgccgtggaatgcgctgtgacttacgacaagaaggcggtgctgattgatgggcagaggcggattctcttctccggatccatacactaccccaggagcacccctgatatgtgggaagggctgattcagaaagctaaagacggaggcttggatgtcattcagacctatgtcttttggaacggacatgagcctacgcctggaaattactatttcgaggagagcggcttcccagtttggttgaagtatgtaccgggcatcagcttcaggacagacaacgaacctttcaagacggccatgcagggtttcactgagaaaattgtgggaatgatgaagagcgaaaacctctttgcatcccaaggtggcccaattatcctctctcaggcaagtataatcttttccttagatttgattgagaatgagtatgggccagaaggcagggagtttggtgccgcaggtcaggcatatatcaactgggcagcaaagatggcagtcggattgggtactggtgtgccgtgggtgatgtgcaaggaggaggatgcacctgatccagtgatcaatgcatgcaatggtttctactgtgatgcattttctcctaacaaaccttacaagcccacaatgtggactgaagcttggagtggctggttcacggaatttggtgggaccatccgccaacgaccggttgaagatcttgcatttgctgttgctagatttgtacaaaagggtggttcttttatcaattactacatgtatcatggaggaacaaattttgggcgcactgctgggggtcccttcatcacaacaagctatgattatgatgctccaattgatgaatatggacttgttagagaaccaaagcacagtcatcttaaagaactccacagagctgttaagttatgcgagcaggctttggtttctgttgacccagcaattactacccttggtaccatgcaagaggcccgcgtcttccaatctccatctggttgtgcagctttccttgcaaactacaattctaactcctatgcgaaagttgtgttcaacaatgagcaatacagcctaccaccttggtcgattagcatccttcctgattgcaaaaatgttgtttttaacagtgccacagttggtgttcagacatctcagatgcaaatgtggggagatggtgcctcatcaatgacgtgggagaggtatgatgaggaggttgattctctggcagctgctccattgctcaccacaactggtttgcttgagcagcttaatgtcacgagagacagcagtgattatttgtggtacatcaccagtgttgacataagctcatctgaaaactttctacaaggtggcggcaagcctctgtctctcagtgtgcagtctgctggtcatgccttgcatgtctttgtcaatggacaacttcaaggttctgcttatggtaccagggaagatcgaagaatcaaatataatggcaatgctagccttcgagctggtactaacaaaattgcactgctgagtgttgcctgtggattgccgaatgttggagtgcattatgagacgtggaacactggtgttggtggtcctgttgtgcttcatgggctggatgaaggttcacgagaccttacttggcagacttggtcctatcaggttggcctgaaaggcgaacagatgaatctgaactccatagaaggctcaagctcagttgaatggatgcaagggtcattgatagctcaaaaccagcagccattggcctggtatagggcttactttgagactcccagcggggacgagccattggctttggatatgggtagcatgggcaagggccaaatctggataaatggacaaagcattggacgctactggacagcatatgcagatggggactgcaaagaatgcagttacacgggaaccttccgggcacccaaatgtcaatcaggctgtggtcagcccacgcaacgatggtatcatgtgccaaagtcctggctgcagcccaccagaaacctgctggtagtcttcgaggaacttggtggggattcatcgaagatcgccctagtgaagaggtcagtctcaagtgtctgtgctgatgtatctgaggatcacccaaacatcaagaactggcagatcgaaagctacggcgagcgcgagtaccacagggcccaaagtgcacttaagatgtgcacgtgggcagtccatttccgcaatcaaattcgcaagctttgggacacctacgggaacctgtggagatttccagcaaggagattgccactcagctaactctcacacagtcctagagaagaaatgcattgggctccaaagatgcgtcgtcgccatctcccccgagagctttggaggagacccctgcccgagcgtgacgaaaagggtggcggtccaggcagtatgttctcccgtcgcgtagccttacttctccaagcaatggatttggaaggcggtcgacaaaaaaaaaaaaataaaaaatggtcgaaaccagtgcagggtgagtggaactgtaagtatcgtcgactttgattattagatgtggctggcttgagaggttagcagcattcgttgtcggattccagattaggatttgtagtctgctgcatctccatgaattgttcaaagcggccggctggataatgttgtagctggtccaggaatgcagctgtagagagagagagagagagagagagagagagagagagagagaga

SEQ ID NO: 214066 - DNA, 3205 bp, Zea Mays
cacacacacgggtcgcggctagccggctagagtctcttttccaagcccactcttttttctcctctccacttcgttacgcggacagtgggaggagccacagccattataatagcacgccatacgccaaaagctccactggagccgagcagctactcctcccagtcccaggctcactgtcgctcctcccaagaacccgcccaaagaatcctagaaatccaagaaagggagcaaccaaaacaggaggaggtctgcaggaggaggagcaggtcagcaggaggaggtggtgctgaaggggaagatctcacaagtgtgtgaagaccacacagtctcgcgcactcgcaaacccagtgcgcgctgcggtcttcctcttcgcccaccttcttggagcggggaggttggccatgaggaggtggtggccggctgccctgctgggctgcgcagtggcggtgtccgttctggtggccgccgtggaatgcgctgtgacttacgacaagaaggcggtgctgattgatgggcagaggcggattctcttctccggatccatacactaccccaggagcacccctgatatgtgggaagggctgattcagaaagctaaagacggaggcttggatgtcattcagacctatgtcttttggaacggacatgagcctacgcctggaaattactatttcgaggagaggtacgatttagtcaggttcataaagacggtccagaaggctggcctgtttgtacatctccgcatcggtccctacatttgtggcgagtggaacttcggtttggttgaagtatgtaccgggcatcagcttcaggacagacaacgaacctttcaagacggccatgcagggtttcactgagaaaattgtgggaatgatgaagagcgaaaacctctttgcatcccaaggtggcccaattatcctctctcaggcaagtataatcttttccttagatttgattgagaatgagtatgggccagaaggcagggagtttggtgccgcaggtcaggcatatatcaactgggcagcaaagatggcagtcggattgggtactggtgtgccgtgggtgatgtgcaaggaggaggatgcacctgatccagtgatcaatgcatgcaatggtttctactgtgatgcattttctcctaacaaaccttacaagcccacaatgtggactgaagcttggagtggctggttcacggaatttggtgggaccatccgccaacgaccggttgaagatcttgcatttgctgttgctagatttgtacaaaagggtggttcttttatcaattactacatgtatcatggaggaacaaattttgggcgcactgctgggggtcccttcatcacaacaagctatgattatgatgctccaattgatgaatatggacttgttagagaaccaaagcacagtcatcttaaagaactccacagagctgttaagttatgcgagcaggctttggtttctgttgacccagcaattactacccttggtaccatgcaagaggcccgcgtcttccaatctccatctggttgtgcagctttccttgcaaactacaattctaactcctatgcgaaagttgtgttcaacaatgagcaatacagcctaccaccttggtcgattagcatccttcctgattgcaaaaatgttgtttttaacagtgccacagttggtgttcagacatctcagatgcaaatgtggggagatggtgcctcatcaatgacgtgggagaggtatgatgaggaggttgattctctggcagctgctccattgctcaccacaactggtttgcttgagcagcttaatgtcacgagagacagcagtgattatttgtggtacatcaccaggtggcggcaagcctctgtctctcagtgtgcagtctgctggtcatgccttgcatgtctttgtcaatggacaacttcaaggttctgcttatggtaccagggaagatcgaagaatcaaatataatggcaatgctagccttcgagctggtactaacaaaattgcactgctgagtgttgcctgtggattgccgaatgttggagtgcattatgagacgtggaacactggtgttggtggtcctgttgtgcttcatgggctggatgaaggttcacgagaccttacttggcagacttggtcctatcaggttggcctgaaaggcgaacagatgaatctgaactccatagaaggctcaagctcagttgaatggatgcaagggtcattgatagctcaaaaccagcagccattggcctggtatagggcttactttgagactcccagcggggacgagccattggctttggatatgggtagcatgggcaagggccaaatctggataaatggacaaagcattggacgctactggacagcatatgcagatggggactgcaaagaatgcagttacacgggaaccttccgggcacccaaatgtcaatcaggctgtggtcagcccacgcaacgatggtatcatgtgccaaagtcctggctgcagcccaccagaaacctgctggtagtcttcgaggaacttggtggggattcatcgaagatcgccctagtgaagaggtcagtctcaagtgtctgtgctgatgtatctgaggatcacccaaacatcaagaactggcagatcgaaagctacggcgagcgcgagtaccacagggcccaaagtgcacttaagatgtgcacgtgggcagtccatttccgcaatcaaattcgcaagctttgggacacctacgggaacctgtggagatttccagcaaggagattgccactcagctaactctcacacagtcctagagaagaaatgcattgggctccaaagatgcgtcgtcgccatctcccccgagagctttggaggagacccctgcccgagcgtgacgaaaagggtggcggtccaggcagtatgttctcccgtcgcgtagccttacttctccaagcaatggatttggaaggcggtcgacaaaaaaaaaaaaataaaaaatggtcgaaaccagtgcagggtgagtggaactgtaagtatcgtcgactttgattattagatgtggctggcttgagaggttagcagcattcgttgtcggattccagattaggatttgtagtctgctgcatctccatgaattgttcaaagcggccggctggataatgttgtagctggtccaggaatgcagctgtagagagagagagagagagagagagagagagagagagagagaga

SEQ ID NO: 214067 - DNA, 3294 bp, Zea Mays
cacacacacgggtcgcggctagccggctagagtctcttttccaagcccactcttttttctcctctccacttcgttacgcggacagtgggaggagccacagccattataatagcacgccatacgccaaaagctccactggagccgagcagctactcctcccagtcccaggctcactgtcgctcctcccaagaacccgcccaaagaatcctagaaatccaagaaagggagcaaccaaaacaggaggaggtctgcaggaggaggagcaggtcagcaggaggaggtggtgctgaaggggaagatctcacaagtgtgtgaagaccacacagtctcgcgcactcgcaaacccagtgcgcgctgcggtcttcctcttcgcccaccttcttggagcggggaggttggccatgaggaggtggtggccggctgccctgctgggctgcgcagtggcggtgtccgttctggtggccgccgtggaatgcgctgtgacttacgacaagaaggcggtgctgattgatgggcagaggcggattctcttctccggatccatacactaccccaggagcacccctgatgtaactgcattctacaaaatctcttctccccccactattccctggagaggtttatggctgcgaatctatggatctgaaatgtgggaagggctgattcagaaagctaaagacggaggcttggatgtcattcagacctatgtcttttggaacggacatgagcctacgcctggaaattactatttcgaggagaggtacgatttagtcaggttcataaagacggtccagaaggctggcctgtttgtacatctccgcatcggtccctacatttgtggcgagtggaacttcggcggcttcccagtttggttgaagtatgtaccgggcatcagcttcaggacagacaacgaacctttcaagacggccatgcagggtttcactgagaaaattgtgggaatgatgaagagcgaaaacctctttgcatcccaaggtggcccaattatcctctctcaggcaagtataatcttttccttagatttgattgagaatgagtatgggccagaaggcagggagtttggtgccgcaggtcaggcatatatcaactgggcagcaaagatggcagtcggattgggtactggtgtgccgtgggtgatgtgcaaggaggaggatgcacctgatccagtgatcaatgcatgcaatggtttctactgtgatgcattttctcctaacaaaccttacaagcccacaatgtggactgaagcttggagtggctggttcacggaatttggtgggaccatccgccaacgaccggttgaagatcttgcatttgctgttgctagatttgtacaaaagggtggttcttttatcaattactacatgtatcatggaggaacaaattttgggcgcactgctgggggtcccttcatcacaacaagctatgattatgatgctccaattgatgaatatggacttgttagagaaccaaagcacagtcatcttaaagaactccacagagctgttaagttatgcgagcaggctttggtttctgttgacccagcaattactacccttggtaccatgcaagaggcccgcgtcttccaatctccatctggttgtgcagctttccttgcaaactacaattctaactcctatgcgaaagttgtgttcaacaatgagcaatacagcctaccaccttggtcgattagcatccttcctgattgcaaaaatgttgtttttaacagtgccacagttggtgttcagacatctcagatgcaaatgtggggagatggtgcctcatcaatgacgtgggagaggtatgatgaggaggttgattctctggcagctgctccattgctcaccacaactggtttgcttgagcagcttaatgtcacgagagacagcagtgattatttgtggtacatcaccaggtggcggcaagcctctgtctctcagtgtgcagtctgctggtcatgccttgcatgtctttgtcaatggacaacttcaaggttctgcttatggtaccagggaagatcgaagaatcaaatataatggcaatgctagccttcgagctggtactaacaaaattgcactgctgagtgttgcctgtggattgccgaatgttggagtgcattatgagacgtggaacactggtgttggtggtcctgttgtgcttcatgggctggatgaaggttcacgagaccttacttggcagacttggtcctatcaggttggcctgaaaggcgaacagatgaatctgaactccatagaaggctcaagctcagttgaatggatgcaagggtcattgatagctcaaaaccagcagccattggcctggtatagggcttactttgagactcccagcggggacgagccattggctttggatatgggtagcatgggcaagggccaaatctggataaatggacaaagcattggacgctactggacagcatatgcagatggggactgcaaagaatgcagttacacgggaaccttccgggcacccaaatgtcaatcaggctgtggtcagcccacgcaacgatggtatcatgtgccaaagtcctggctgcagcccaccagaaacctgctggtagtcttcgaggaacttggtggggattcatcgaagatcgccctagtgaagaggtcagtctcaagtgtctgtgctgatgtatctgaggatcacccaaacatcaagaactggcagatcgaaagctacggcgagcgcgagtaccacagggcccaaagtgcacttaagatgtgcacgtgggcagtccatttccgcaatcaaattcgcaagctttgggacacctacgggaacctgtggagatttccagcaaggagattgccactcagctaactctcacacagtcctagagaagaaatgcattgggctccaaagatgcgtcgtcgccatctcccccgagagctttggaggagacccctgcccgagcgtgacgaaaagggtggcggtccaggcagtatgttctcccgtcgcgtagccttacttctccaagcaatggatttggaaggcggtcgacaaaaaaaaaaaaataaaaaatggtcgaaaccagtgcagggtgagtggaactgtaagtatcgtcgactttgattattagatgtggctggcttgagaggttagcagcattcgttgtcggattccagattaggatttgtagtctgctgcatctccatgaattgttcaaagcggccggctggataatgttgtagctggtccaggaatgcagctgtagagagagagagagagagagagagagagagagagagagagaga

SEQ ID NO: 214068 - DNA, 3314 bp, Zea Mays
ccatggtcagccacccagcagcatgatgagctgccatctttgtactgctcctcccctccggcgcggcggtgccccgcccgcctccgtacacacacacacgggtcgcggctagccggctagagtctcttttccaagcccactcttttttctcctctccacttcgttacgcggacagtgggaggagccacagccattataatagcacgccatacgccaaaagctccactggagccgagcagctactcctcccagtcccaggctcactgtcgctcctcccaagaacccgcccaaagaatcctagaaatccaagaaagggagcaaccaaaacaggaggaggtctgcaggaggaggagcaggtcagcaggaggaggtggtgctgaaggggaagatctcacaagtgtgtgaagaccacacagtctcgcgcactcgcaaacccagtgcgcgctgcggtcttcctcttcgcccaccttcttggagcggggaggttggccatgaggaggtggtggccggctgccctgctgggctgcgcagtggcggtgtccgttctggtggccgccgtggaatgcgctgtgacttacgacaagaaggcggtgctgattgatgggcagaggcggattctcttctccggatccatacactaccccaggagcacccctgatatgtgggaagggctgattcagaaagctaaagacggaggcttggatgtcattcagacctatgtcttttggaacggacatgagcctacgcctggaaattactatttcgaggagaggtacgatttagtcaggttcataaagacggtccagaaggctggcctgtttgtacatctccgcatcggtccctacatttgtggcgagtggaacttcggcggcttcccagtttggttgaagtatgtaccgggcatcagcttcaggacagacaacgaacctttcaagacggccatgcagggtttcactgagaaaattgtgggaatgatgaagagcgaaaacctctttgcatcccaaggtggcccaattatcctctctcagattgagaatgagtatgggccagaaggcagggagtttggtgccgcaggtcaggcatatatcaactgggcagcaaagatggcagtcggattgggtactggtgtgccgtgggtgatgtgcaaggaggaggatgcacctgatccagtgatcaatgcatgcaatggtttctactgtgatgcattttctcctaacaaaccttacaagcccacaatgtggactgaagcttggagtggctggttcacggaatttggtgggaccatccgccaacgaccggttgaagatcttgcatttgctgttgctagatttgtacaaaagggtggttcttttatcaattactacatgtatcatggaggaacaaattttgggcgcactgctgggggtcccttcatcacaacaagctatgattatgatgctccaattgatgaatatggacttgttagagaaccaaagcacagtcatcttaaagaactccacagagctgttaagttatgcgagcaggctttggtttctgttgacccagcaattactacccttggtaccatgcaagaggcccgcgtcttccaatctccatctggttgtgcagctttccttgcaaactacaattctaactcctatgcgaaagttgtgttcaacaatgagcaatacagcctaccaccttggtcgattagcatccttcctgattgcaaaaatgttgtttttaacagtgccacagttggtgttcagacatctcagatgcaaatgtggggagatggtgcctcatcaatgacgtgggagaggtatgatgaggaggttgattctctggcagctgctccattgctcaccacaactggtttgcttgagcagcttaatgtcacgagagacagcagtgattatttgtggtacatcaccagtgttgacataagctcatctgaaaactttctacaaggtggcggcaagcctctgtctctcagtgtgcagtctgctggtcatgccttgcatgtctttgtcaatggacaacttcaaggttctgcttatggtaccagggaagatcgaagaatcaaatataatggcaatgctagccttcgagctggtactaacaaaattgcactgctgagtgttgcctgtggattgccgaatgttggagtgcattatgagacgtggaacactggtgttggtggtcctgttgtgcttcatgggctggatgaaggttcacgagaccttacttggcagacttggtcctatcaggttggcctgaaaggcgaacagatgaatctgaactccatagaaggctcaagctcagttgaatggatgcaagggtcattgatagctcaaaaccagcagccattggcctggtatagggcttactttgagactcccagcggggacgagccattggctttggatatgggtagcatgggcaagggccaaatctggataaatggacaaagcattggacgctactggacagcatatgcagatggggactgcaaagaatgcagttacacgggaaccttccgggcacccaaatgtcaatcaggctgtggtcagcccacgcaacgatggtatcatgtgccaaagtcctggctgcagcccaccagaaacctgctggtagtcttcgaggaacttggtggggattcatcgaagatcgccctagtgaagaggtcagtctcaagtgtctgtgctgatgtatctgaggatcacccaaacatcaagaactggcagatcgaaagctacggcgagcgcgagtaccacagggcccaaagtgcacttaagatgtgcacgtgggcagtccatttccgcaatcaaattcgcaagctttgggacacctacgggaacctgtggagatttccagcaaggagattgccactcagctaactctcacacagtcctagagaagaaatgcattgggctccaaagatgcgtcgtcgccatctcccccgagagctttggaggagacccctgcccgagcgtgacgaaaagggtggcggtccaggcagtatgttctcccgtcgcgtagccttacttctccaagcaatggatttggaaggcggtcgacaaaaaaaaaaaaataaaaaatggtcgaaaccagtgcagggtgagtggaactgtaagtatcgtcgactttgattattagatgtggctggcttgagaggttagcagcattcgttgtcggattccagattaggatttgtagtctgctgcatctccatgaattgttcaaagcggccggctggataatgttgtagctggtccaggaatgcagctgtagagagagagagagagagagagagagagagagagagagagaga

SEQ ID NO: 214069 - DNA, 1764 bp, Zea Mays
ctctgttctacattggctagaggtttctgtaagcacttcaaatgggacagaagtgtatgggactggacttaaaaatgctgctggtgaatacaattgttttttgaatgtgattattcagtcattgtggcatataaggcggtttcgggacgagtttcttaaaacatcattactgcacaagcatgttgaagatccttgtgctgtctgcgctttatatggtatcttcattgacctgagcaaagcatccaagggacaaagagaagctgttgcacctacttcgttgaggattgctttgagcaaatcctacccaaacagcaaattctttcaggagatgaatgatgcatctgaggtactgggtgtaatctttgagtgtttgcataagtcatacacttctcgtactgtctaccatggtgtatcccacgagaaaaattctattggatcatgggattgtgcaaatatttcttgcataacacataatctttttgggatggacgtatatgaacggatgaactgtcacaattgtaagatggagtctaggcagctcaagtatacttcatttttccacaatatcaatgctagttcactccgaactgcgaagatgatgtgtccagattcttcatttgatgaacttttgaaggttgttataatgaatgatcaactagcttgtgatcaagacgttggcggctgtggaacaccgaatcatatagaccacatcctttctaattccccacatgtctttactgttgttttgggatggcagaacaacaaagagagggtggatgacatatctgcaactttggctggtatttcaactgagatagacattagcatattctaccgtggtctagatcaaggaggcaaacacaccctggggtcagtggtttgttactatggccagcattaccattgttttgccttcaaggatggacggtgggtcatgtatgatgaccagacagtcaaggttattggtagttggggtgatgtgctcgtgatgtgtgaaaagggccatttgcaaccccaagtgcttttctttgaggctgcaaattaattattcttcagagtcgcaaaacgcgctacagcggttaacatgccctcaaatataggttttttccctgcggccatgaagattagaaatagggtagcagattcgttttgagcggggatatatagtactagcattcaacggtgcttttcgttgtgagtccgtaataagcagtcatctgagcattctagagcaaaaaagggagctgtttatcccccccttttttgctttaacctttggtgtaggcgctgaacttctgatctcatctgccaataaatcttcactgccgatcaagcgggtggagcattcgacttgaactgccatccaacagttgtagccgaatctgcatgaactcttcgttatacaccaatcatctatagaattttctgcttacattgggccgggcgggcgttctctctctctctgttttttttttggggtgggggtctggtataggagtgacagttttgaggccaccagatatagaatggaatgatatgggaatgggtgatgcggtgtgaactgtattttgctgtggatgatcttttgaaaagagtaaagctatctggaatatggatatggtaagaaatctgtagtacacgagtctatatatacaatgactcaatgggattatgcgagatgattataacgatgaataccaaaatctttatcacaactgttggttacattgatctctctttgacaggagcattgaatgatcgtgc

SEQ ID NO: 214070 - DNA, 2543 bp, Zea Mays
gaactctccttggatgctaagaagaatgcaagcaaaggggctgatatgaaacaatcccatgaaaaatcaaaggataaaaagaagttcaaggattctcgaaaatcaaaggagctcaaggattcaagctggagcaaccagtctctcattcaccaagacagtaccgatgagggaacatcagagacatctcaaatgcttgctgattgtgatgatctgtgttgcaaatgctcgacaagtgaggattacttcaatgaacaagaggaagaacttaggcatagggtacaacttgaagcagaggaaagaaaattggaagaggctctagaatatcaacggtggatagaggaggaagcaaagcagaaacatcttgcagaacaatgtagaagtacacatgcatcttctgttattggcataaagtttggtgactttagctacaccgagaacgagaacaatttcagccagaaactcaatggaatcgagttcgactcatctgatgcacatgcattaaccagcagtgatatgagtgtttctatgttgacgttgaaaatgaatggggtttgcaataatgcacaacctataaagcctcttggtaattttggcacccaaaatcccaagagaagttctagtgaaccacaaaggtattctcaaggtcactctgcaggaatagagaagccaaattttgagaaagttggcagtggtgcaataccatcaacggatgtgtgcatcgaggatgattttgataaaaggtttcaagaagatcttgatgaagcagtgcgccaaagccttggatgcgatgcttatcctgctggtacagtaagcacttcaaatgggacagaagtgtatgggactggacttaaaaatgctgctggtgaatacaattgttttttgaatgtgattattcagtcattgtggcatataaggcggtttcgggacgagtttcttaaaacatcattactgcacaagcatgttgaagatccttgtgctgtctgcgctttatatggtatcttcattgacctgagcaaagcatccaagggacaaagagaagctgttgcacctacttcgttgaggattgctttgagcaaatcctacccaaacagcaaattctttcaggagatgaatgatgcatctgaggtactgggtgtaatctttgagtgtttgcataagtcatacacttctcgtactgtctaccatggtgtatcccacgagaaaaattctattggatcatgggattgtgcaaatatttcttgcataacacataatctttttgggatggacgtatatgaacggatgaactgtcacaattgtaagatggagtctaggcagctcaagtatacttcatttttccacaatatcaatgctagttcactccgaactgcgaagatgatgtgtccagattcttcatttgatgaacttttgaaggttgttataatgaatgatcaactagcttgtgatcaagacgttggcggctgtggaacaccgaatcatatagaccacatcctttctaattccccacatgtctttactgttgttttgggatggcagaacaacaaagagagggtggatgacatatctgcaactttggctggtatttcaactgagatagacattagcatattctaccgtggtctagatcaaggaggcaaacacaccctggggtcagtggtttgttactatggccagcattaccattgttttgccttcaaggatggacggtgggtcatgtatgatgaccagacagtcaaggttattggtagttggggtgatgtgctcgtgatgtgtgaaaagggccatttgcaaccccaagtgcttttctttgaggctgcaaattaattattcttcagagtcgcaaaacgcgctacagcggttaacatgccctcaaatataggttttttccctgcggccatgaagattagaaatagggtagcagattcgttttgagcggggatatatagtactagcattcaacggtgcttttcgttgtgagtccgtaataagcagtcatctgagcattctagagcaaaaaagggagctgtttatcccccccttttttgctttaacctttggtgtaggcgctgaacttctgatctcatctgccaataaatcttcactgccgatcaagcgggtggagcattcgacttgaactgccatccaacagttgtagccgaatctgcatgaactcttcgttatacaccaatcatctatagaattttctgcttacattgggccgggcgggcgttctctctctctctgttttttttttggggtgggggtctggtataggagtgacagttttgaggccaccagatatagaatggaatgatatgggaatgggtgatgcggtgtgaactgtattttgctgtggatgatcttttgaaaagagtaaagctatctggaatatggatatggtaagaaatctgtagtacacgagtctatatatacaatgactcaatgggattatgcgagatgattataacgatgaataccaaaatctttatcacaactgttggttacattgatctctctttgacaggagcattgaatgatcgtgc

SEQ ID NO: 214071 - DNA, 2615 bp, Zea Mays
agccatttgggagagctggtggataaggatgccaaagagagatctgatgctgcaagggaagccttcctggctgaactctccttggatgctaagaagaatgcaagcaaaggggctgatatgaaacaatcccatgaaaaatcaaaggataaaaagaagttcaaggattctcgaaaatcaaaggagctcaaggattcaagctggagcaaccagtctctcattcaccaagacagtaccgatgagggaacatcagagacatctcaaatgcttgctgattgtgatgatctgtgttgcaaatgctcgacaagtgaggattacttcaatgaacaagaggaagaacttaggcatagggtacaacttgaagcagaggaaagaaaattggaagaggctctagaatatcaacggtggatagaggaggaagcaaagcagaaacatcttgcagaacaatgtagaagtacacatgcatcttctgttattggtacagctagtctttcaagcactgtgagtttaaacagggatccggataaccatgaaagtgcactcaataactcttcacatacttatcttgaaggcataaagtttggtgactttagctacaccgagaacgagaacaatttcagccagaaactcaatggaatcgagttcgactcatctgatgcacatgcattaaccagcagtgatatgagtgtttctatgttgacgttgaaaatgaatggggtttgcaataatgcacaacctataaagcctcttggtaattttggcacccaaaatcccaagagaagttctagtgaaccacaaaggtattctcaaggtcactctgcaggaatagagaagccaaattttgagaaaggatgcgatgcttatcctgctggtacagtaagcacttcaaatgggacagaagtgtatgggactggacttaaaaatgctgctggtgaatacaattgttttttgaatgtgattattcagtcattgtggcatataaggcggtttcgggacgagtttcttaaaacatcattactgcacaagcatgttgaagatccttgtgctgtctgcgctttatatggtatcttcattgacctgagcaaagcatccaagggacaaagagaagctgttgcacctacttcgttgaggattgctttgagcaaatcctacccaaacagcaaattctttcaggagggacagatgaatgatgcatctgaggtactgggtgtaatctttgagtgtttgcataagtcatacacttctcgtactgtctaccatggtgtatcccacgagaaaaattctattggatcatgggattgtgcaaatatttcttgcataacacataatctttttgggatggacgtatatgaacggatgaactgtcacaattgtaagatggagtctaggcagctcaagtatacttcatttttccacaatatcaatgctagttcactccgaactgcgaagatgatgtgtccagattcttcatttgatgaacttttgaaggttgttataatgaatgatcaactagcttgtgatcaagacgttggcggctgtggaacaccgaatcatatagaccacatcctttctaattccccacatgtctttactgttgttttgggatggcagaacaacaaagagagggtggatgacatatctgcaactttggctggtatttcaactgagatagacattagcatattctaccgtggtctagatcaaggaggcaaacacaccctggggtcagtggtttgttactatggccagcattaccattgttttgccttcaaggatggacggtgggtcatgtatgatgaccagacagtcaaggttattggtagttggggtgatgtgctcgtgatgtgtgaaaagggccatttgcaaccccaagtgcttttctttgaggctgcaaattaattattcttcagagtcgcaaaacgcgctacagcggttaacatgccctcaaatataggttttttccctgcggccatgaagattagaaatagggtagcagattcgttttgagcggggatatatagtactagcattcaacggtgcttttcgttgtgagtccgtaataagcagtcatctgagcattctagagcaaaaaagggagctgtttatcccccccttttttgctttaacctttggtgtaggcgctgaacttctgatctcatctgccaataaatcttcactgccgatcaagcgggtggagcattcgacttgaactgccatccaacagttgtagccgaatctgcatgaactcttcgttatacaccaatcatctatagaattttctgcttacattgggccgggcgggcgttctctctctctctgttttttttttggggtgggggtctggtataggagtgacagttttgaggccaccagatatagaatggaatgatatgggaatgggtgatgcggtgtgaactgtattttgctgtggatgatcttttgaaaagagtaaagctatctggaatatggatatggtaagaaatctgtagtacacgagtctatatatacaatgactcaatgggattatgcgagatgattataacgatgaataccaaaatctttatcacaactgttggttacattgatctctctttgacaggagcattgaatgatcgtgc

SEQ ID NO: 214072 - DNA, 5217 bp, Zea Mays
tcccaaatctcattcccatgggccgtaaaaagcgaacatctacaccaaaccctacttcgccaccgtcgtacgccccccgccggccggcgggggctaaggtggctggcaacggcggggaagatgatggcgtgcgcgccgaggtcgaaaaggcactcgcctgcctgcagcgggggaaccacgcgcgggcggtgcgcctcatgagggacgccatcgcccaccacggggaggcctccacgccgcttctcctgcgggcgcatggtactgtcctcgcccgcgccgcctccgtccttgacgacccggccgcccgcgcgcgccgccaccgggcagcgctccaggcggcccagcgcgccgtcgagctcgcgccggactccatcgagctctcccactttcatgccatgctgctcttcgacgccgccaccgacacccgcgcctacgaggaggtcgtcgccgagtgcgagcgcggcctcagcatcgaggccccttccgaccccgcgccccactccctcaggctgcccggccccgacgtcgaccaggtccagtccgagctccgcaacctgatccagaaggccaatctcgcctcagtatctacctggtttaaaaccctgcgtagcgcgggcgacgataagtttcgcctcatccccgtgcaccgttttgccgacgaaccaatggaggcccggctcgtcccctcggcgccctctccgcgccgctcaaacgagatcaagaaggcgaccaagacctccgaggagcgccgccaggagatcgaggtacgcctggctgccatgaggctgctgcagcagcagaaggagcagagcaatggtgttgtgtctgccacccctgcctcttcccagtcacagggagatgaggccccctcatcgtctctgtcattggtgggtggacatcgagctgacaggagaaaaggcgggtctaggaaagcaacaggcttatctgcatctgaacgcactgaccaggcgcgtgcctactggggttcgataccagtggatcaaaggcttgcgttcttaaacactagcatttctgagctcaagtcacactatgcttctgcaatccataaggagaaagatgttgccagtgcagcatctgatgtgctgaatgaggtgatacgatttgccaacaagcatggcaactgggagttcatggtatgtggtaggtgtcggggacagtttacagatgttgaggcacaccggtggcatgtcatgggggaacatgttgggctactctcatctgagctgcaggaaatggtgccgcaggagattgatgctgactgggtagaaatgctcattggttggaactggagtccattggatgctactgcagcactgaaactgtttgaggaagatcaaactgacaatcttggaacagataggggcaaagaatcggatccgacggataattggagtaacaaagacaaccctgacatgtcagaatcctctgcctcgccacacaacggggagtgtaatggctttggagtggtggtgagggaaggtgacggtacgtggccactatcagatgatgacgaaagggcaaaaattttagaaaggatccattcattgttcaaaattcttgtgaagaaccataatctttcagtgtgcaatctaaacagggtgattcgatttgctgtagaggaactcagggggttgtcatctgggtcactactgcttaatcactcattggacaagtcgccgctttgcatttgcttcttggaggcatcgtcactgtggaaagtagctaaattcttgcaggatttagtgcaggcctctggaattaatagaaacctggagaatgatggactaggtgacagggatagttccccccaaaaccacaatgtactggagaaggttattcttagttctgattcttctgaactgatcattgatgggcaaacttttggtggaaagtttgactctgagagtgttgatactgacacactgttttcatggttgtacgctggatcctcaattggtgagcagctattggcttggaaccgtatgattgacgaaaggtcaaatcagtgcatggaccttattcgggcacttgggagggagttcaacaacttgcaaaactcatgtgaacggaagcttgaacagctgagaaatgaggaggcttttatttctgtagaggacctcttatgcgaagagcaaacacgaagggagcaggtggagcagtatgggttccaaagttttgaggagatcctcaggaagcggcaggcggagttgttggaacgcaatactgaggtgcagtccgacagtaacagatccgagatagatgcaatctcagctgttttgaagaaactccacacttcacacttcggttatgatgatgccttttctggaatggccccacgcctttttgacttggacggggtcgaagatgaatggaggctgcatgattttatacatccaaatgattcaatggtacacactgttatatcaaagatgaaggaaaaagttactgtggagattagcaagatagatgctcagattatgcgaaatttatctgtgatgcggcatctagagcacaagcttggacctgcttctgctcttgattatcgaatgattcttttaccccttatgagatcgttcttacaaagccatttgggagagctggtggataaggatgccaaagagagatctgatgctgcaagggaagccttcctggctgaactctccttggatgctaagaagaatgcaagcaaaggggctgatatgaaacaatcccatgaaaaatcaaaggataaaaagaagttcaaggattctcgaaaatcaaaggagctcaaggattcaagctggagcaaccagtctctcattcaccaagacagtaccgatgagggaacatcagagacatctcaaatgcttgctgattgtgatgatctgtgttgcaaatgctcgacaagtgaggattacttcaatgaacaagaggaagaacttaggcatagggtacaacttgaagcagaggaaagaaaattggaagaggctctagaatatcaacggtggatagaggaggaagcaaagcagaaacatcttgcagaacaatgtagaagtacacatgcatcttctgttattggcataaagtttggtgactttagctacaccgagaacgagaacaatttcagccagaaactcaatggaatcgagttcgactcatctgatgcacatgcattaaccagcagtgatatgagtgtttctatgttgacgttgaaaatgaatggggtttgcaataatgcacaacctataaagcctcttggtaattttggcacccaaaatcccaagagaagttctagtgaaccacaaaggtattctcaaggtcactctgcaggaatagagaagccaaattttgagaaagtggtgcaataccatcaacggatgtgtgcatcgaggatgattttgataaaaggtttcaagaagatcttgatgaagcagtgcgccaaagccttggatgcgatgcttatcctgctggtacagtaagcacttcaaatgggacagaagtgtatgggactggacttaaaaatgctgctggtgaatacaattgttttttgaatgtgattattcagtcattgtggcatataaggcggtttcgggacgagtttcttaaaacatcattactgcacaagcatgttgaagatccttgtgctgtctgcgctttatatggtatcttcattgacctgagcaaagcatccaagggacaaagagaagctgttgcacctacttcgttgaggattgctttgagcaaatcctacccaaacagcaaattctttcaggagggacagatgaatgatgcatctgaggtactgggtgtaatctttgagtgtttgcataagtcatacacttctcgtactgtctaccatggtgtatcccacgagaaaaattctattggatcatgggattgtgcaaatatttcttgcataacacataatctttttgggatggacgtatatgaacggatgaactgtcacaattgtaagatggagtctaggcagctcaagtatacttcatttttccacaatatcaatgctagttcactccgaactgcgaagatgatgtgtccagattcttcatttgatgaacttttgaaggttgttataatgaatgatcaactagcttgtgatcaagacgttggcggctgtggaacaccgaatcatatagaccacatcctttctaattccccacatgtctttactgttgttttgggatggcagaacaacaaagagagggtggatgacatatctgcaactttggctggtatttcaactgagatagacattagcatattctaccgtggtctagatcaaggaggcaaacacaccctggggtcagtggtttgttactatggccagcattaccattgttttgccttcaaggatggacggtgggtcatgtatgatgaccagacagtcaaggttattggtagttggggtgatgtgctcgtgatgtgtgaaaagggccatttgcaaccccaagtgcttttctttgaggctgcaaattaattattcttcagagtcgcaaaacgcgctacagcggttaacatgccctcaaatataggttttttccctgcggccatgaagattagaaatagggtagcagattcgttttgagcggggatatatagtactagcattcaacggtgcttttcgttgtgagtccgtaataagcagtcatctgagcattctagagcaaaaaagggagctgtttatcccccccttttttgctttaacctttggtgtaggcgctgaacttctgatctcatctgccaataaatcttcactgccgatcaagcgggtggagcattcgacttgaactgccatccaacagttgtagccgaatctgcatgaactcttcgttatacaccaatcatctatagaattttctgcttacattgggccgggcgggcgttctctctctctctgttttttttttggggtgggggtctggtataggagtgacagttttgaggccaccagatatagaatggaatgatatgggaatgggtgatgcggtgtgaactgtattttgctgtggatgatcttttgaaaagagtaaagctatctggaatatggatatggtaagaaatctgtagtacacgagtctatatatacaatgactcaatgggattatgcgagatgattataacgatgaataccaaaatctttatcacaactgttggttacattgatctctctttgacaggagcattgaatgatcgtgc

SEQ ID NO: 214073 - DNA, 5217 bp, Zea Mays
tcccaaatctcattcccatgggccgtaaaaagcgaacatctacaccaaaccctacttcgccaccgtcgtacgccccccgccggccggcgggggctaaggtggctggcaacggcggggaagatgatggcgtgcgcgccgaggtcgaaaaggcactcgcctgcctgcagcgggggaaccacgcgcgggcggtgcgcctcatgagggacgccatcgcccaccacggggaggcctccacgccgcttctcctgcgggcgcatggtactgtcctcgcccgcgccgcctccgtccttgacgacccggccgcccgcgcgcgccgccaccgggcagcgctccaggcggcccagcgcgccgtcgagctcgcgccggactccatcgagctctcccactttcatgccatgctgctcttcgacgccgccaccgacacccgcgcctacgaggaggtcgtcgccgagtgcgagcgcggcctcagcatcgaggccccttccgaccccgcgccccactccctcaggctgcccggccccgacgtcgaccaggtccagtccgagctccgcaacctgatccagaaggccaatctcgcctcagtatctacctggtttaaaaccctgcgtagcgcgggcgacgataagtttcgcctcatccccgtgcaccgttttgccgacgaaccaatggaggcccggctcgtcccctcggcgccctctccgcgccgctcaaacgagatcaagaaggcgaccaagacctccgaggagcgccgccaggagatcgaggtacgcctggctgccatgaggctgctgcagcagcagaaggagcagagcaatggtgttgtgtctgccacccctgcctcttcccagtcacagggagatgaggccccctcatcgtctctgtcattggtgggtggacatcgagctgacaggagaaaaggcgggtctaggaaagcaacaggcttatctgcatctgaacgcactgaccaggcgcgtgcctactggggttcgataccagtggatcaaaggcttgcgttcttaaacactagcatttctgagctcaagtcacactatgcttctgcaatccataaggagaaagatgttgccagtgcagcatctgatgtgctgaatgaggtgatacgatttgccaacaagcatggcaactgggagttcatggtatgtggtaggtgtcggggacagtttacagatgttgaggcacaccggtggcatgtcatgggggaacatgttgggctactctcatctgagctgcaggaaatggtgccgcaggagattgatgctgactgggtagaaatgctcattggttggaactggagtccattggatgctactgcagcactgaaactgtttgaggaagatcaaactgacaatcttggaacagataggggcaaagaatcggatccgacggataattggagtaacaaagacaaccctgacatgtcagaatcctctgcctcgccacacaacggggagtgtaatggctttggagtggtggtgagggaaggtgacggtacgtggccactatcagatgatgacgaaagggcaaaaattttagaaaggatccattcattgttcaaaattcttgtgaagaaccataatctttcagtgtgcaatctaaacagggtgattcgatttgctgtagaggaactcagggggttgtcatctgggtcactactgcttaatcactcattggacaagtcgccgctttgcatttgcttcttggaggcatcgtcactgtggaaagtagctaaattcttgcaggatttagtgcaggcctctggaattaatagaaacctggagaatgatggactaggtgacagggatagttccccccaaaaccacaatgtactggagaaggttattcttagttctgattcttctgaactgatcattgatgggcaaacttttggtggaaagtttgactctgagagtgttgatactgacacactgttttcatggttgtacgctggatcctcaattggtgagcagctattggcttggaaccgtatgattgacgaaaggtcaaatcagtgcatggaccttattcgggcacttgggagggagttcaacaacttgcaaaactcatgtgaacggaagcttgaacagctgagaaatgaggaggcttttatttctgtagaggacctcttatgcgaagagcaaacacgaagggagcaggtggagcagtatgggttccaaagttttgaggagatcctcaggaagcggcaggcggagttgttggaacgcaatactgaggtgcagtccgacagtaacagatccgagatagatgcaatctcagctgttttgaagaaactccacacttcacacttcggttatgatgatgccttttctggaatggccccacgcctttttgacttggacggggtcgaagatgaatggaggctgcatgattttatacatccaaatgattcaatggtacacactgttatatcaaagatgaaggaaaaagttactgtggagattagcaagatagatgctcagattatgcgaaatttatctgtgatgcggcatctagagcacaagcttggacctgcttctgctcttgattatcgaatgattcttttaccccttatgagatcgttcttacaaagccatttgggagagctggtggataaggatgccaaagagagatctgatgctgcaagggaagccttcctggctgaactctccttggatgctaagaagaatgcaagcaaaggggctgatatgaaacaatcccatgaaaaatcaaaggataaaaagaagttcaaggattctcgaaaatcaaaggagctcaaggattcaagctggagcaaccagtctctcattcaccaagacagtaccgatgagggaacatcagagacatctcaaatgcttgctgattgtgatgatctgtgttgcaaatgctcgacaagtgaggattacttcaatgaacaagaggaagaacttaggcatagggtacaacttgaagcagaggaaagaaaattggaagaggctctagaatatcaacggtggatagaggaggaagcaaagcagaaacatcttgcagaacaatgtagaagtacacatgcatcttctgttattggcataaagtttggtgactttagctacaccgagaacgagaacaatttcagccagaaactcaatggaatcgagttcgactcatctgatgcacatgcattaaccagcagtgatatgagtgtttctatgttgacgttgaaaatgaatggggtttgcaataatgcacaacctataaagcctcttggtaattttggcacccaaaatcccaagagaagttctagtgaaccacaaaggtattctcaaggtcactctgcaggaatagagaagccaaattttgagaaagttggcagtggtgcaataccatcaacggatgtgtgcatcgaggatgattttgataaaaggtttcaagaagatcttgatgaagcagtgcgccaaagccttggatgcgatgcttatcctgctggtacagtaagcacttcaaatgggacagaagtgtatgggactggacttaaaaatgctgctggtgaatacaattgttttttgaatgtgattattcagtcattgtggcatataaggcggtttcgggacgagtttcttaaaacatcattactgcacaagcatgttgaagatccttgtgctgtctgcgctttatatggtatcttcattgacctgagcaaagcatccaagggacaaagagaagctgttgcacctacttcgttgaggattgctttgagcaaatcctacccaaacagcaaattctttcaggagggacagatgaatgatgcatctgaggtactgggtgtaatctttgagtgtttgcataagtcatacacttctcgtactgtctaccatggtgtatcccacgagaaaaattctattggatcatgggattgtgcaaatatttcttgcataacacataatctttttgggatggacgtatatgaacggatgaactgtcacaattgtaagatggagtctaggcagctcaagtatacttcatttttccacaatatcaatgctagttcactccgaactgcgaagatgatgtgtccagattcttcatttgatgaacttttgaaggttgttataatgaatgatcaactagcttgtgatcaagacgttggcggctgtggaacaccgaatcatatagaccacatcctttctaattccccacatgtctttactgttgttttgggatggcagaacaacaaagagagggtggatgacatatctgcaactttggctggtatttcaactgagatagacattagcatattctaccgtggtctagatcaaggaggcaaacacaccctggggtttgttactatggccagcattaccattgttttgccttcaaggatggacggtgggtcatgtatgatgaccagacagtcaaggttattggtagttggggtgatgtgctcgtgatgtgtgaaaagggccatttgcaaccccaagtgcttttctttgaggctgcaaattaattattcttcagagtcgcaaaacgcgctacagcggttaacatgccctcaaatataggttttttccctgcggccatgaagattagaaatagggtagcagattcgttttgagcggggatatatagtactagcattcaacggtgcttttcgttgtgagtccgtaataagcagtcatctgagcattctagagcaaaaaagggagctgtttatcccccccttttttgctttaacctttggtgtaggcgctgaacttctgatctcatctgccaataaatcttcactgccgatcaagcgggtggagcattcgacttgaactgccatccaacagttgtagccgaatctgcatgaactcttcgttatacaccaatcatctatagaattttctgcttacattgggccgggcgggcgttctctctctctctgttttttttttggggtgggggtctggtataggagtgacagttttgaggccaccagatatagaatggaatgatatgggaatgggtgatgcggtgtgaactgtattttgctgtggatgatcttttgaaaagagtaaagctatctggaatatggatatggtaagaaatctgtagtacacgagtctatatatacaatgactcaatgggattatgcgagatgattataacgatgaataccaaaatctttatcacaactgttggttacattgatctctctttgacaggagcattgaatgatcgtgc

SEQ ID NO: 214074 - DNA, 5226 bp, Zea Mays
ggcgcatcggttcgctcccaaatctcattcccatgggccgtaaaaagcgaacatctacaccaaaccctacttcgccaccgtcgtacgccccccgccggccggcgggggctaaggtggctggcaacggcggggaagatgatggcgtgcgcgccgaggtcgaaaaggcactcgcctgcctgcagcgggggaaccacgcgcgggcggtgcgcctcatgagggacgccatcgcccaccacggggaggcctccacgccgcttctcctgcgggcgcatggtactgtcctcgcccgcgccgcctccgtccttgacgacccggccgcccgcgcgcgccgccaccgggcagcgctccaggcggcccagcgcgccgtcgagctcgcgccggactccatcgagctctcccactttcatgccatgctgctcttcgacgccgccaccgacacccgcgcctacgaggaggtcgtcgccgagtgcgagcgcggcctcagcatcgaggccccttccgaccccgcgccccactccctcaggctgcccggccccgacgtcgaccaggtccagtccgagctccgcaacctgatccagaaggccaatctcgcctcagtatctacctggtttaaaaccctgcgtagcgcgggcgacgataagtttcgcctcatccccgtgcaccgttttgccgacgaaccaatggaggcccggctcgtcccctcggcgccctctccgcgccgctcaaacgagatcaagaaggcgaccaagacctccgaggagcgccgccaggagatcgaggtacgcctggctgccatgaggctgctgcagcagcagaaggagcagagcaatggtgttgtgtctgccacccctgcctcttcccagtcacagggagatgaggccccctcatcgtctctgtcattggtgggtggacatcgagctgacaggagaaaaggcgggtctaggaaagcaacaggcttatctgcatctgaacgcactgaccaggcgcgtgcctactggggttcgataccagtggatcaaaggcttgcgttcttaaacactagcatttctgagctcaagtcacactatgcttctgcaatccataaggagaaagatgttgccagtgcagcatctgatgtgctgaatgaggtgatacgatttgccaacaagcatggcaactgggagttcatggtatgtggtaggtgtcggggacagtttacagatgttgaggcacaccggtggcatgtcatgggggaacatgttgggctactctcatctgagctgcaggaaatggtgccgcaggagattgatgctgactgggtagaaatgctcattggttggaactggagtccattggatgctactgcagcactgaaactgtttgaggaagatcaaactgacaatcttggaacagataggggcaaagaatcggatccgacggataattggagtaacaaagacaaccctgacatgtcagaatcctctgcctcgccacacaacggggagtgtaatggctttggagtggtggtgagggaaggtgacggtacgtggccactatcagatgatgacgaaagggcaaaaattttagaaaggatccattcattgttcaaaattcttgtgaagaaccataatctttcagtgtgcaatctaaacagggtgattcgatttgctgtagaggaactcagggggttgtcatctgggtcactactgcttaatcactcattggacaagtcgccgctttgcatttgcttcttggaggcatcgtcactgtggaaagtagctaaattcttgcaggatttagtgcaggcctctggaattaatagaaacctggagaatgatggactaggtgacagggatagttccccccaaaaccacaatgtactggagaaggttattcttagttctgattcttctgaactgatcattgatgggcaaacttttggtggaaagtttgactctgagagtgttgatactgacacactgttttcatggttgtacgctggatcctcaattggtgagcagctattggcttggaaccgtatgattgacgaaaggtcaaatcagtgcatggaccttattcgggcacttgggagggagttcaacaacttgcaaaactcatgtgaacggaagcttgaacagctgagaaatgaggaggcttttatttctgtagaggacctcttatgcgaagagcaaacacgaagggagcaggtggagcagtatgggttccaaagttttgaggagatcctcaggaagcggcaggcggagttgttggaacgcaatactgaggtgcagtccgacagtaacagatccgagatagatgcaatctcagctgttttgaagaaactccacacttcacacttcggttatgatgatgccttttctggaatggccccacgcctttttgacttggacggggtcgaagatgaatggaggctgcatgattttatacatccaaatgattcaatggtacacactgttatatcaaagatgaaggaaaaagttactgtggagattagcaagatagatgctcagattatgcgaaatttatctgtgatgcggcatctagagcacaagcttggacctgcttctgctcttgattatcgaatgattcttttaccccttatgagatcgttcttacaaagccatttgggagagctggtggataaggatgccaaagagagatctgatgctgcaagggaagccttcctggctgaactctccttggatgctaagaagaatgcaagcaaaggggctgatatgaaacaatcccatgaaaaatcaaaggataaaaagaagttcaaggattctcgaaaatcaaaggagctcaaggattcaagctggagcaaccagtctctcattcaccaagacagtaccgatgagggaacatcagagacatctcaaatgcttgctgattgtgatgatctgtgttgcaaatgctcgacaagtgaggattacttcaatgaacaagaggaagaacttaggcatagggtacaacttgaagcagaggaaagaaaattggaagaggctctagaatatcaacggtggatagaggaggaagcaaagcagaaacatcttgcagaacaatgtagaagtacacatgcatcttctgttattggcataaagtttggtgactttagctacaccgagaacgagaacaatttcagccagaaactcaatggaatcgagttcgactcatctgatgcacatgcattaaccagcagtgatatgagtgtttctatgttgacgttgaaaatgaatggggtttgcaataatgcacaacctataaagcctcttggtaattttggcacccaaaatcccaagagaagttctagtgaaccacaaaggtattctcaaggtcactctgcaggaatagagaagccaaattttgagaaagtggtgcaataccatcaacggatgtgtgcatcgaggatgattttgataaaaggtttcaagaagatcttgatgaagcagtgcgccaaagccttggatgcgatgcttatcctgctggtacagtaagcacttcaaatgggacagaagtgtatgggactggacttaaaaatgctgctggtgaatacaattgttttttgaatgtgattattcagtcattgtggcatataaggcggtttcgggacgagtttcttaaaacatcattactgcacaagcatgttgaagatccttgtgctgtctgcgctttatatggtatcttcattgacctgagcaaagcatccaagggacaaagagaagctgttgcacctacttcgttgaggattgctttgagcaaatcctacccaaacagcaaattctttcaggagatgaatgatgcatctgaggtactgggtgtaatctttgagtgtttgcataagtcatacacttctcgtactgtctaccatggtgtatcccacgagaaaaattctattggatcatgggattgtgcaaatatttcttgcataacacataatctttttgggatggacgtatatgaacggatgaactgtcacaattgtaagatggagtctaggcagctcaagtatacttcatttttccacaatatcaatgctagttcactccgaactgcgaagatgatgtgtccagattcttcatttgatgaacttttgaaggttgttataatgaatgatcaactagcttgtgatcaagacgttggcggctgtggaacaccgaatcatatagaccacatcctttctaattccccacatgtctttactgttgttttgggatggcagaacaacaaagagagggtggatgacatatctgcaactttggctggtatttcaactgagatagacattagcatattctaccgtggtctagatcaaggaggcaaacacaccctggggtcagtggtttgttactatggccagcattaccattgttttgccttcaaggatggacggtgggtcatgtatgatgaccagacagtcaaggttattggtagttggggtgatgtgctcgtgatgtgtgaaaagggccatttgcaaccccaagtgcttttctttgaggctgcaaattaattattcttcagagtcgcaaaacgcgctacagcggttaacatgccctcaaatataggttttttccctgcggccatgaagattagaaatagggtagcagattcgttttgagcggggatatatagtactagcattcaacggtgcttttcgttgtgagtccgtaataagcagtcatctgagcattctagagcaaaaaagggagctgtttatcccccccttttttgctttaacctttggtgtaggcgctgaacttctgatctcatctgccaataaatcttcactgccgatcaagcgggtggagcattcgacttgaactgccatccaacagttgtagccgaatctgcatgaactcttcgttatacaccaatcatctatagaattttctgcttacattgggccgggcgggcgttctctctctctctgttttttttttggggtgggggtctggtataggagtgacagttttgaggccaccagatatagaatggaatgatatgggaatgggtgatgcggtgtgaactgtattttgctgtggatgatcttttgaaaagagtaaagctatctggaatatggatatggtaagaaatctgtagtacacgagtctatatatacaatgactcaatgggattatgcgagatgattataacgatgaataccaaaatctttatcacaactgttggttacattgatctctctttgacaggagcattgaatgatcgtgc

SEQ ID NO: 214075 - DNA, 1154 bp, Zea Mays
atggaatcggagaacgaaaagctccgtaaagaactggctactctgctcagagttgttcaaaagcgtagttgtgacatcgttgatgtcgtcaaatcagccttccaacctttcaactcacctttggtggacgaattgaaccgagcactagttgagattgacgacctcgccaaggatctcgaagacgtagcagtgcaaactcagtgggaggtctatgaaagaccttgtgggttgtacatgctcatttatatcatgtttgatctacctctgttgcatagaatggggagtgattggaaccagtatcaactggcgcacatctccgctggagatttgttgcgggcggaaatcgctgctggctctgagaatgggaagcgggccaaggaattcatggagaagggccagctcgtgcctgatgagattgtcgttaatatggtgaaggaacgccttcggcaaccagacgctcaagaaaatggttggcttttggacgggtacccaagaagctattcacaggccatggccttggaaactcttgaaatccggcctgatactttcattctgttagatgttccagatgaactccttgttgaaagggtggttggaaggcggcttgatcctgtaacagggaaaatatatcatttgaagtattctccgccagagaatgaagaaatcgcttcaaggcttacacaaagatttgacgatacagaagaaaaggttaagttgaggctggagacttattaccaaaatatcgagtccttgctatcaacatatgagaacattattgtcaaagtgcaaggagatgccacagtggatgctgtctttgctaagatcgacgagctgctgggttctatcctggagaagaaaaatgaaatggtttccagcacatgagcaaggggaatatatctgaagcacaggacgacacgtacaagtaatgtaagccagtctcacgtaatggaaatttctccatgtggatgtggtcaaagcataggaatttttttcctccaattattaactgtacgcgaatggaagcgacagatcattcgtaggttgtgagggcttcagagatcatctgctgctgtacatgttttgttgctgtcttgtgaacatacatgtcttgttgtttctcaactggaggaatgctgttaacctgctgtaaagaa

SEQ ID NO: 214076 - DNA, 1166 bp, Zea Mays
atggaatcggagaacgaaaagctccgtaaagaactggctactctgctcagagttgttcaaaagcgtagttgtgacatcgttgatgtcgtcaaatcagccttccaacctttcaactcacctttggtggacgaattgaaccgagcactagttgagattgacgacctcgccaaggatctcgaagacgtagcagtgcaaactcagtgggaggtctatgaaagaccttgtgggttgtacatgctcatttatatcatgtttgatctacctctgttgcatagaatggggagtgattggaaccagtatcaactggcgcacatctccgctggagatttgttgcgggcggaaatcgctgctggctctgagaatgggaagcgggccaaggaattcatggagaagggccagctcgtgcctgatgagattgtcgttaatatggtgaaggaacgccttcggcaaccagacgctcaagaaaatggttggcttttggacgggtacccaagaagctattcacaggccatggccttggaaactcttgaaatccggcctgatactttcattctgttagatgttccagatgaactccttgttgaaagggtggttggaaggcggcttgatcctgtaacagggaaaatatatcatttgaagtattctccgccagagaatgaagaaatcgcttcaaggcttacacaaagatttgacgatacagaagaaaaggttaagttgaggctggagacttattaccaaaatatcgagtccttgctatcaacatatgagaacattattgtcaaagtgcaaggagatgccacagtggatgctgtctttgctaagatcgacgagctgctgggttctatcctggagaagaaaaatgaaatggtttccagcacatgagcaaggaacttctccaggggaatatatctgaagcacaggacgacacgtacaagtaatgtaagccagtctcacgtaatggaaatttctccatgtggatgtggtcaaagcataggaatttttttcctccaattattaactgtacgcgaatggaagcgacagatcattcgtaggttgtgagggcttcagagatcatctgctgctgtacatgttttgttgctgtcttgtgaacatacatgtcttgttgtttctcaactggaggaatgctgttaacctgctgtaaagaa

SEQ ID NO: 214077 - DNA, 779 bp, Zea Mays
gcaaagtgcaagcagaggaaaacttgagtttgtgtgcagctaccttgcggaattgagcttgctggattatgactgcataagctatctaccctcagtagttgctgctgcctgcttgtttgtagccagattcataatccacccaaagactcgtccttggaacttgtcacttgaacaaagcacgggttatagagtctttgatctgcagaaatccatttatgtcatacatgaattgcagttgacaataaggtgcccaaatcaggtagccatcagggagaagtacaaggaccccaagtttgggtgcgtgtcgacaatggtttcaccacgagaaatccctacgtctttccttgaaggttgccataagtgaagtccggacttggacttggagaagggtttttgcagtaatgctgctggcgagtggcgatgcagaaaatagcttgatggtaggataatttaagggtaggtcggaaaatataccatggccagcgttgtagatcgttggtacggtactggtctcacagttggtagaatatgcaattgaaggctttttgtacaggagttaggctagtccgtgacacacacgtgtgcatcctctatggtctgtctttgcgcacattatgccgagcgccgaccatctcgtgctgttggcctgtctcaattaccaccagacatttgacacgtggaatctttttaagattcaatttttaaaaattgtatttctcaagctgtaacttcgattcacgaacggtttgaagcgtgtcattgagaaaaatataacgaac

SEQ ID NO: 214078 - DNA, 2206 bp, Zea Mays
ccgaaaatgcccccgcctactctgcacgccggttcatacaaaaggggcctcacgtcacggcacacagcacgcagcacatcgctcactccgtcactcgctcctcctccactcctcgccttcctcggtcgcatcaagaacacgagcaggaaggagaagaggaggagtcctatcagagccagacagccaatcagtatctgtaccattaccgttcgggcaccagattaccaaaatcctgcagaggggaatggcgccgagcagctacgagatggcggcttccaccctgctgtgcggcgaggacagcagcagcatcctggacctcgaagcggggggccaggaggaggaggaggaggtgctgctggcgcggagcaggacgcgcggggagcccagcgtggtcttccccgtgccgtccgaggaatgcgtcgccggtttcgtggaggcggaggcggcgcacatgccgcgggaggactacgccgagaggctgcgcggcgggggcacggatctccgcgtccggacggacgccatcgactggatttggaaggttcacgcgtactacggtttcggccctctcaccgcctgcttggccgtcaactacctggaccgcttcctctcgctctaccagcttccggaaggcaagtcttggacgacgcagctgctgtccgtggcgtgcttgtccctggctgccaagatggaggagacctacgttcctccgtctctggacctgcaggtcggggacgcgcggtacgtgttcgaggcgaagacggtgcagaggatggagctgctggtcctcagcacgctcagatggaggatgcgagcggtcacccccttctcgtacatcgactacttcctccaccggctcaaagacggcggtgcgccgagcagacgcgccgtcctccgatccgcggagctcatcctgcgcgtcgcgagaggaacgtgctgcctgggtttcaggccctcggaggtcgccgcggctgtcgccgccgccgtggccggcgaggagcacgccgtggatatcgacaaggcttgcacccaccgcgtgcacgaggtacggcgtgtgcctgtccccggccacttctcgcgagtcttgtcgtcagattcaatgcgatgcgatgcaatacgttaagcgtgtaccgcatggatccaaatccaagtcgagagggtgtcgcgatgcctcgaagcgatccaggccaccgtggccctgctggcgcctgcacagccgctgaaagctgaaggcccgagcagcggccgcagcagagcctcttcctcctctgccaccgtgccgcggagcccgaccggggtgctggacgctggctgcctcagctacaggagcgacgacgcggctgcggctgcggctgcctcgcacgcgagctccgcctggcgcgacgaggacggcgactgctccccggctgtttgcagcaagaggaggaagactagcagatgatgattagtacacaccagtgatggagatggaaggatcgatcgaaaagcccattccgcgcgctgatcagtgatcgtcgatctccttgacagaaagtcaagtggttttgatcgcactgaccgaagagtctggtctgctctgggagcttttgactccggtttgaatcgaagtgcctgtaagccaggcaaaggaggcgcaagcgcaaccaaaagcaggacattttggacatggcggtccagcaaagatcacgctcctctgaatgcagggtgctagtagaaatgtaccaaaggaaggggaaaaaaaggagcaaaggttttgaaggttgacaaagctgagacgggacgggacgaccaaactaaaggcagctcgacgatgacggggacgaggcgatgctggtgacatcaggcatgcgaagtagctatagccgcgtagtttgctttgttctgtaatttcccgaccattttccatttgtaaaagagagagagagagagagagagagagagaatgcaaaaaagagaggaaaagaacaattcaattcttgcgtgacaaattgaaaatagcggttaaccaactggaatcccaagaagcaggagaacagcaacatgacgacaggacccagaagacctggaaatgggtttctttgaggggttacgaactatcagcatcagcagttgctatgaaacatgaacccgctgggtcgctgccaccaaacatttgtttgactgcttgtctgcaaagaccatgcaaatatgctctgtctttttttctcta

SEQ ID NO: 214079 - DNA, 1775 bp, Zea Mays
tcgcccgcctccgctccgctgcgcaccaacacacacgctcctcccgcctcgttgccccacggatcctctgacgtactgcaccgtgcagttgggtcactgcgcgtgggccctgtcgcacgcggagcccacgcgacagtggcccatgcagtactgcaggggatccccacctcctccgacgtctctgatcggcatcgcctccgctaagagacccgcggtccacgctcccgtccaaatcccatcgccataaatctcgccacgcccgcgcccgcgcccgcgcgtgtctcttccccccaccactccgccaccggcgccgaagcagagcagccatggccggctccgagcagcgcgtcgtcgccgtcatcatggtcggcggccccaccaaagggacgcggttccggccgctgtcgctgaacgtgcccaagccgctcttccctatcgccggccagcccatggtgcaccaccccatctccgcctgcagccggatcccccacctggcacagatatacctcatcgggttctatgaggagcgggagttcgcgctctatgtctcgtctatctcccacgagctcaggatccctgtcaggtacctacgagaggataagcctcacgggtcagctggagggctctacagctttagagattacatcatggaagacagtccgtcacacatagttctgctgaattgcgacgtctgttctagcttccctcttccagacatgctagaggcccataaaaagtatggaggaatgggtactttactagtcaacaaggtatcagcagagtcagcaaaccagttcggcgagttggtagctgatcctgaaacaaatgaactgctgcactatacggaaaagccggagacttttgtgagtgatctcataaattgcggagtatatatatttactcccgatatccttagcgccattgaggatgtcttaaaacagaaaaaagacagagcaaatttgcggcgtgtatctagcattgaagctcttcattcagcaactaagatgtctttgagatgctctgggttatatctctctcagtttcgccatacctctcctcatcttttagcctcaggagatggcaaaagaactgccactattgttggcgatgtctatatccatccatctgccaaggtgcatcctacttcaaagattggcccaaatgtctctatatcagcaaatgcacgcgttggagctggtgccaggcttatcaattgcataattctggatgatgttgaaattatggaaaatgctgttgttatacattcaattgtagggtggaaatcatccattggaaaatggtcacgtgtacagggcgaaggtgatcacaatgccaaacttggcattactattcttggtgaagccgttgatgttgaagatgaagtagttgtagttaacagcatcgtgctcccaaataaaactctcaatgtcagtgtccaagaggagatcatcctataataaccatcgtttttttttgtctaattccatataaggtctgagtaccaatcacatagtttaagtttattcgttctcaccatgtaatgtaaccttccattagattgagattattagtttgcatttatacctgtcttgcagcatgacactgcacaatcttgacttgctatgctactttggttagcgattgtggtgatgtaaaaaatgtacaaacaggtgacaccattttttgtgagaatgactcaagacattacatcaaatgtgaattcaactgcgtgttgtataaatttttaacaaaaatgcatgagcagttagagcact

SEQ ID NO: 214080 - DNA, 4400 bp, Zea Mays
cgtcgtctgaaattcaggtggccgtcggatttttcgtggacgctccctagcggctcggtgtctccatgtgccgtgaaggttcgagaaccatcgtatgttcacgaatcgatttcctgtcacacacaggctctctacgatacgggaagtcgggaaccttccggatggactccttcctcagccatcgtagcttgcctcgcggcactggcggcggctccgcccggccagcacaaccgcagtcccagtcttctagacgaagcgaacgtgcgacgggaaaaacacggcccccgttggtcgaatccacgccggcgacgtcccctgccaccgcccaactgagtggtacaggtacaccgtacaccaatccatccgatctttgggcctaataccttggaacaagcaaaggggtcggacccctaaggcggcagtgctccactccatcaagcgatgcacgacgtcaatggaagactccgccggccaggaggtctgcgccgttcttggcattggggacaacatcaagggcctcttggccacgctgtcgcgcgttgacaccatcatctcctatgattcgtcccctcgctcaacctgcatcctatcataccctatcccgtgccaagtccctgattcacggtggctgtgtggtagtcggtaacgctgcatatgaacctgggcgacatcaagtgcgaggtgttctgcaaccaggtgccccgcacggcagagaacttcttggccctctacgctagcggctactacgacagcactgtgttccaccgcaacatcaaggcttcatggtataaggcggcgaccccatcggttccggcaatgcagggcctccatctgggcaccaagttcgccgacgagttcagggagtcccaaggtagcacactatgcagtgcagggcctaacagcggacccaacgtcaacggcagccggttcttcatcacctacgccaagcagccgttctgaaaaaaaaattgaacagagtcacccaagaatgtgcatgtctggaatgacagcttcagattaacgacaaccacaattttccaattgtgtggttttgatggagtcatgtatgggtaaccaggagaccatctgaataaatccgtatgcacttcaatcatgtgctaatgttgattgtacaatacatacatattaatatagtgattcatgatgtctcaacatttttagatggtaatcggtgcctgcaagtgtgagaataaacttagcttataatactattactatcgtactatggtatcatgatttatgtttattctgtctagaatatctgacatagatataagttttttctctcgaaaacgcaggagaactacgactcattatattaagaagataggaaaaaaaggcttgagaattacgcctcatgattcatcgcatttttcttgatcgttgttgcttcaaggataacaggtatatttactgcaactactcagcatgttaggtaatatcaattttttaagttgttgcatcatcatatctcattttaagttgttgtctcaccacatgtactactttataacatgaatactaagttgagtgcataattattttgtgaccactaaaaccaatattttgtatgttcagtacatgtatatatatatccatttaggaatctaatagctagactgctcatgagtctgcatttgtacaccgaactgttccacttcaaacgattttctatttaggtaattctgttatttctatgtgtatgtatctatatatattattgttactataagtttaaagcaatactcttattttaacaccataaacacaacgattaaattaacactcgcgcgaggcgcgagtaagttactagttatatatatacgccaagggatttgtttaagctgcagctaactcatttgtgttgcactgttacgccctttccacttgataactccatgactgtcttagcgagcgggcaaaaagaaatgaatttgatcaatcatattgaatcatggaatggatcacctaacacctgctgcaccatgttcgcatgggtccagtcatactcgagagaaatggtgaaatgaaatcattggacggctaagaacagcgcgccgatcggtgtgcaagaaaggctttctcaatgatgaaaactgcgtctgtaaacccctctatcaatcgcatcagcgcaccagctcacggaaagaagctcaagaacatggtgcctccttttttttctctaaaacttctgaaagttcctttaatccatgttttagctcttatcgcgtggtagaactagcgttgcagacgacaaataccacctttcatccatgacataaggcaaaggttagtccgcgcatagtttaatttgcaggggacgataacacttgtattagatgatgcaagttgcttgtcttacattttgaggtaggggaagaacacttttggtgagacaggaactggtctagagttatccctccgaaaaatcttgcagttcaaaatctgatctcttagtttttgccggtttcttcttcacatctgttccttttcttagtgatgtgtttagcttcctctgtactgctttgtatggaatccggttgaatattgggtcaggcttgtgcagtgcatcagaaaaaactctttttattttctggatttggcatagcatctcccagtgcctagtgccgggaaaccatgactgatgtctccagaatccagcatatgttctctcaactccactttattagggccagttcggtaactccattttcccaaactagtctttagtgtagactacgttactttgtggttttggttggtctagccataaggacatgtacaatggtaattaatgtagaggctcttaaggtgtttaaaaagttatttgcaaaaaaatcgtagagtcatctctctgtgaagagacgcagctcgtaaaccaagtacaaacagacgactcatttatcactgtacgaattcgtcgtctgttatatcgatccgatgacgtacaaccacatttacttctgcatttactaatagactatatttataaacattttattgtataatagagtcttttagttgtcccttgtgtttggaaagctgttttaatgtctccaccgaacataccctaaagtctctacctaatactgctttagagctttttctctacgacaagggagcttaatttctgtgcgcaattgtctctccgaggatcggtgacgtgctgacggcaaactccttggacaactacacggccgaagcaagcaaggacggccctcgtcaagaactcaagacgcgcgtttcaagccctgcctgttggtgtggggggcatgacctcgggagacagcgcgcggccatgcagccggatccggaatggccggtcgcgccgtgcgccggtgcccatccccacgcccgccgcatgctgcctccatctgccctcgatcgggaactgaggccgtgaggcgtacgaaatgcttaatcaaacacagtgatgcgcgggcgctcatccataggcgtacagcgtactgatgcagcatccatggacgtcctgaccacgccatcaatcaagcaaaaatgaaaccagcaacggtagcaaagtggcaatggtttcacttccagtccaatcaattccttcgtttgacgttctatccctgactcaggtagtcaggtgtagtgctgctgcggccacagtgctcggcgctcgctcgtgctgcctgctggtgctctgtgctcgagtgctcgacggccgctgcccgctgcgctgggagcttgcgacgagccaacgggtcaccggtcgacggccacccgcgcgccaccgcgccagactgggcgcgccctcctcgccgtgggtcctccactccgggatccggcggcggcggcggcctccctgcggccctgcctgcgccgtgcagtgccgcccctcgccggcggtcggctcaactccctgtccaccacagtgccgagccggcatccacctcctgcttccaccgccagtttgccacagtgccgcgccggcctcccgtccctggtcgaaggccgccaccgccacctactgaattgtgataatctggaggctattcttcagaagcctggtgtagaaatgttacaggaatagcaaaaaaactgacatttttagattaagaaacactagaacattttgtcagacttgatttctcacacagaaatagtaattttatttgatgtttaatctattcttgcatgtttgggagttgggacattccaaacagagccctcgatggagtgagggcctgtttggttcacgactaactatgccacactttgcataaggttagtcgtctgaattgaagaactaatcttaggcagaaaagttaggcaaagtgtggcaagttaggtagtaaaccaaacaggccctgagtcttcagttactgtttgggacattccaaaatgctcaggcc

SEQ ID NO: 214081 - DNA, 3246 bp, Zea Mays
cattaatcctgtcttttgcatacacaccgctacgcccccggctccaaccctacccccctccgcctcctcgccggcgcgctctaccccgcctcactccccatcagtgtctctcatcggcggctctccgggcttcacgttggtccggggtacctctcgtgcgatccgcgcgcaatggagcaagatcaaagcccagccgtcgacagcgcggattctggcgccgcggcttttgattttgcgactggcaatgcacctagctcggctgtgaccagcggaagcgccgtggcccctgacggtggggctcaggcagctgatacttctgcctaccaggccgagcacacggagttgaatgggacgactggcgatatgtctaattaccaatctgcaggagctgcagagaatggcacagccgtcaccgagataggcgagccggttcctgagccatcctacgaggaagctgtgctttcagcagaagaggctagattgtggagtgttgttactgcaaattgcttagatttcaatgcctggaccacacttattgaggagacggagaaaaatgctgagaacgatattttgaagatacggaaagtgtacgattcatttcttacggaattccctctttgctttgggtactggaagaaatatgctgatcatgaagcgagacttgatggtgtcaataaagttattgaggtgtatgagcgagcagttcttgcagttacttattcagtggacatttggtataactattgtcaattcgcaatttcaacatatgatgacccagatatcgtccgaagactgtttgaacgtggcttggcatacgttggaactgattatcgctccaatattttgtgggatgagtatattaagtatgaagagtcactggaggcatggagtcacctcgctgttatatatacaagagtattggaacatcccatccagcagcttgatcgctattttaattgcctcaaggaattggcttcaaagcacagtttttcagaaatacttactgcggaagaagcctcggtgtatgttgtcacgtctgagaccagtgctcaagcgcctgatggtgacacacatcctgatgatatcgataaggctggtcaaccagaactttcatctttggcagatgcagaaaaccttgcaaagtatgtctccatgagggaagagatgtacaagaaggctaaagagtacgaatctgagatcattggttttgagctagctattagaaggccatattttcatgtcaagcctcttgacaatccagagcttgaaaattggcatagctaccttgactttatcgagaaggaagaagacattaataagtatttggacgaagcttcctttgtaatgggatgttgaactgaggatagagcgtggacataatgtttggtttcgatgaggctaagtactccaaactttcatttggcagtggtcgttctgggttcatgatatatggtaccaaataccagttttgaatttttaatctcatatatgcaggtatttgcttaatgctcaccttcttaaccatctatctatcgagcaggatggtccctcctttcttatggaggggcctccataatcagctaatggagtaatctgttatcaaattgtatgaaaggtgtgtgattgcatgtgctagttattcagaattctggatccgctatgtgcaatgtatggaggataaagggagtctagacctagcaaacaatgccctggctcgtgctactcatgtgtttgtcaagaagcagccggagatccatctatttagtgctcgctttaaggagcttaatggggatatttctggagcacgtgcagaatatcagcatctttactcagatttatgtcctggctttctagaggccatcgtgaagcattctaatatggaacaccgactgggagataaagaattatcttgttcagtttatgaaaaggccatcgctgctgagaagggaaaggaacagagccagctcttgccgacgttgcttattcagtactcccgtttcttatttttggccatccgagatttggagaaggcaagagaaatattaactgtgctgcatgagcagttaaatgctgtcattcatctagagtcaatttttccatgcgaaaagcgtattgattttttagactcacttgtggagaagtttgttacacctgaatcatctcagggagaggtggcaagtctagttgacaaagaggaaatatcttccatatttttagagtttttggatctctttggggatgcaaagtcaatcaagaaggctttaactcggcatacaactcttttttcatgtaagagaagcattctgccatcaaagaaacggaaagcagatgacactgttgtctcagacagggacaaatttgctaaaactgtggttactcagtcagccacgggaactgatccaaatgcttccaatcctcctgtttggcctgcaacttctgaagcatctgggcaacaatggggagcttcttatgcacagcaggctgcatatcctgcatatggaacttacgactacagccatcaaatgccccagcctgctcctcaagcagctgcctatggtgcttatcctccaacatactctgcacaggcctatacacaacaaagctacccacagcctgcagtaattccagcagcaccagtaccagcacctacagcgccgtcagcttatcctcaacaacctgcggcagctcaaccttattatggcacaacctactactgataagtagagtagtcgtggatggtgatccgatgagcctgttaatctaccttttcgcatgtgtggttgctctgtactgccattgtttagctcgcctttagacgaatgctagcgacgagatgatcacttgagaacaaatctgagattcgtacaatcagcatttttgtcgctaggagttgccattgttttcatgcaatagcataatctactttagacgagatagcgttgttaaccatgaatatgaacataatcgacataattcagtgttcatgcctcctttcgtactgtatttttaccccaccagtggtgatggcgggattcctgtcaagcacgctcactggtggagccctccgaacaaattgtcagctaatggctcacgatctgcgactacgcagttgactaatttatactgtgtcaatgctcaacagatcagctcctagagttactctccggtaagacagccagatgatgatgtccgctggttggtagttgaaaatttatgtatttttgcttgtgctatacgagatgaaat

SEQ ID NO: 214082 - DNA, 2840 bp, Zea Mays
tttgcatacacaccgctacgcccccggctccaaccctacccccctccgcctcctcgccggcgcgctctaccccgcctcactccccatcagtgtctctcatcggcggctctccgggcttcacgttggtccggggtacctctcgtgcgatccgcgcgcaatggagcaagatcaaagcccagccgtcgacagcgcggattctggcgccgcggcttttgattttgcgactggcaatgcacctagctcggctgtgaccagcggaagcgccgtggcccctgacggtggggctcaggcagctgatacttctgcctaccaggccgagcacacggagttgaatgggacgactggcgatatgtctaattaccaatctgcaggagctgcagagaatggcacagccgtcaccgagataggcgagccggttcctgagccatcctacgaggaagctgtgctttcagcagaagaggctagattgtggagtgttgttactgcaaattgcttagatttcaatgcctggaccacacttattgaggagacggagaaaaatgctgagaacgatattttgaagatacggaaagtgtacgattcatttcttacggaattccctctttgctttgggtactggaagaaatatgctgatcatgaagcgagacttgatggtgtcaataaagttattgaggtgtatgagcgagcagttcttgcagttacttattcagtggacatttggtataactattgtcaattcgcaatttcaacatatgatgacccagatatcgtccgaagactgtttgaacgtggcttggcatacgttggaactgattatcgctccaatattttgtgggatgagtatattaagtatgaagagtcactggaggcatggagtcacctcgctgttatatatacaagagtattggaacatcccatccagcagcttgatcgctattttaattgcctcaaggaattggcttcaaagcacagtttttcagaaatacttactgcggaagaagcctcggtgtatgttgtcacgtctgagaccagtgctcaagcgcctgatggtgacacacatcctgatgatatcgataaggctggtcaaccagaactttcatctttggcagatgcagaaaaccttgcaaagtatgtctccatgagggaagagatgtacaagaaggctaaagagtacgaatctgagatcattggttttgagctagctattagaaggccatattttcatgtcaagcctcttgacaatccagagcttgaaaattggcatagctaccttgactttatcgagaaggaagaagacattaataaggtatgcttttacacttctaggaaccccttgtcctttttatttagtagtttttatggaacacttggaattttataacttacaatccagtcttattggctcaactatatcctttaacggctagtatttggacgaagcttcctttgtaatgggatgttgaactgaggatagagcgtggacataatgtttggtttcgatgaggctaagtactccaaactttcatttggcagtggtcgttctgggttcatgatatatggtaccaaataccagttttgaatttttaatctcatatatgcaggtatttgcttaatgctcaccttcttaaccatctatctatcgagcaggatggtccctcctttcttatggaggggcctccataatcagctaatggagtaatctgtgtgaacttctcttttttttgtcaataccatatccttactatcattatttaccccctttatttcctcacatgcacaaggtttctgatggtatgctaaattgttttcaggttatcaaattgtatgaaaggtgtgtgattgcatgtgctagttattcagaattctggatccgctatgtgcaatgtatggaggataaagggagtctagacctagcaaacaatgccctggctcgtgctactcatgtgtttgtcaagaagcagccggagatccatctatttagtgctcgctttaaggagcttaatggggatatttctggagcacgtgcagaatatcagcatctttactcagatttatgtcctggctttctagaggccatcgtgaagcattctaatatggaacaccgactgtttatgaaaaggccatcgctgctgagaagggaaaggaacagagccagctcttgccgacgttgcttattcagtactcccgtttcttatttttggccatccgagatttggagaaggcaagagaaatattaactgtgctgcatgagcagttaaatgtaacaaaaacagtgcttgaggctgtcattcatctagagtcaatttttccatgcgaaaagcgtattgattttttagactcacttgtggagaagtttgttacacctgaatcatctcagggagaggtggcaagtctagttgacaaagaggaaatatcttccatatttttagagtttttggatctctttggggatgcaaagtcaatcaagaaggctttaactcggcatacaactcttttttcatgtaagagaagcattctgccatcaaagaaacggaaagcagatgacactgttgtctcagacagggacaaatttgctaaaactgtggttactcagtcagccacgggaactgatccaaatgcttccaatcctcctgtttggcctgcaacttctgaagcatctgggcaacaatggggagcttcttatgcacagcaggctgcatatcctgcatatggaacttacgactacagccatcaaatgccccagcctgctcctcaagcagctgcctatggtgcttatcctccaacatactctgcacagtttatctactggtattcagttacgaaatcaggaattgggactt

SEQ ID NO: 214083 - DNA, 1210 bp, Zea Mays
tgaaaacatatttgtacaggtgtttggaaaagttgaagagagagacatgttcggagaggttggtgctctgtgtgacataccccagccatttacttgtcgcaccagtaccctatcacagctcttgagaataaggaagataagattaacagagatcatgcaagaacacagggaagacagcaatattatattgaacaatctatttcagaagctaaagctgcaggaaaatttaccagaattaaatcaactagatcgaagattcatgcacaagtatgagctattccatgctactcgagaagcatggttgttacctcaaccttacttacaatacactgagcacaaatttgaagacattagtaagaaggccccagcctttggtggagatcatggttcaacaaaactagcagcagaaacaatccagttgagggtgccacagcaaggaaacagtcatgaccatggtaattttggggcgacagataggatggcaagtggagatgacaaacgtaatgatcttcacataaactgtgagaccaaaaaaggaaccaaggaattttgcattcagataaaatcgaaagattgtgaagcagcaagctattggcaaacaagccctgaaacagtgaagctgggttcttcccacagtacattggatgccataactacgagagaaaatcaagatactagtaacataaaatcatctaacaaaagagttacaattcacgcagatcctcataatgcaacaggttctttagtacaaaatgggaagcttatcaatctgccttgttcactggaggagattttcgaaatcggaagtcagaagtttccaggtttccaccctacaaaattggtcagtagagactatgctgagatagatgacgttagtgttattcgagatggtgaccacttattccttcttcagatgtagaaccagaataacatcgatctaacctaacgtaacaataaaggcttcaagtcctccaatctggcaaaaacagcagattgtaaatcgagtggagatatgaagaggaatacctttttacaaattgttccggtcatttctgacattatgtaaatatctatttgcacgagctgctgtctcatgcaaaagtcatgccagaaagcggtttccgttttttttttctttctatttgataataagctctagacaaaaatatggaatctccgcaaaataaacttaataaaggcgaggctttac

SEQ ID NO: 214084 - DNA, 1338 bp, Zea Mays
cggcaggaacgacaaacgggagaaggaagagaactcgtggggaaggcgaagcgggacgatgcagcccaagatcagcgcgttcttcgagcggcaggagacggacccagatccgattagtggcgacggtgaggggaacgggcagggaaacgtcggcgcggcgacggaggcgaagcggaaggccaatggctgcaggctcgatgggctcgtcagcaagaagaggaactacgcgcagctccatctggagctagggcagcctgatttcgtcctccacacgtgctccgtgtgcggcatgatgtacgcccgagggaacgacgaagacgaaaaggttcacagggcgtaccacaagagctactcccgagggagtccctttcaagggttggaaaaaagagacagtgatagcgaggtccgagggcggtgatcgggttgttcttgcaactgacgagaactcttgtatgtcgaaaagtaagtggtatggtctatgcaagttatgtgatgtcaaacaaatatggcaggtcagagaggtgatcacagtggtggagaaggagctgggatttggtgaagggaaactcctgcataagctttgcaaggtgtatctatacatatctgcacaaaggatcgtggggtgccttgtcactgaaccgataaaaacaggacatagagttatcccaagctccacggaaggaagccctaatgatttgccagttagtagtactgagcgaggaaaaaatggtcatacattagagttcggcagtattagtttcaagagggaaatcataaggcggcacagtcgttcggtcaagaacaaagaagagtgccaggaccctggtgccatactttgcgaaacggaagctgttcctgcgctttgtggatttcgagccatctgggtggcaccatggtgcagaagaaaacgaatttgcctcaaaactaatggacgttgcaaggaaaaccttctgcgaaggcaggactttggggatttcacagtttgctttctctcccccgacctcctctggcaaggggctagcatgccgttactgcaagaccagtgcattcttagtctacaaagacggaccggtgtaacacttgtactctaagaaagccctctctgaaacttttcttcctcttgtaaaatacgcttatcttgttggagcatttgacaaaaaaaatgtaaacaattagatcaatatgtattcaggtagaccagaaattagcgatgctttgtaacaatgtagctttctcttttgagtggtgacaatagctttcttgtgatcttcatgttggggacttgttctcaaatgctatgagttaagaacgaggcaacaaggagaatgttaaacgata

SEQ ID NO: 214085 - DNA, 1420 bp, Zea Mays
atattttctatgttttgttagcgattgatcttttttacatggtcaagttaagatgacattcatcagcgaattttcccaccgctcagcagtgacctcgttcccgtcctcctcgcatccctctcgtccgccgccgcctggctcgcgccgccgacagtttctcggcccagatcgagacacgcccgccatcctacaccaggtgccgaggccttcgccgatcaaagagatcccagacagcagatccgtccgtgccctgctcctcgaaccatggggacctctgcccaggaatcgcctctctggaagcgtatcgacgatgccgagtactatctagtcagtggatcatttgaccaggcggtgttgactgctttatccgtcgccgatgaaatacacatggcttctttggagagcgctagcgaccaggatgagctcctggagatgcttgaatcggctgggatggtgcttgtgcaggcactaaaagaactcaggagggcctctgagatgtttgctcagcttaagatgatgtttggttcagtgccatcagtgcctgctagagttttccttacaggagctaccattcaaatggcagaaggatctatatctgacctcagaccaatctttgaggagtaccttgccaattggagatatacggatgatgaggacctactaaaaaagcttcatgcagtgcaattagctgcaaataaaaaactgtccactgttgaaggggtaaaacaaacagcagagaggaacctttctacttctacaaatgactcaacaccatcgccacatgaggatcctccaaagatagttcctgcgtgcgatgggctcaaaaaggtcctgctgaagtctgctcaacaagctcagcatgttgcaaatcattttgatccgtttttctggtggtttcattcaattcgcctgaagtttgggaaaatacatattgttctacccagtggtaagttagtgtttctgttctctctgctgttctcagccatgtacgtgctgcgaaggaaaactgctggcttgaagagggctgtgttccagcaagctgcttccctgcgacgagcattttttgatgcacttcagcttgcgttctctgtccagatgaaccctctagctgctgttcaacaagtgccacaagcccctcgaggaagctggtgattggtgatgttctttatgccttgatctatgtaacattataactcaactgaaattcaacaggcaaccagatttcatgtcgcggaaaatgtggctgtgtaaatactagtgtgcttaatgcagcatgaatgtgatgatgacctgggtttttttgtgtccattctcacctgaagcatattggactggggattatttacaagagctatggcttttgaattggggaaacggattaagtgcaaccaaaccaattagtgtaaccgatgaaaccaag

SEQ ID NO: 214086 - DNA, 1869 bp, Zea Mays
atattttctatgttttgttagcgattgatcttttttacatggtcaagttaagatgacattcatcagcgaattttcccaccgctcagcagtgacctcgttcccgtcctcctcgcatccctctcgtccgccgccgcctggctcgcgccgccgacagtttctcggcccagatcgagacacgcccgccatcctacaccaggtgccgaggccttcgccgatcaaagagatcccagacagcagctatctagtcagtggatcatttgaccaggcggtgttgactgctttatccgtcgccgatgaaatacacatggcttctttggagagcgctagcgaccaggatgagctcctggagatgcttgaatcggctgggatggtgcttgtgcaggcactaaaagaactcaggagggcctctgagatgtttgctcagcttaagatgatgtttggttcagtgccatcagtgcctgctagagttttccttacaggagctaccattcaaatggcagaaggatctatatctgacctcagaccaatctttgaggagtaccttgccaattggagatatacggatgatgaggtttatgtttttgatggaggaaatgacagcacttcaaatggttttgtcgttaaatctattatgtcaactggccagtattttgaggtggcagaattgtatacagtaacattcctctgtattgtctctcaagatagtgaaactgctatctcatgggcagaaaaggctcatctaactgagcaaagccggcaggttttttttttttgtaaacgctacttaataattctactacagcataagaatctgagtgttccattatgctaacataggtcttccagcgtgggatcttataggtccagataattttcatgctaaagtaggattcttatgttcccaaaactatttcttgtatgaattaattcccactacagtatgcttctcatttccgaataacttctatagttccatgctaaactagggctcttcatatttccaaagcaatttgttttgaattcccgtcattctttattttctttagaggttttactgttgcattcttttttcatcaagacattttttttctttctttctacaggacctactaaaaaagcttcatgcagtgcaattagctgcaaataaaaaactgtccactgttgaaggggtaaaacaaacagcagagaggaacctttctacttctacaaatgactcaacaccatcgccacatgaggatcctccaaagatagttcctgcgtgcgatgggctcaaaaaggtcctgctgaagtctgctcaacaagctcagcatgttgcaaatcattttgatccgtttttctggtggtttcattcaattcgcctgaagtttgggaaaatacatattgttctacccagtggtaagttagtgtttctgttctctctgctgttctcagccatgtacgtgctgcgaaggaaaactgctggcttgaagagggctgtgttccagcaagctgcttccctgcgacgagcattttttgatgcacttcagcttgcgttctctgtccagatgaaccctctagctgctgttcaacaagtgccacaagcccctcgaggaagctggtgattggtgatgttctttatgccttgatctatgtaacattataactcaactgaaattcaacaggcaaccagatttcatgtcgcggaaaatgtggctgtgtaaatactagtgtgcttaatgcagcatgaatgtgatgatgacctgggtttttttgtgtccattctcacctgaagcatattggactggggattatttacaagagctatggcttttgaattggggaaacggattaagtgcaaccaaaccaattagtgtaaccgatgaaaccaag

SEQ ID NO: 214087 - DNA, 1168 bp, Zea Mays
atattttctatgttttgttagcgattgatcttttttacatggtcaagttaagatgacattcatcagcgaattttcccaccgctcagcagtgacctcgttcccgtcctcctcgcatccctctcgtccgccgccgcctggctcgcgccgccgacagtttctcggcccagatcgagacacgcccgccatcctacaccaggtgccgaggccttcgccgatcaaagagatcccagacagcagctatctagtcagtggatcatttgaccaggcggtgttgactgctttatccgtcgccgatgaaatacacatggcttctttggagagcgctagcgaccaggatgagctcctggagatgcttgaatcggctgggatggtgcttgtgcaggcactaaaagaactcaggaggacctactaaaaaagcttcatgcagtgcaattagctgcaaataaaaaactgtccactgttgaaggggtaaaacaaacagcagagaggaacctttctacttctacaaatgactcaacaccatcgccacatgaggatcctccaaagatagttcctgcgtgcgatgggctcaaaaaggtcctgctgaagtctgctcaacaagctcagcatgttgcaaatcattttgatccgtttttctggtggtttcattcaattcgcctgaagtttgggaaaatacatattgttctacccagtggtaagttagtgtttctgttctctctgctgttctcagccatgtacgtgctgcgaaggaaaactgctggcttgaagagggctgtgttccagcaagctgcttccctgcgacgagcattttttgatgcacttcagcttgcgttctctgtccagatgaaccctctagctgctgttcaacaagtgccacaagcccctcgaggaagctggtgattggtgatgttctttatgccttgatctatgtaacattataactcaactgaaattcaacaggcaaccagatttcatgtcgcggaaaatgtggctgtgtaaatactagtgtgcttaatgcagcatgaatgtgatgatgacctgggtttttttgtgtccattctcacctgaagcatattggactggggattatttacaagagctatggcttttgaattggggaaacggattaagtgcaaccaaaccaattagtgtaaccgatgaaaccaag

SEQ ID NO: 214088 - DNA, 1849 bp, Zea Mays
atattttctatgttttgttagcgattgatcttttttacatggtcaagttaagatgacattcatcagcgaattttcccaccgctcagcagtgacctcgttcccgtcctcctcgcatccctctcgtccgccgccgcctggctcgcgccgccgacagtttctcggcccagatcgagacacgcccgccatcctacaccaggtgccgaggccttcgccgatcaaagagatcccagacagcagctatctagtcagtggatcatttgaccaggcggtgttgactgctttatccgtcgccgatgaaatacacatggcttctttggagagcgctagcgaccaggatgagctcctggagatgcttgaatcggctgggatggtgcttgtgcaggcactaaaagaactcaggagggcctctgagatgtttgctcagcttaagatgatgtttggttcagtgccatcagtgcctgctagagttttccttacaggaaggatctatatctgacctcagaccaatctttgaggagtaccttgccaattggagatatacggatgatgaggtttatgtttttgatggaggaaatgacagcacttcaaatggttttgtcgttaaatctattatgtcaactggccagtattttgaggtggcagaattgtatacagtaacattcctctgtattgtctctcaagatagtgaaactgctatctcatgggcagaaaaggctcatctaactgagcaaagccggcaggttttttttttttgtaaacgctacttaataattctactacagcataagaatctgagtgttccattatgctaacataggtcttccagcgtgggatcttataggtccagataattttcatgctaaagtaggattcttatgttcccaaaactatttcttgtatgaattaattcccactacagtatgcttctcatttccgaataacttctatagttccatgctaaactagggctcttcatatttccaaagcaatttgttttgaattcccgtcattctttattttctttagaggttttactgttgcattcttttttcatcaagacattttttttctttctttctacaggacctactaaaaaagcttcatgcagtgcaattagctgcaaataaaaaactgtccactgttgaaggggtaaaacaaacagcagagaggaacctttctacttctacaaatgactcaacaccatcgccacatgaggatcctccaaagatagttcctgcgtgcgatgggctcaaaaaggtcctgctgaagtctgctcaacaagctcagcatgttgcaaatcattttgatccgtttttctggtggtttcattcaattcgcctgaagtttgggaaaatacatattgttctacccagtggtaagttagtgtttctgttctctctgctgttctcagccatgtacgtgctgcgaaggaaaactgctggcttgaagagggctgtgttccagcaagctgcttccctgcgacgagcattttttgatgcacttcagcttgcgttctctgtccagatgaaccctctagctgctgttcaacaagtgccacaagcccctcgaggaagctggtgattggtgatgttctttatgccttgatctatgtaacattataactcaactgaaattcaacaggcaaccagatttcatgtcgcggaaaatgtggctgtgtaaatactagtgtgcttaatgcagcatgaatgtgatgatgacctgggtttttttgtgtccattctcacctgaagcatattggactggggattatttacaagagctatggcttttgaattggggaaacggattaagtgcaaccaaaccaattagtgtaaccgatgaaaccaag

SEQ ID NO: 214089 - DNA, 1952 bp, Zea Mays
atattttctatgttttgttagcgattgatcttttttacatggtcaagttaagatgacattcatcagcgaattttcccaccgctcagcagtgacctcgttcccgtcctcctcgcatccctctcgtccgccgccgcctggctcgcgccgccgacagtttctcggcccagatcgagacacgcccgccatcctacaccaggtgccgaggccttcgccgatcaaagagatcccagacagcagatccgtccgtgccctgctcctcgaaccatggggacctctgcccaggaatcgcctctctggaagcgtatcgacgatgccgagtactatctagtcagtggatcatttgaccaggcggtgttgactgctttatccgtcgccgatgaaatacacatggcttctttggagagcgctagcgaccaggatgagctcctggagatgcttgaatcggctgggatggtgcttgtgcaggcactaaaagaactcaggagggcctctgagatgtttgctcagcttaagatgatgtttggttcagtgccatcagtgcctgctagagttttccttacaggagctaccattcaaatggcagaaggatctatatctgacctcagaccaatctttgaggagtaccttgccaattggagatatacggatgatgaggtttatgtttttgatggaggaaatgacagcacttcaaatggttttgtcgttaaatctattatgtcaactggccagtattttgaggtggcagaattgtatacagtaacattcctctgtattgtctctcaagatagtgaaactgctatctcatgggcagaaaaggctcatctaactgagcaaagccggcaggttttttttttttgtaaacgctacttaataattctactacagcataagaatctgagtgttccattatgctaacataggtcttccagcgtgggatcttataggtccagataattttcatgctaaagtaggattcttatgttcccaaaactatttcttgtatgaattaattcccactacagtatgcttctcatttccgaataacttctatagttccatgctaaactagggctcttcatatttccaaagcaatttgttttgaattcccgtcattctttattttctttagaggttttactgttgcattcttttttcatcaagacattttttttctttctttctacaggacctactaaaaaagcttcatgcagtgcaattagctgcaaataaaaaactgtccactgttgaaggggtaaaacaaacagcagagaggaacctttctacttctacaaatgactcaacaccatcgccacatgaggatcctccaaagatagttcctgcgtgcgatgggctcaaaaaggtcctgctgaagtctgctcaacaagctcagcatgttgcaaatcattttgatccgtttttctggtggtttcattcaattcgcctgaagtttgggaaaatacatattgttctacccagtggtaagttagtgtttctgttctctctgctgttctcagccatgtacgtgctgcgaaggaaaactgctggcttgaagagggctgtgttccagcaagctgcttccctgcgacgagcattttttgatgcacttcagcttgcgttctctgtccagatgaaccctctagctgctgttcaacaagtgccacaagcccctcgaggaagctggtgattggtgatgttctttatgccttgatctatgtaacattataactcaactgaaattcaacaggcaaccagatttcatgtcgcggaaaatgtggctgtgtaaatactagtgtgcttaatgcagcatgaatgtgatgatgacctgggtttttttgtgtccattctcacctgaagcatattggactggggattatttacaagagctatggcttttgaattggggaaacggattaagtgcaaccaaaccaattagtgtaaccgatgaaaccaag

SEQ ID NO: 214090 - DNA, 1506 bp, Zea Mays
atattttctatgttttgttagcgattgatcttttttacatggtcaagttaagatgacattcatcagcgaattttcccaccgctcagcagtgacctcgttcccgtcctcctcgcatccctctcgtccgccgccgcctggctcgcgccgccgacagtttctcggcccagatcgagacacgcccgccatcctacaccaggtgccgaggccttcgccgatcaaagagatcccagacagcagctatctagtcagtggatcatttgaccaggcggtgttgactgctttatccgtcgccgatgaaatacacatggcttctttggagagcgctagcgaccaggatgagctcctggagatgcttgaatcggctgggatggtgcttgtgcaggcactaaaagaactcaggagggcctctgagatgtttgctcagcttaagatgatgtttggttcagtgccatcagtgcctgctagagttttccttacaggaaggatctatatctgacctcagaccaatctttgaggagtaccttgccaattggagatatacggatgatgaggtttatgtttttgatggaggaaatgacagcacttcaaatggttttgtcgttaaatctattatgtcaactggccagtattttgaggtggcagaattgtatacagtaacattcctctgtattgtctctcaagatagtgaaactgctatctcatgggcagaaaaggctcatctaactgagcaaagccggcaggacctactaaaaaagcttcatgcagtgcaattagctgcaaataaaaaactgtccactgttgaaggggtaaaacaaacagcagagaggaacctttctacttctacaaatgactcaacaccatcgccacatgaggatcctccaaagatagttcctgcgtgcgatgggctcaaaaaggtcctgctgaagtctgctcaacaagctcagcatgttgcaaatcattttgatccgtttttctggtggtttcattcaattcgcctgaagtttgggaaaatacatattgttctacccagtggtaagttagtgtttctgttctctctgctgttctcagccatgtacgtgctgcgaaggaaaactgctggcttgaagagggctgtgttccagcaagctgcttccctgcgacgagcattttttgatgcacttcagcttgcgttctctgtccagatgaaccctctagctgctgttcaacaagtgccacaagcccctcgaggaagctggtgattggtgatgttctttatgccttgatctatgtaacattataactcaactgaaattcaacaggcaaccagatttcatgtcgcggaaaatgtggctgtgtaaatactagtgtgcttaatgcagcatgaatgtgatgatgacctgggtttttttgtgtccattctcacctgaagcatattggactggggattatttacaagagctatggcttttgaattggggaaacggattaagtgcaaccaaaccaattagtgtaaccgatgaaaccaag

SEQ ID NO: 214091 - DNA, 3226 bp, Zea Mays
cagaattttaatccaagcgagaaggtgtccagccgaggaggacgtagagctgggcatataacgagctagatttcaaaaaaaaaaaagggaaccatgaagaaagtgttcgatcagacggtccgggacctaaaaagagaggtgaacaagaaggtcctcaaggtgcctggaatagaacaaaagatccttgatgccacaagcaacgagccgtggggtccacatggatctctactggcagacattgctcaagcgacgaataactatcatgagtaccagatgatcatgcacattgtgtggaagagggtcagtgacactggtaaaaattggcgtcatgtttacaagggattgattgttttggattacctggtggcgcatggcactgaacgagttattgatgacatcagagaacatgcttatcagatatcagcactagctgatttccagtacattgattcttctgggagagatcaaggtagcaatgtacgaaggaaatctcagagccttgtcagtttagttaatgataaagaaaggatacaggaagttagagagaaagcactctctaccaaggacaagtacaggagtgcgtttgcccccagtggcaggagcccaggtggatatggtggtggttatgataatgaccgctatgaaggcagctatggcagtagatatgacaacagaaatggaaatgggaggggagactatggatacagggacgatgacagatatggtggacctggaggtacacccaatcgggaaggagatcgttattccagagattctaatgaacgctatggcagagattatagagaagatgaatacaaaggaagtcatagcaaccatgaatatgctgaaggagcaggtcgcaggagctatggtcaggaaagagattcatatggggatggtgaagcttattcatcccgtggtcgtggcagcaatgctgatgatcctactcaggatgataggcctatagagcgaaagctttctaaccagcaaatttcttcaccaccaccgaactacgaagatgtcacaagagatggccaggacaatcttcacgatgacagaaatggaggaagtgttcctgctgctgtatcaagggtgccctctccttcagttcctgcaacaactgttcctgcagtacaggtgaatggggttcatgacagcactgttgaagatgtacctgcaccaccaactgctcatgccgagcctaatggatttgatgagtttgatccacgtggatctgtaccagattcttcccctcctgtaaaccctgcatcagtagcgaatagcttggagatggatttgtttggatcagatcctattagttcgttggctttggtgtctgtgcctcaaccaacgactacatcaaatgttgaagcaccggcaaattcaggttttgaaacaaatagttttgtgggcatgcctcctgcttcaactggatttggcgagattgatgcttcaaatccttttggggatcctacacctttcaaggcagttcttgatgaaagtccagcactacctcagacacatgctgcaccagctggttctttccaacccactggacctggtacggatgtgaaccctttccagcctgcttcagccgcaagctttggttttggagacactcttggtgatctcacttttgcaccaaatgctgcacctgagctgcaagatatgtttgcaaacacagcctccttgccttcagaggcacctcaggctgcccctgcattttcttattcacaagggcctcatcctggtgctgccatccagtctcaatttccccagactgtcgccccatcatttcctccttcgcaggtgcctcaatctgtaacacccaatctgccaccaggccaatcgaacttttttttgcaatcagcatcagggtctggtattgacagcctgtctggggttcctacccagaatggagcaccatcctacattcccccacagaattctcagttcactgctccggcaaatcaacaaccattgcagccaagcttcatcccacaaactagcacaccagcactccagccggccttgatctctaggggggcatcccagccccttggtgtgccaaattcagtgcctactagtggcagcttcccgttgcagtcaagttcatcagctcccccagaaacaatcgtttctgctttgcaagtcaatcaaactgagccagtgaagaagtttgagcccagatctaaactgtggtctgatactttgagccgaggtctagtcaatctggacatttctggaccaaaagcgaatcctcatgctgatattggagttgactttgattcaatcaatcgcaaggagaaaaggcaggaaaagaaaatcaaccaagcacctgtggtgtctacagtcaccatgggcaaggccatgggagctggttccggcattggtcgggctggtgtaggtgcaatggcacctcctcctaaccaaatgggtgccgggaggggtatgggtcctggtgccggtgccggttatggtggtggaatgggaatgaaccggccaatgggcatggggatgggaatgaatcaacaacagatgaggatggggatgaaccaacaaccgatgggaatggggatggggatgaaccaacaaccgatgggaggaatgaacatggggatggggatgaaccaggggatgccgatgcgtcctccaatggggatgggtcctggtggaatgcccggtgctggctacaatcagatgggcgcggcgtacggtggccagcagccatacggtggatacaggtgaggaggggctatgcagtcccccacaccacagatttatgggggcgaggtgttgaagaaacggttttggaggcatctgtattttgctcacctggttttgctttgggtatgatttcttgtttcttttgggggtggaggtgagaagggtataattttcgtcactattcttttacagtctatgttggatactgtacctactttactaaatagcaaaaagcaaacatatgaacaagggcggtgctacaactactgcgttgtgttggatgtaaagccttgatatattatctctttcccatgtagttgtggctataggcggcttcttttcagtgaacatattgtctgttccagcgttcttgctggatggatagtaaatggctgtaccatttggttgaattatcatggtttttgctttgatgttagtttgcatgtgaaatttgacatgctttgttcacatcgttattcttgtatcagttactatcgag

SEQ ID NO: 214092 - DNA, 3072 bp, Zea Mays
ttcttgggggcgtttgtttgttttctatccttgatgccacaagcaacgagccgtggggtccacatggatctctactggcagacattgctcaagcgacgaataactatcatgagtaccagatgatcatgcacattgtgtggaagagggtcagtgacactggtaaaaattggcgtcatgtttacaagggattgattgttttggattacctggtggcgcatggcactgaacgagttattgatgacatcagagaacatgcttatcagatatcagcactagctgatttccagtacattgattcttctgggagagatcaaggtagcaatgtacgaaggaaatctcagagccttgtcagtttagttaatgataaagaaaggatacaggaagttagagagaaagcactctctaccaaggacaagtacaggagtgcgtttgcccccagtggcaggagcccaggtggatatggtggtggttatgataatgaccgctatgaaggcagctatggcagtagatatgacaacagaaatggaaatgggaggggagactatggatacagggacgatgacagatatggtggacctggaggtacacccaatcgggaaggagatcgttattccagagattctaatgaacgctatggcagagattatagagaagatgaatacaaaggaagtcatagcaaccatgaatatgctgaaggagcaggtcgcaggagctatggtcaggaaagagattcatatggggatggtgaagcttattcatcccgtggtcgtggcagcaatgctgatgatcctactcaggatgataggcctatagagcgaaagctttctaaccagcaaatttcttcaccaccaccgaactacgaagatgtcacaagagatggccaggacaatcttcacgatgacagaaatggaggaagtgttcctgctgctgtatcaagggtgccctctccttcagttcctgcaacaactgttcctgcagtacaggtgaatggggttcatgacagcactgttgaagatgtacctgcaccaccaactgctcatgccgagcctaatggatttgatgagtttgatccacgtggatctgtaccagattcttcccctcctgtaaaccctgcatcagtagcgaatagcttggagatggatttgtttggatcagatcctattagttcgttggctttggtgtctgtgcctcaaccaacgactacatcaaatgttgaagcaccggcaaattcaggttttgaaacaaatagttttgtgggcatgcctcctgcttcaactggatttggcgagattgatgcttcaaatccttttggggatcctacacctttcaaggcagttcttgatgaaagtccagcactacctcagacacatgctgcaccagctggttctttccaacccactggacctggtacggatgtgaaccctttccagcctgcttcagccgcaagctttggttttggagacactcttggtgatctcacttttgcaccaaatgctgcacctgagctgcaagatatgtttgcaaacacagcctccttgccttcagaggcacctcaggctgcccctgcattttcttattcacaagggcctcatcctggtgctgccatccagtctcaatttccccagactgtcgccccatcatttcctccttcgcaggtgcctcaatctgtaacacccaatctgccaccaggccaatcgaacttttttttgcaatcagcatcagggtctggtattgacagcctgtctggggttcctacccagaatggagcaccatcctacattcccccacagaattctcagttcactgctccggcaaatcaacaaccattgcagccaagcttcatcccacaaactagcacaccagcactccagccggccttgatctctaggggggcatcccagccccttggtgtgccaaattcagtgcctactagtggcagcttcccgttgcagtcaagttcatcagctcccccagaaacaatcgtttctgctttgcaagtcaatcaaactgagccagtgaagaagtttgagcccagatctaaactgtggtctgatactttgagccgaggtctagtcaatctggacatttctggaccaaaagcgaatcctcatgctgatattggagttgactttgattcaatcaatcgcaaggagaaaaggcaggaaaagaaaatcaaccaagcacctgtggtgtctacagtcaccatgggcaaggccatgggagctggttccggcattggtcgggctggtgtaggtgcaatggcacctcctcctaaccaaatgggtgccgggaggggtatgggtcctggtgccggtgccggttatggtggtggaatgggaatgaaccggccaatgggcatggggatgggaatgaatcaacaacagatgaggatggggatgaaccaacaaccgatgggaatggggatggggatgaaccaacaaccgatgggaggaatgaacatggggatggggatgaaccaggggatgccgatgcgtcctccaatggggatgggtcctggtggaatgcccggtgctggctacaatcagatgggcgcggcgtacggtggccagcagccatacggtggatacaggtgaggaggggctatgcagtcccccacaccacagatttatgggggcgaggtgttgaagaaacggttttggaggcatctgtattttgctcacctggttttgctttgggtatgatttcttgtttcttttgggggtggaggtgagaagggtataattttcgtcactattcttttacagtctatgttggatactgtacctactttactaaatagcaaaaagcaaacatatgaacaagggcggtgctacaactactgcgttgtgttggatgtaaagccttgatatattatctctttcccatgtagttgtggctataggcggcttcttttcagtgaacatattgtctgttccagcgttcttgctggatggatagtaaatggctgtaccatttggttgaattatcatggtttttgctttgatgttagtttgcatgtgaaatttgacatgctttgttcacatcgttattcttgtatcagttactatcgag

SEQ ID NO: 214093 - DNA, 2793 bp, Zea Mays
gtttcggcgtcgttattagctcgttttttctcttggcacgcgtgctcgacagactgactccatctgaccgggacacgtatagccgtgccagttgccgtccgttgcccaaactgtatccagccctctcggtctcggatagacagcgacggagaggagagcggcgggcggagagaagtggaggaagaagacgaggatggccacctatttcacgctcaacaccggggctcgcatcccctcggtagggctcggcacctacaaggccggacccggcgtcgtcgccgacgcgatcaccgccgccgtcaaggccgggtaccggcacatcgactgcgcgccgctatacaagaacgagaaggagatcggcgttgctctgaacaagctctttgatgacggcgtcgtcaagcgagaagaccttttcatcacctcaaagatatggtgcagcgatctcgcacctgaagacgtgccgttggcgatcgacatcaccctgaatgatctgcagctagattatcttgacctgtacctgatacactggcccttccagataaagagaggcagcgagctcagtccagagaacttcgtccacctcgacatgcccaagacctggcaggcaatggagaggctgtacggctcaggcaaggctcgcgcggtaggcgtcagcaatttctcgaccaggaagctggccgatctgcttgccgtagcccgtgtcactccagccgttgatcaggtggagtgtcaccccggctggcagcaggcgaggctcagagcgttctgctgctccagcggggttcatttctctgcgtacgcgccgctaggcaggatgaaagccgtcgccagtgacccggtggtcgcatccgtagccgagagcttggggaaaactccggcacaggttgctctgcgatggggtatccagcagggccagagcgtgcttcccaaaagcgccaatgagtcgaggttgaaggagaacattgacctgtttggttggtccattcctgatgagctgtgcgccaagttttctgaaattgaacaggttaagcaaatcagaaatgacgcgtttgtgcacccccagagtatttacaaaacaatcgacgaactctgggatggtgagatctaaaatgaagatcattttcggtacgaaatcaatctgtaaccagagttgaaatttacgccaaaaaagtagggatatatgcttttgtcttccaaggggggaaaaggcacatgtttatcttaagcactactggcaacaggcatgtggtgtgggttgcattttcggcagggctgagtgacgtcagcatattgttgcattgcagcagatccaatgaaggggcccttgagtaaagcatagaacgaacaattttcatctgttgttgtcgtatgctcgtttcatcgatgactttgtatgtagcattaagtgtagttcttaaataaccgagaagtcatatcctggcctagccaaagcttccattaattcaggattcagcacatagccgatcataaagctagctttgagagctctttgttccggaaacgttacgaaacgatgagcaagcatcgacatttgccggcctttagatagcctcaggcggcgtgcatctgcgctcgcagaagctgatgaggatgtccgcacaccggaagacgggtggttcgtcgatgccgccggtgggggcatggttgtgatggtcatcaagctccaaaatcaatatagaaaatggtttaaagtcatttacctttcaatctctccctttttggttgatgtcaacacataaacaaagcaaatatcatattatgaaaattgtaactagtttgcaatttgctcaagtattcataagatactaagtacaaagcagttctaagtgaatatgagtgtttttgacatgattaacattttggaacacatttgcaccagttgcattcgattttgcaaacttttgataaaatcttttcaaactcattttcttttggccgaaagtatagaaatggaattttcacaagcatttctaagttttgaagaattcttccccttgcttttgttttggccaaataaatgctctccatgaacaaattctcaccttttagtttgaaaacatttttctcctcttagctgtcaagagggttttcttaaatgaaacagtaccaatttggaagactaaaaagttttaaaaaacaaggtggtggtacagtccttttgctttggcggtgcggttcttttgctttggcctagtaattttcccctttggcattgagcaccaaaaacgaagaaattgagaggcctttctcaacatggatatggattttaagaacttgagtttgagcaagggtgtttggtaccaaatgaatggtagtggaagcagtccctttgctcagcaacaaaggaaggatacggcagggcgacgaggtcgttgaggatgtgatcggcaagtgcatatcgctaaagagtgaggaggatctgactccaccaacaagggttgtgggaggatgttgggtccaatatgatggacatgagggatcggatattgtgcaacctggtggcctgagcgtgaagagtagcgacgtggtcagcgtcgagttcagaggtgagggggcccttagcagtgggcggatgagcctcatgaacgactggaggatgcccgaggatgaggtgctgcgtggtggccatccgggcggtcagagcagcggcgctcatggcatgctctgactccaggacgagtgtcgcgacgcgcttgtggtcgcgagaagcagaaacagccgcctggatggtggcgatggccgtaaccagcgccgaggaagccggcagggaag

SEQ ID NO: 214094 - DNA, 1570 bp, Zea Mays
caaagtaaactgatcgaaggtgcacacttctgagttctgacacaacaccaaacgcaagacagcccgcgagtctcatcagtttcaccagccgcccatcaatactttggcaaagtttcctcttcctctcccgcagagcagggcgcagcaggcagccgcccagaaaatttcccctctccacccatgcaatgcaatccgccgcggcggccgcgccctcctcccttccgctcagcgtcttccccaaggattcccgcccgctcccgtgcctcctcctcacttccctgctgctgctcctgaccctccatttcctctcctcctcccccaccccctcgccgcctccaccgcagccccgcctcgcgccgctcccgtccacagcctccgcgggcccggccccgtcagcgctcgcgttcctcctcacgggatccgcgggcgacgcagaccgcctccagcggctgcttctcgccacctaccacccccgcaacgtctacctcctcctgctcgaccgcgccgcctccgcggccgaccgcgcgcggcttgctcgcagcgcgcgggctgcccccggccgcgacaacgtccatgtcgtcggggaccccgggttcgccaacccgcgcggtgcatccgccctcgccgccaccctgcacggggccgcgctgctgctgagggtcgaccagggatgggactggttcgtgcacctcgacgccgatgagtacccgctcgtgacccccgatgatctcctgcatgttttttcatacctacctaaggatctcaacttcattcagcacactagctatattggttggaaggaggaaagacaaataaggccaattatcgttgatcctggtctatatctctcatccaggaatgacattttctacgccacccaaaagcgtgatataccaaatgcttacaaattatttacaggctcttcgtctgttatcctttctcggaaatttattgaatattgtattgttggtatggataatctgccaagaactctgctgatgtactacactaacatgcccttgccacacaggaagtattttcagacagttctttgcaactccgctgaattcaacaagactgtagttaaccatgacctacactattcaacatgggatgctcgttccaaaaacgagccacgcctactgactatagatgatgtagaaaatatgaccgaaagtggtgcagcctttgggactagatttcccaaagatgatcatgcgcttgatcgcatcgatgaagaaattttgcaccgtcatcctggagagctagttacaggaggatggtgcataggtgttgggcatgatagtccatgcgacatttcagggaactgttatctctcgggttatgtgtttgcggtttgcctcatactgcggtgcatttcgttcgccatcatttgcatatgatgtctgtagttgattctcttgtgataacctaaaacagtacaagtggatcataagaaatgttctaccataagcagctgcggcagcattgcatttgctatcaaggattcaaggggagctgtggtacgcgagagatgaaaccacacgcgagaaagtgatgggaactgggg

SEQ ID NO: 214095 - DNA, 2379 bp, Zea Mays
agaccgtgcgacccgttaaaaataataacgcgtccgctcccctctcgagtcccttgccccacccaagtacccaactcgagcggtggagccttgcgtgtgtctaaaaatagcgcccgaatcgcggcggcagccacatcgagtaatttatcgagtcaggtgagagggcggagcagatctcgccggccggggccatgggtgctgccggcgcgatccggcgggcggcggcgtcggtggtcgacagggcgtgcgcggggacgcggggcttccgccgcgcgctggcgcggttcgcgccgcggccgtcggcgttcggccccgccgcagacgcggaggccgcggcggtgcgcgccgtgcggaacctccggaccttccggttccactacgccgtcctgcagtgggtgctgctgctggcgtccctggcgccgcggcaccgggcctccgtcgtcttcctcatggcggcgtccaagggcctcctcgtctacggcggcctcctcaaggcgttccccaactcggcgctgctccggaggctcctcgaccgccgcctcgtggccgccgtgttcgtcgcgctcgtgctcgccgacatcgtcgccgcgggcgccgtcgccaacctcctggccgcgctcgccgcgggcgtccccgtcatcgtcctccacgcgtccttccgcgtccgcgacgatctcgaggcgccctcgccggacgcggcggcggcggccgagaacggcaaggaggacgaggcgtcggcggtcgtcgagaagaaggaggacggcgacgtcgaggcggggcccacgcggcggtccatggcggcggcaccaagatcacccaaatgaggaatttactagtaatacgagctagtgaaaaccatacgtttttcgtaggtttttaatttaactactggccccgttgtcatggaacataggaacaattcgtggtcaaacctgtcttcctgcctgcttgttgattcatactttgagcctaggattttttttttggagaagttcaatcagtagaatgtagtggtagctgtgacagacattgaacgtggaattgaggattaatacttataggggactcagttgtgaagtcctctattcatacaccttgagtgtataatctaatctaacacacataaagcatgctccactgatcgattcggttaactgctacttgtttgaggcgcatccatttgatcatagtggcatatttgcttgatcatggtggcatagatcatagcatggatgaattctgtattcacaggctctaataccaggcatgaatgaatgctgtattcatccatgtaaatatttgcttgatttccctcaaaacctctaatatcaggcatggatgaattctgtattctcaggctcgcagcggtgttgatttcccagatcctgaaggtccgtggtggagaagagaggaggatgaggaagaactgcaccttcccccctcctgcgcgcgcgcccaactaaaaaacaagccaaccgacttggaaatgctcttcgcaccgacagctgccccaccacaagtccacaagcaaccacaaaagacaggtgtagccttccaactggcaagtgaacctgcagttcgcaaagaagacaactctagtcaacaattacgtgaaaatgtgaaaccttctgcattagaacctacatatatggaggagtcacaagccaagcgtgatgacgtggagagcaccttcatcatgatcaagcctgacggcgtccagaggggcctcattggtgagatcatcagccgttttgagaagaagggcttctacctcaaggccttgaagcttgtgaacgtggagaggtcgtttgctgagaagcactacgccgatctcgcctccaagcccttcttccagggcctcgtggactacatcatctctggccctgtggtggccatggtctgggagggcaagagcgtcgtcacaactggccgcaagatcattggcgccaccaaccccctggcttctgagcccggcaccatccgtggcgactttgctgtcgacattggcaggaatgtcattcatggaagtgacagcattgagagtgctaataaggagattgccctgtggttccccgagggccctgctgattggcagagcagccagcacccctggatctacgagaagtaaacatggaaagtttcacatcaaaccttgagagccagaggaagcatgtcaccatttgtgctttagcaatgttttcgaaaagattatgatctgtatcttggaaccttatttcaatggaccaaatttctttcttaaacgaacaacaaacttgttattccttatttacttcataattttgacaattggtgaatgtatcagtaatcggtgagagtgttgcttgcttgctattatagtttttactagcgttatatatg

SEQ ID NO: 214096 - DNA, 757 bp, Zea Mays
accaaaattccaaaaaaccaatgggctgaaagagaccctgaactatgcggcgcaatatttcgcgtagattcggtccagtatcagcccatctatggcggatgaaggaccgcgaatcggagaaaggccagaacagacgagagcaggaggacggagagcgccggcgaggaggcatggagccagacaaggccggggaggcagcgaaggagccgacggaaacggaggctggagactccgtggatccccgcgaactagtgtccagcgacgacgagatcgactactccgtcgagcctgatttctacgaccccgacctagatgacgtcgatgagcggtgggtgagcagacagaggaaaggccgcacatctgacgccgtgcttagctgccccgcctgtttcactaccctgtgcttggattgccagaggcatgagaagtacgtaaaccagtaccgtgcgatgttcgttcgcaactgcaagatcaagactgaccaggtcctgcgagagggcaagagcaagaggaagaaacgcagaggaggaagggctggtgatccagctgccgcatctgaaggcgaaagcaaggggcagtcctaccaccccgtctgctgcgaggtctgctcaaccgaggttggagtgttggacgaggacgaggtgtaccacttctttaacgtgatccctagcaactcctgaatgccgtgaactgttgctctgtaggagtgcatgatgcggttttgaaagggggtctccgcgagctctagctgtgatgg

SEQ ID NO: 214097 - DNA, 2967 bp, Zea Mays
cagtgaagcaacatctctttccttcttcccgcaacgactgctcgcgccgtctccggctctccgctcaccgtgaccgcgtcgccccgtacgcctccgccccgaggcccctcgtccggccacctccgctcgcgtacgccgttgtacactgggaggccctcgcccggccatctccgctcgcgtacgctgccgcccacggggccaccctgccccggccatctccgcccgccccggcctcggaggcgccgccctgcgctctctggcgctaatggcgccgccgcgtccacccacaggaccgatcctcttcctgcccctcgtcttcctcttcctctttaccaccgccgcggcgtctgcggcggcgcctgaggatgaaaagttcactgaggagctgctcctgcggccgctcccggaccgcaaggcactggcacacttccacttccgctcctctgcgccccccgctgcctccgttggtcggcaccaccacctcttccccaaggccatctcccagctggttaagaaatatcatattagcgagttggagctatctttcacccagggaagatggaactatgagcagtggggtggatttgatcctatgtcaactaataatgcaaagcctcctggtgttgagctgtgggcagtttttgatcttcctttgtctgagatcgatgcaacatggaagaacctgacacatacactctctggcctgttttgtgcatccatcaactttttggagtcctccactgcattttctgctcctcgctggggcttcaaactgaacgaaggcaatttgcgatatggtgcattgcctcgtgaagcagtatgcactgagaatctgacaccttggttgaaacttcttccatgtcgtgacaaagctgggatagcttctttgctgtacaggccttcaatttacaaaggatattaccattcacaaaaactgaaactgagatcctcccagtcacttggtattattcttgatcaaactctgactgttgtgctgcaaccaaataatgtacatggcgaacagctacattccaatcatggtcaacttcagcccaactggtccatgagacatcttttcaacagaaagttgtcagggaaatgccttgtttctaaatccagcagagtattcattgaggttgataaaggcattgctgacgaagttaacatatctggaagtgttcattcttggagtaatgaattctttgtattgtccaatagcccggacaagttgatcaaaggtcaaaatcacttagaaatgcaatcttcttttttatatgtttatgatgctagtaactacagtgaggaacaacctttggatttgggcataacttggaagcttcccctgatatggacttgcaccccatcaccttttcatgcaagcagatttcttatgggcagtggcaatgaaagagggtcaattgctctgtcgtttatgtccactaatcttcataagaagatatctggcagcgcaaatgattgttcaataaaggcagttattttccaggttgttccatggtatgttaaggtctattatcacagcctagaaatatttatagatgggagcaggaagactgtgtcagaagtagttgacaagattcatgtcattccttcagaagacaagcttttgcctggtaccttggagatgctactaagattcccttgcagtatgcagtcgggaactctgacattggattttgacaaggggttcctgcatatagatgaatatcctcctgatgctaatcaaggatttgacattccttcagctttggttagctttcctgagttcagttctgctcgaagttaccctgaaattgatccagtacttggatcacctttactagaaaatttccaggaagatagtgttgtgaagtcgtatacagaagtattgctcgttcccctgacaactccggatttcagcatgccatacaatgtcatcaccttcacatgcactgtcttagctctttactttggttcattattgaatgctttgagacgaaggattggcgaggaagagagggagttgaagaaaagagccacaaggcatgggctcatttctcggttgctagccaagttaagggggcagaaggtggatccatcggagtcagggtcttcatttgaatcgactgggtcaaagaagctgctattcaaggttgtatttgttgcagtagctgcggttctatttcactatttctcaaacaacagttaatacttaacatcggtgtctaaaattttgggtgacttttgtggagccacggcagtagaatgtaccatgttgtgtagcatatgtattgcctgtaagttcgcttgcttccaggcgctattttgccatcctagattcttgaaagccgagggccatgcaatttggacccttctgttgtcgtttttttttggtatggttcgtttcgttttctggccggatgtaatgtaatcccctgacggctgttccctgggcgaacagtgtcagtgtgatccgtttggcaatgtttttattcatgaacgccacgcactgaattctgtaatttcgttactactgtaatgaatttttggtttttaccggttttgaaaaaaaaagaaagcagaggttgatgtcccttgattgcaccaggttaaattttcttttgaggaacccactacattttttacgttgatctaaagctgactccaactagagcctgtaaagctgctctgttttgaggtaaaattcttgtcccaatctttttcgttagtgtactctaaatataaatagtccctatttattttagcttctagttagattctggccataagtggcagccaaacactttgcttctgatctgcttatgtgaaaatcatttatatggaaatcgtttaaatcaacgtgaatgcagaatccgttgagtcgtgtgatatgaggaattcgtcgctcctaaacctggaaatcgtttaaatcaatgtgaatgcagaatctgccaaatcgttcgatgagag

SEQ ID NO: 214098 - DNA, 883 bp, Zea Mays
cgccttgcgatcgctctcctgttcctctcatccacttgtctctcccctgcgtactcctaagagaagaagtagactacatcagatttctatagaaagttgcctgaaaagactaggatacctgaatgtggattgcttcagaattgtttggaagaattggctactaggtatccagcgacgaagtttgttaaaattatctccacagactgcatccccaactacccagataggaatgttcctacaatactggtgtataacaacagtgctgtcaaagggacttatgttggtttgcagaagtttggtggaaagagatgcacacctgaatctgttgcgttagccctttgccagtcagacccggtactgaatgatgggcatggtggcagcgattcatctcggggcaatgtcttcgaaggtgttcgcaggaagttcatagagaaggttgtggcccagcatgaagagcgggaagaagaggacagtgactaagctaatacttgtgtttgttttccgcagctggcggatccaatttggttccaatgtttactgatcttatgtgatttttgtgggtgaaatttgccagagttttctgatacctggctgtgcggctgaagtttttgaaagttcacgggtcttattgcctacctttcagctgtaacacagctccattattatattgttaagagatcagagatgattagtgcacttgtataattgcatgagaaaaaatccagccaaactttgaatccacagtatttcactatcttgaacatttctcaacacaaaacatcatgagtcatgactaatttgtgtatatgcatgtttatgattctttgtgaattagttaaaagtgcaatttgtgctggtgtatatatctataataaagtttgtg

SEQ ID NO: 214099 - DNA, 954 bp, Zea Mays
ccgcgtttgattgatctgacctgactagagtggctgattggaagatgaggctcgcagagctgagggaagccgcaaaagccgcgcgatttggtactatacttcccatcactggctccgacttcgtgcgggaggtatcgcaggcacaatcagatgtttgggttgtggtcttcctctacaaggatgggatacctgaatgtggattgcttcagaattgtttggaagaattggctactaggtatccagcgacgaagtttgttaaaattatctccacagactgcatccccaactacccagataggaatgttcctacaatactggtgtataacaacagtgctgtcaaagggacttatgttggtttgcagaagtttggtggaaagagatgcacacctgaatctgttgcgttagccctttgccagtcagacccggtactgaatgatgggcatggtggcagcgattcatctcggggcaatgtcttcgaaggtgttcgcaggaagttcatagagaaggttgtggcccagcatgaagagcgggaagaagaggacagtgactaagctaatacttgtgtttgttttccgcagctggcggatccaatttggttccaatgtttactgatcttatgtgatttttgtgggtgaaatttgccagagttttctgatacctggctgtgcggctgaagtttttgaaagttcacgggtcttattgcctacctttcagctgtaacacagctccattattatattgttaagagatcagagatgattagtgcacttgtataattgcatgagaaaaaatccagccaaactttgaatccacagtatttcactatcttgaacatttctcaacacaaaacatcatgagtcatgactaatttgtgtatatgcatgtttatgattctttgtgaattagttaaaagtgcaatttgtgctggtgtatatatctataataaagtttgtg

SEQ ID NO: 214100 - DNA, 1350 bp, Zea Mays
gataaatatattaatttaattaattttatctaaattataattattagaatgaaattcgatttcaacaaaacaaactgaccgtagtggttttataaacatcgtggaagggagtaatttgcttcgtccaaaaaaaaaaaatctccaactcgtcacttcgcttccccacttctccattccattgcggttctgcgagcccctacctccctgtggtgcttggccatggcggactaccacttcgtgtataaggacgtggagggggcgagcacagagtgggacgacatccagcgccgcctcgggaacttgcccccgaagccggagcccttcaagccgccgcccttcgccccgaaggttgacgccgacgagcagcccaagtccaaggaatggcttgacgtgcgcgagcccgaagagctcgaggaactagaggacgatctggatgacgaccgcttcctcgagaagtacaggaagatgaggctcgcagagctgagggaagccgcaaaagccgcgcgatttggtactatacttcccatcactggctccgacttcgtgcgggaggtatcgcaggcacaatcagatgtttgggttgtggtcttcctctacaaggatggaattgtttggaagaattggctactaggtatccagcgacgaagtttgttaaaattatctccacagactgcatccccaactacccagataggaatgttcctacaatactggtgtataacaacagtgctgtcaaagggacttatgttggtttgcagaagtttggtggaaagagatgcacacctgaatctgttgcgttagccctttgccagtcagacccggtactgaatgatgggcatggtggcagcgattcatctcggggcaatgtcttcgaaggtgttcgcaggaagttcatagagaaggttgtggcccagcatgaagagcgggaagaagaggacagtgactaagctaatacttgtgtttgttttccgcagctggcggatccaatttggttccaatgtttactgatcttatgtgatttttgtgggtgaaatttgccagagttttctgatacctggctgtgcggctgaagtttttgaaagttcacgggtcttattgcctacctttcagctgtaacacagctccattattatattgttaagagatcagagatgattagtgcacttgtataattgcatgagaaaaaatccagccaaactttgaatccacagtatttcactatcttgaacatttctcaacacaaaacatcatgagtcatgactaatttgtgtatatgcatgtttatgattctttgtgaattagttaaaagtgcaatttgtgctggtgtatatatctataataaagtttgtg

SEQ ID NO: 214101 - DNA, 3064 bp, Zea Mays
ttttaggccgtgagttgcatccgaaggaaaggaaactctgctcatcaacccgctgggtgccagtgtggtaccggtacccttccctcactctcccggttctttcccggcgctggattcagatccgcacgcttctccatttccgtaaagctccgtgcctcctcctcgtctcttcactccaaatccaccgaggccatcgcctgggccccggggaaacccctcgcgctcgtggccctgtgagcagccgcagccatggcgcagccgctcgtcgtgaagaaagacgacgatctcgacgaggaagagtactactcgccattcctgggcatagagaagggcgccgtgctgcaggaggcccgagtcttccatgaccctcagctcgacgcgcggcgatgctgccaggttatcaccaagctcctgtacctgctcaaccagggtgatacctttaccaaggttgaggctacagaggtcttctttgcaacgaccaagctgttccagtctaaagatgcgggccttaggaggatggtgtacctcatgatcaaggaactctcaccttcagccgatgaggtcatcatagtaacaagctctttgatgaaggacatgaatagcaaaactgatatgtaccgtgcaaatgctattagagttctttgtcgtattattgactcaacccttctcacccaaatcgagaggtatttgaagcaagccattgttgacaagaatcctgttgttgccagtgcggcccttgttagtggcatctacttgcttcaaacgagtccggaagttgtaaaaagatggagcaatgaagttcaagaggctgtgcagtcaagagctgctcttgtgcaatttcatgcccttgctcttcttcaccaaattagacaaaatgatcggttggctgtcagcaagcttgtcactagcttgaccaggggttcagttcgctctccgttggcccagtgcctacttattcgctacactagccaggtgattagagagtctggtgtgtaccaaggtggagatcgtcctttctttgatttccttgagtcctgtctccggaataaagcagaaatggtcatacttgaggctgcaagagcaattacagaactgaatggtgtcacaagccgagagcttacacctgcaattactgtgctgcagttgttcttaagttcatccaaacctgttctcagatttgcagctgttcgcacacttaacaaggttgcatcaactcatcctttggctgtcacaaattgtaacatagacatggagagcttaatctctgatcagaacaggagcgttgcaacccttgcaattacaacactgttgaagacaggcaatgagtcaagtgttgatcgtttaatgaaacagatgaccaactttatgtcagacatagctgatgagtttaagattgttgttgttgaagcaataagatccctgtgcttgaagttccctctgaaatatcgctcattgatgaacttcttgagtaatattctacgggaagagggaggattcgagtacaagaaagccatagttgattcaattattatactcattagagatattcctgatgcgaaggaaagcggtttatttcacttatgcgaattcatagaagactgtgaattcacctatttgtccactcagatacttcactttttgggaaatgaaggccccaaaacatcagatcccagtaaatacatacgctatatatacaatagggtgatacttgaaaatgctacagttcgagctagtgcagtcagcacattggcaaaatttggtgccttggttgactcactcaagcctcgcatatttgtgctcctgagacgctgcctgtttgatggagatgacgaggtgcgcgatagagcgaccctttacctcaaattgttaggtggggaagctacagtgggtgagacagagaaggatgtgaatgaatttctcttcggctcacttgatgttccattagtaaacttggagacgagtctgcggaattatgaaccttcggatgtaccttttgatatttcatctgtttcgaaggaaacaaaatcccaaccccttgcggagaaaaagtctacaggcaagaaatcagcagaattgactgaagctgagaccgaatactcagtgaatgttgtgaagcatatttttgatcgacatgttgtgctccaatacaactgtaccaatacaattcctgaacaattgcttgaacaggttattgttttggttgatgcttctgaggctgacgaatttttagaagttgcttcaaagcctttagaatcattaccatatgattctcctgggcagacctttgtggcttttgaaaatccagaaggtgtcattgccaccggcaagttctcaaatatcctgaaattctttgttaaggaggttgatccatccacgggtgaagctgaagatgatggtgtcgaggatgagtaccagcttgaagatcttgaaatcgtttctgctgattatatgttgaaggtgggagtatctaacttccgaaatgcctgggaaaacatggatccagagactgagcgagttgacgagtatgggcttggagtaagggagagtttggctgaggctgtaagtgctgttataagcatccttggcatgcagccttgtgagggaactgacgtggtcccaagcaattcaaggtcgcacacttgtctgctctctggtgtgtttattggcaacgtgaaagtcttggtgagactgtcatttggaattagtgcaccgaaggaggtggccatgaagctggcagttagatctgacgatccagagatcagtgacaggatccacgaaattgtcgctaatggctaaaaacaatggtagtatcttttttttactccttttcttttggctttcatgctacgggaagtttgaggggattcaattaattagagtatatgtaagtttggtttccagtcgaatctatcattcgttgcaccatcattcttccttgacacagtacaccagtttttggttgttttggatctgtacaattttccttatatactgaggacttaaaatagtatacgcaataatatgcaggtaaagttttgctggaaaaaatgagcatattgccccc

SEQ ID NO: 214102 - DNA, 1460 bp, Zea Mays
gtcttctccctctcccctagatccttcgacgccgccctccctcagctcattccctgccgccgctcatctgctggccttgtctcactgccgcccaaccattttcctccctcaagctagcacgcagcctcaactcctctcccacctcacgcacgtctctcccagccgttccttcatttctctggctcgtccttctccatggggtcgcgccctgctgcgccgtcgtgctggtcgccggctgagcccccttcagtgcctgacgccgcatctccctgccacctcccatggacgccagccctcagccatggatgccgaaccccctctctttagtgcctttctttacagcccctgcgtcgccgtgcgtgtaaggtgtttgtataaatgctcaagaggagtgccgtgtcatggccaactcttttggcgtcgtcggatgtttgatgttttgtgcatcccgtctacgacgccgtcgaccatcggtgaggattcgttcttgctttgtcatttcatcgatcgacgtctatttgctaatatgaattgtgtttatgtgcctatgtgtgttgaggagcgaaatccgtgaaatctaggtgaagaagagatggagcacgtcgtcgtcatggttgcagctttgcttttgtcgtcgtggagcctccaccagcgccgtgtagcattcaggaacaatggaaccaaaatacaggacattttcctacttcacgtctggatgccatccaattaatatcttctctacgatattgcaatggaagggactgctcttatgtgttattggtgctattccgcttgtacggccaacgaaataggtcctactacacaagggaaatagaggataccatactcttagcttcacagaagcctgaagtgtatgatgacattgctcgcgatacgtgctgcaaatttgggatagatagacctcaagttgtacctgtgcaaggactacctcaggtttgaaccatacttatggaatgcatgtaagaggtttgtgttggagcaccgggctggcgagaaccgtgctccaatcatttcagatgatagccccaacaaagatatcaacaatgccttctataatatcgtgatgatgaaaaagtcaaaggtcagttttgtggaaaacatacaatatgttggtatcttcaatagtataagatcatgtaccacacgtcgacatcaatattgactaatttctttcaataggatgggagaatgttgaatgcttcttcagatactatttcttggaaaagatgaaatggaactcaaattttagtggtcgcacaagtgtggagccagttgatgaccaagtttttcaattagtattttagtttgaatttagagtacacatatgtatgagttatttgacaatgcttgtttatgagagattgaatgatacctatctatattatattaattataatgttattaaataaatgtgtgtatgtatatttctctttcaaatt

SEQ ID NO: 214103 - DNA, 1406 bp, Zea Mays
gtcttctccctctcccctagatccttcgacgccgccctccctcagctcattccctgccgccgctcatctgctggccttgtctcactgccgcccaaccattttcctccctcaagctagcacgcagcctcaactcctctcccacctcacgcacgtctctcccagccgttccttcatttctctggctcgtccttctccatggggtcgcgccctgctgcgccgtcgtgctggtcgccggctgagcccccttcagtgcctgacgccgcatctccctgccacctcccatggacgccagccctcagccatggatgccgaaccccctctctttagtgcctttctttacagcccctgcgtcgccgtgcgtgtaaggtgtttgtataaatgctcaagaggagtgccgtgtcatggccaactcttttggcgtcgtcggatgtttgatgttttgtgcatcccgtctacgacgccgtcgaccatcggtgaggattcgttcttgctttgtcatttcatcgatcgacgtctatttgctaatatgaattgtgtttatgtgcctatgtgtgttgaggagcgaaatccgtgaaatctaggtgaagaagagatggagcacgtcgtcgtcatggttgcagctttgcttttgtcgtcgtggagcctccaccagcgccgtgtagcaggactgctcttatgtgttattggtgctattccgcttgtacggccaacgaaataggtcctactacacaagggaaatagaggataccatactcttagcttcacagaagcctgaagtgtatgatgacattgctcgcgatacgtgctgcaaatttgggatagatagacctcaagttgtacctgtgcaaggactacctcaggtcaaaggtcagttttgtggaaaacatacaatatgatgggagaatgttgaatgcttcttcagatactatttcttggtctgtcaaatctgcttgacccaaatgcaagttttgttcaaatgtggcaaaaaatgattgtctcaccaattgtcagcacgttttcttccagcacgtttgcttccagcaaagttgtcagttcttatgattagatgaaaaatctagaattattctatcatttacacatccatatgacctttgtgatatgtgatgatgtgaggtattcaaccgtgtctaactactaattattgccttcttctatttgttgtataggaaaagatgaaatggaactcaaattttagtggtcgcacaagtgtggagccagttgatgaccaagtttttcaattagtattttagtttgaatttagagtacacatatgtatgagttatttgacaatgcttgtttatgagagattgaatgatacctatctatattatattaattataatgttattaaataaatgtgtgtatgtatatttctctttcaaatt

SEQ ID NO: 214104 - DNA, 2753 bp, Zea Mays
gtcttctccctctcccctagatccttcgacgccgccctccctcagctcattccctgccgccgctcatctgctggccttgtctcactgccgcccaaccattttcctccctcaagctagcacgcagcctcaactcctctcccacctcacgcacgtctctcccagccgttccttcatttctctggctcgtccttctccatggggtcgcgccctgctgcgccgtcgtgctggtcgccggctgagcccccttcagtgcctgacgccgcatctccctgccacctcccatggacgccagccctcagccatggatgccgaaccccctctctttagtgcctttctttacagcccctgcgtcgccgtgcgtgtaaggtgtttgtataaatgctcaagaggagtgccgtgtcatggccaactcttttggcgtcgtcggatgtttgatgttttgtgcatcccgtctacgacgccgtcgaccatcggtgaggattcgttcttgctttgtcatttcatcgatcgacgtctatttgctaatatgaattgtgtttatgtgcctatgtgtgttgaggagcgaaatccgtgaaatctaggtgaagaagagatggagcacgtcgtcgtcatggttgcagctttgcttttgtcgtcgtggagcctccaccagcgccgtgtagcattcaggaacaatggaaccaaaatacaggacattttcctacttcacgtctggatgccatccaattaatatcttctctacgatattgcaatggaaggtgtagatagatgcaagtatacattcaatgttcttatgatagaggaaaggcatagctgcagatgggtttgatgttttatcttttcattcatgcatttcatcccatgcgcataaacaatttccaagtagcttgtgtatccaaacttggttcttttgttcactcagccaggttgtactgtctcattcagaattcggatttttcagccattaacccgcattttctattggatcgttttagattcatttgttttatctattagaccgtactctatattgtttcatttgaggacatttcaaatggttgttgtaggtatgtgatagatgactagaagaaaattataaaaggatgttgaataagattgtgcttattttctcgtgacgaaggttttttctatgcttagggactgctcttatgtgttattggtgctattccgcttgtacggccaacgaaataggtcctactacacaagggaaatagaggataccatactcttagcttcacagaagcctgaagtgtatgatgacattgctcgcgatacgtgctgcaaatttgggatagatagacctcaagttgtacctgtgcaaggactacctcaggtttgaaccatacttatggaatgcatgtaagaggtttgtgttggagcaccgggctggcgagaaccgtgctccaatcatttcagatgatagccccaacaaagatatcaacaatgccttctataatatcgtgatgatgaaaaagtagatactactaccccaatatatcttatatttctcttctttatttccttttcagttttagtagaagaaaatgttgttggcttgtgatttagcatggttcttggattctacaaagtgattgtcttcaccaatcctttgataaattctatgagaatgcttaattgcaagatatgcaatgatgtaattcttgctccagtcctaatgaaccagttgttcacaataggctaaaccatcagaaagttaactactaactacaatcaaactattttttacgaagcagttattattttgttacaactttcaatacagaagacaaaacacatgaaatttgataaatgtaatcctcacatttgaaccatagtattgcagtgccacaagaatagtttcattttatctgcaaagtcattccttatagttgtcaatgaactatcatgcgaagatagaataagaactttgtgattgcttgtttatttatgagattgaataagagggttactacaaaatatttgtcatatcttttcaatttcctttcttgtgtaatcatggcctagatgtttagattactgattagcagtttttctatgtattattttgagtttgtagacaacagacattgagtgtcttttgatattaattttcaggtcaaaggtcagttttgtggaaaacatacaatatgttggtatcttcaatagtataagatcatgtaccacacgtcgacatcaatattgactaatttctttcaataggatgggagaatgttgaatgcttcttcagatactatttcttggtctgtcaaatctgcttgacccaaatgcaagttttgttcaaatgtggcaaaaaatgattgtctcaccaattgtcagcacgttttcttccagcacgtttgcttccagcaaagttgtcagttcttatgattagatgaaaaatctagaattattctatcatttacacatccatatgacctttgtgatatgtgatgatgtgaggtattcaaccgtgtctaactactaattattgccttcttctatttgttgtataggaaaagatgaaatggaactcaaattttagtggtcgcacaagtgtggagccagttgatgaccaagtttttcaattagtattttagtttgaatttagagtacacatatgtatgagttatttgacaatgcttgtttatgagagattgaatgatacctatctatattatattaattataatgttattaaataaatgtgtgtatgtatatttctctttcaaatt

SEQ ID NO: 214105 - DNA, 1376 bp, Zea Mays
gtcttctccctctcccctagatccttcgacgccgccctccctcagctcattccctgccgccgctcatctgctggccttgtctcactgccgcccaaccattttcctccctcaagctagcacgcagcctcaactcctctcccacctcacgcacgtctctcccagccgttccttcatttctctggctcgtccttctccatggggtcgcgccctgctgcgccgtcgtgctggtcgccggctgagcccccttcagtgcctgacgccgcatctccctgccacctcccatggacgccagccctcagccatggatgccgaaccccctctctttagtgcctttctttacagcccctgcgtcgccgtgcgtgtaaggtgtttgtataaatgctcaagaggagtgccgtgtcatggccaactcttttggcgtcgtcggatgtttgatgttttgtgcatcccgtctacgacgccgtcgaccatcggtgaggattcgttcttgctttgtcatttcatcgatcgacgtctatttgctaatatgaattgtgtttatgtgcctatgtgtgttgaggagcgaaatccgtgaaatctaggtgaagaagagatggagcacgtcgtcgtcatggttgcagctttgcttttgtcgtcgtggagcctccaccagcgccgtgtagcattcaggaacaatggaaccaaaatacaggacattttcctacttcacgtctggatgccatccaattaatatcttctctacgatattgcaatggaagggactgctcttatgtgttattggtgctattccgcttgtacggccaacgaaataggtcctactacacaagggaaatagaggataccatactcttagcttcacagaagcctgaagtgtatgatgacattgctcgcgatacgtgctgcaaatttgggatagatagacctcaagttgtacctgtgcaaggactacctcaggtttgaaccatacttatggaatgcatgtaagaggtttgtgttggagcaccgggctggcgagaaccgtgctccaatcatttcagatgatagccccaacaaagatatcaacaatgccttctataatatcgtgatgatgaaaaagtcaaaggtcagttttgtggaaaacatacaatatgttggtatcttcaatagtataagatcatgaaaagatgaaatggaactcaaattttagtggtcgcacaagtgtggagccagttgatgaccaagtttttcaattagtattttagtttgaatttagagtacacatatgtatgagttatttgacaatgcttgtttatgagagattgaatgatacctatctatattatattaattataatgttattaaataaatgtgtgtatgtatatttctctttcaaatt

SEQ ID NO: 214106 - DNA, 1329 bp, Zea Mays
tccttatccccacacgtcttctccctctcccctagatccttcgacgccgccctccctcagctcattccctgccgccgctcatctgctggccttgtctcactgccgcccaaccattttcctccctcaagctagcacgcagcctcaactcctctcccacctcacgcacgtctctcccagccgttccttcatttctctggctcgtccttctccatggggtcgcgccctgctgcgccgtcgtgctggtcgccggctgagcccccttcagtgcctgacgccgcatctccctgccacctcccatggacgccagccctcagccatggatgccgaaccccctctctttagtgcctttctttacagcccctgcgtcgccgtgcgtgtaaggtgtttgtataaatgctcaagaggagtgccgtgtcatggccaactcttttggcgtcgtcggatgtttgatgttttgtgcatcccgtctacgacgccgtcgaccatcggtgaggattcgttcttgctttgtcatttcatcgatcgacgtctatttgctaatatgaattgtgtttatgtgcctatgtgtgttgaggagcgaaatccgtgaaatctaggtgaagaagagatggagcacgtcgtcgtcatggttgcagctttgcttttgtcgtcgtggagcctccaccagcgccgtgtagcattcaggaacaatggaaccaaaatacaggacattttcctacttcacgtctggatgccatccaattaatatcttctctacgatattgcaatggaagggactgctcttatgtgttattggtgctattccgcttgtacggccaacgaaataggtcctactacacaagggaaatagaggataccatactcttagcttcacagaagcctgaagtgtatgatgacattgctcgcgatacgtgctgcaaatttgggatagatagacctcaagttgtacctgtgcaaggactacctcaggtttgaaccatacttatggaatgcatgtaagaggtttgtgttggagcaccgggctggcgagaaccgtgctccaatcatttcagatgatagccccaacaaagatatcaacaatgccttctataatatcgtgatgatgaaaaagaaaagatgaaatggaactcaaattttagtggtcgcacaagtgtggagccagttgatgaccaagtttttcaattagtattttagtttgaatttagagtacacatatgtatgagttatttgacaatgcttgtttatgagagattgaatgatacctatctatattatattaattataatgttattaaataaatgtgtgtatgtatatttctctttcaaatt

SEQ ID NO: 214107 - DNA, 2308 bp, Zea Mays
agaaaaaaaaaataacgagtcgatgactccccccataatttcctttttctcgtccccgtcgaatccgcatcgtggagcaaatccaccggaatccggactggattggattgcggcatccattccattcgcattcgcattcgcgttatgcattccaatcgcggccgccgtcgctatcctcgtagcactcggccgtgctttgctcggcccacccaaccccgtccctatcgccccccatcgtctccctcaccaccagtcaccaccgccagctccccgcctctgcctcctccaggcgaccaggcccccagctttggcgtcgacggacagatacagcggcgccatttccaaagagagacacagatcgcgctgcccaaggaaaagaagccgcgccttctcccctctcccttctttcttcccttttattgacgggatcgtccgccggttccattccaacactaattcctcacgggggttccatttggattcggcctggatccgcgagatcaagaaaaacgcctgcaattaaactgccaagattaacaagaaaaatataaccaaccttgattggctgcaataatctttcttcaaaaaaaaggagagagccttcggcggcggccgatcttggctcggatggcagcgccgccgcagccgctggcgtcgctggactactggcggtgcttcttcagcggcgcgcgggctagcatctttgacgccatcgacgccgccatccgagtagccgccgccgaccaccccgacgccctccgcgcgcgccgcgacgccatcgccgagcgcctctacaccgcgattgtcgcgcttcctgcaacacaggaggcgccggggcagtccaccccgggccagccggcgctcctccttcccgagggcgccgccagcgtgcccagcctctgcagctcggaccgcgccgaggtcgtcaacaacgacggcggcggcgcgccgctgaccaacagcgatgacgacgtggtcgccgaggcgttccgtatcaaggcggctctctccaatgcccaagacaagtcggaggccgagttgctagagcttctggggaggctggggcagctggaattcacggtggacgccatcagggctactgggattggaatggacgtgagaccgttgcgaaagcatggctcgaaacagattcggcaactcgtccgatcgctcattgaaggttggacggctactgttaacgagtggatgaacaatggagatcccgttgtagatcatacaccacaatcagtggatgcttcttgcctggatgaggaagaagggggtctgccatcccctcccatggatgaggcagccttgtttgcagcaccatgtacctcaatcgagctatccgagttcttcgatgaaatggatgacgacggaaatattagggccgacgtcaaggacggcgggcagcgtaatccggcaagccaggagtcggtcagcaagcagtcacctacggtccagcagtatgacccagagcagaactggaagctagaccagtctgccacgaagcaactgcgaccaaacgaggcattcggctggcagacaacgcagcggtcgaattcgggggcgcaagcgaaggcgtcgagtgcggcttttggtccagggagacctcaggcgtcgcagatggggaggccgagatgctcggaggtgaagccagagcagcagcagcagcagcagcgagacgtctcggtggctcaaagaagaccgaaaccgacagtgcctaagccgccgccaactgagcatgatgaatatccagtccgcgcgaagcaacagcaacagcttgcaaaggatggcaagctggaggctacgaagcgtaagctacaggagggttaccaagaattcaacaacgcgaagaagcagcggacgatccagatggtggatccacaggacctgccgaagcaagggagccggaacctggcgctgagcggcaagccgaggaacagcagcaacatcaggaaccggctggccgtccgccgctgacgctgatcccgtccaccccatccatgcttttcactagttctggagacccgccctgcttgtatactataacctggatatatggatcagtctagcgtttctttcttttggggtccagcaccatatacacatatacttgtagcccccctctaacgtctttgtcttgggtcatacttatagagatatattaacggtgcattacatggatgtagatttatagtatatcggtgttccgaggccttgtgtgcctcttagctttggtctgtcatgcaattatgcaaatgcagatgtgtgtggtctgtgcttgcacttgcagtgaaaaaaggac

SEQ ID NO: 214108 - DNA, 594 bp, Zea Mays
gctcggtattctgcgtcagcggtggaacgggataccacagcttgtagcgacgaagaggatcacccaactgcccgctaaggagcaacttcaggtgcctgataattcatcagatcacgaaaaccagataacttgtgggcataatgaattgcagtcaaatagttcaaatagtttcggtcagctttgtacatatggttttctattcatccttatgccgcccatagatgtcattgataaacggaaaaaggatccttattttttttgttggaaacccgttgtgtaggtattttgggcgtgtaatcagttcgtatctgtattcaggataatctgtgcggttgctgtttctcaccgacacaaaggcgtttggtccaggtgatgcttgcagcgcatgaatgccgagtctcttgctccctcggtttacaaaaacttgttttagacaggattttgagttaacttttaaaacttcgataacaaataacttttagggcttatttgggagaaagaaatttgagggaattaagggttgctttgggagcaagaagatttttgccacttcaatccttttttaaataggattttaaataggatggatatttt

SEQ ID NO: 214109 - DNA, 3269 bp, Zea Mays
aagaaacttgatcctatggaattcttttccgggcacacatctcttcatgcagaagatcaggagaagaattgctctacaacctcaggagtttcaaatgatgttgatctggctctgtcaattgcagatgttgaagcagctattagacaagcagaagatgaagctgactatatggctctcaagaagctggaggaggaagaagccgtggacaatcaagaattcagtgaggaggctgcgggcagacaagaggaggatgaattggttaatgaggagaatggaaaacccgatgagcacattaacgaagaacaaaaatataactcttctgatgtagagaaggagaagcacattactctgtctaccaatcgattaaataaggaaaaggctcttacattggctgttggtgatgaagatactgacatgcttgctgatgtgaaacagatggcagctgcagcagctgcagcaggacaagcgagttcatcatttgagaaccagctccggccaattgatagatatgcaatgcgctttatggaactctgggatccagtaattgacaaagctgctttaaatcatcaagtaaatgttgaggaggaagaatgggagcttgatcgtattgaaaaattcaaagaggatttagaagcagaaattgatgaggaccaagaaccactttcttatgaatcatgggatgttgattttgctacgacagcctatcggcaacatgttgaggctttaactcaaaagcagaagaacaggaaaggcaagctcaggaagcaacaaaagagttggaggagaagaatgataatatgagtcaccacagaaagtcaaaaaagaacaaaaagaagacaggcaaactcaagcccctgaaaagagtgcgtctgtcgcctgaatcagaagtcatactggaggaaacctctgtagataatgcaccctcacctgagcttacaagtgatgaatcgccacaccattattgtaacaagcgtaagaagattacggttgccactgaggaaaatagtaacagcagaagtttaaagaagctcaagaaaactactaaatcaagttttatttctgaagccttgtcacctaggctgaaggaggaccttaatgattcagattcaaaatcagtgggtagaactaaaagtgatggcagatttttcatcccttgcatgccagtgaaacgtgttattgtaataaagcctgagagattgaaaaggaagggaatatggtctcgagattgtgcttcagactcatggtcatctgaggaagatgcagttctttgtggaactgttcatgagtatggtccactttgggaattggcaagtgattttcttcattttttgccaggcggttccttgtataggggaagatatcatcatcctgtgcattgctgtgagagatacagagaactgttctgcaaacatggaatgtcagcaacagataattctaacagtgaaaaggttccttctgggactggaaaggctatacttagagtgtctgaggatcaagctcagatgttggtgaatgtgaccagtgaacttcctaacaatgaattgcttctccagaaacacttcatggctgtaatttcgtctgtttggagatcaaaatgtcaccgtgatacctcctgttttacgaacacttactctagtgcattacatgtgttttctcctgtgaagaaacctggtggatcatgtgagaactggcccatggtaaactttagaccaagcttcaatctagttaggaaagcccttgcagatgttcaggctaagtctacactaatggtgattccacctccgtcaaggaatcaggaatacccatgcaattatttagaattagagttagatttcttgaaagatcaacatgcttatgatgaagacatcccatctgtagtaaatgtgtccatacaggaaccagaaccatccaaacagacgccagagccagtggaacaatcgttgttgtctgcactttcttgtagacaggctgagaaccggctcaggatagcatcagaagcttgttatgatggtgaaagttctcattgggcatcatcagcttttcacataaatgatgctgcccgccacaaatctggttcaaagtctataggaaagcacaaagccgcattggaatctggtagacttctcaaatccaaagttcagaagattactgaatcgcatcaggaaggggcaattgctatgagtagttttctccgtatgcctgctcaactattgccaagtacagctgacttccacattagtgactccctatctgactttggtatcagagattctgaattctatttttccgaggatctcttgcaagaggttgacgcccttgagttcttcccagatcagggtgactctggtctccttcctggtattgaagagttagaatctctttcggatttcacagatatcggatgaacatagatgagcaaattattgttgatgggatgccctcctataccaagaggagacaagattgcctctggcaggagcccaaggatacaggttgaattgctcagccgtgcacagatgtgttgcaagcagcaagctatcatcatggctggctggagcaaagcactggcttggtgaggtcacattgatctgacaagctcggaggatgggtttgcactaatggcggcatttgggtaatttccatacatgtatgtatattggtagtctagaatcgtaggatgtagaaatgcctccctcatttgtgtttgagggtaggaccttgtaactcgaccacatggaaattttgttgagcaggtaccaacatagaagggaaaagaagaggccctcagcatcacccatttgtcgctgtatctcttgttatgttcattctctgtttaatccaatgctgtttggctatcttgccattgaaaacatctcagatgtcaagttggtggtgtacatatctatcagaagtttaggatgcggcgtcaatatagctgccaaagaatgatcagtcaagtgcaacttatgggcacattatatatttggtcaggactcaacgcatggtatcaatattggcagaaatggtgttccagatgcacttgaggactgcaatttctggtttgattgagacaccggagacaggtttttcataggaggtaaagagcgtggtcatagttgtacatgtaataaaattatgtagggtagtaatctccatcctgtacttttgggcttatggttctttggactctcggtctcggttatgcacttgtagaacagcgggctgctgctgtgagcctgtaacaatgctattgattgttccccaccata

SEQ ID NO: 214110 - DNA, 5012 bp, Zea Mays
tattgtcgtgccgactagtgttatgctaaattgggagactgaatttcttaagtggtgtcctgcttttaaaatactgacttatttcggaagcgcaaaggagagaaagcagaagcgtcagggctggatgaaaccaaatttcttccatgtttgcatcacaacatataggcttgtcatacaggactctaaagtgtttaagagaaagaagtggaagtatcttattcttgatgaggctcatctgataaagaactggaaatcacaacgttggcagactttgctcaactttaattcaaagagacgtattcttctgactggaactccactgcaaaatgaccttatggaactttggtccctcatgcattttctgatgcctcatgtgtttcagtctcatcaagagttcaaggattggttctgcaatccaatttctgggatggtggaaggtcaagataaagtaaacaaagaaattatagatcggttgcacaatgtccttcgtccatttatactgcgtcgactgaaaagagatgttgagaaacagttaccaaagaagcaagagcatgtcatatattgccgactttctagaaggcaaagaaacttgtatgaagattttattgctagctcagagactcaagcaacactggcaagtgggaattattttggcatgataagcatcattatgcaacttagaaaggtctgtaaccatccagatctttttgaaggtcggccaataataagctcatttgacatggctgggattaacatgcagctcagctattcagtctgcatgctccttgataagagtccattttctcaggtgggactgtctgatatgaatttagtgtttacgcaaaatgaatttagcatgagttcctgggaagctgatgaggtcatttctgcctttcctttgagtaccacttcctggaaccatgaccttgatactttttgctctaataaggatcgtcagggaagtaatttgacaaacatttttgaagatattcagaaagcactacaggaggagagaataaaggaatccagagaaagggcagcttccattgcatggtggaatagagttagatgccaaaagaggcctgtctatggcacaaacatgatacatgttttgactgtaaagcatcatgtatcaaatattcttgataagaggaacaaccctttgtgccacatggactattcatcaagccttgcagatcttgttcttccatctgtggaacgctttcagaaaatgcttgatattgttgaatcatttacattcgcaattcctgctgctcgagctcctccccctgtttgctggtacagcaaaggaaactctcctgtttttattgatccagcatatagagaaaaatgcatgaacgagttttctcccatcctgtctcctataaggaacttgctattctgttaaggcgcttgaagtcagaagggcacagggccttgatatttactcagatgactaagatgcttgatgtcttggaagagttcataaatctatatggatatacatatttacgtttagatggttctactcccccagaagagaggcagactctgatgcagaggttcaacacaaatccaaagttcttccttttcattttgtccactcgaagtggtggtgtgggaatcaaccttgtaggtgcagacactgtcatcttctatgacagtgactggaaccctgcaatggaccaacaagcacaggacagatgccacaggattggtcagactcgtgaagttcacatatatagactcattagtgaaagcactatagaggagaacattctcaagaaagcaaatcagaaacgagctcttgatgatttagtgatacaacgaggtagctacaatacggaattcttcaagaaacttgatcctatggaattcttttccgggcacacatctcttcatgcagaagatcaggagaagaattgctctacaacctcaggagtttcaaatgatgttgatctggctctgtcaattgcagatgttgaagcagctattagacaagcagaagatgaagctgactatatggctctcaagaagctggaggaggaagaagccgtggacaatcaagaattcagtgaggaggctgcgggcagacaagaggaggatgaattggttaatgaggagaatggaaaacccgatgagcacattaacgaagaacaaaaatataactcttctgatgtagagaaggagaagcacattactctgtctaccaatcgattaaataaggaaaaggctcttacattggctgttggtgatgaagatactgacatgcttgctgatgtgaaacagatggcagctgcagcagctgcagcaggacaagcgagttcatcatttgagaaccagctccggccaattgatagatatgcaatgcgctttatggaactctgggatccagtaattgacaaagctgctttaaatcatcaagtaaatgttgaggaggaagaatgggagcttgatcgtattgaaaaattcaaagaggatttagaagcagaaattgatgaggaccaagaaccactttcttatgaatcatgggatgttgattttgctacgacagcctatcggcaacatgttgaggctttaactcaaaagcagttgttagaagaacaggaaaggcaagctcaggaagcaacaaaagagttggaggagaagaatgataatatgagcagtcaccacagaaagtcaaaaaagaacaaaaagaagacaggcaaactcaagcccctgaaaagagtgcgtctgtcgcctgaatcagaagtcatactggaggaaacctctgtagataatgcaccctcacctgagcttacaagtgatgaatcgccacaccattattgtaacaagcgtaagaagattacggttgccactgaggaaaatagtaacagcagaagtttaaagaagctcaagaaaactactaaatcaagttttatttctgaagccttgtcacctaggctgaaggaggaccttaatgattcagattcaaaatcagtgggtagaactaaaagtgatggcagatttttcatcccttgcatgccagtgaaacgtgttattgtaataaagcctgagagattgaaaaggaagggaatatggtctcgagattgtgcttcagactcatggtcatctgaggaagatgcagttctttgtggaactgttcatgagtatggtccactttgggaattggcaagtgattttcttcattttttgccaggcggttccttgtataggggaagatatcatcatcctgtgcattgctgtgagagatacagagaactgttctgcaaacatggaatgtcagcaacagataattctaacagtgaaaaggttccttctgggactggaaaggctatacttagagtgtctgaggatcaagctcagatgttggtgaatgtgaccagtgaacttcctaacaatgaattgcttctccagaaacacttcatggctgtaatttcgtctgtttggagatcaaaatgtcaccgtgatacctcctgttttacgaacacttactctagtgcattacatgtgttttctcctgtgaagaaacctggtggatcatgtgagaactggcccatggtaaactttagaccaagcttcaatctagttaggaaagcccttgcagatgttcaggctaagtctacactaatggtgattccacctccgtcaaggaatcaggaatacccatgcaattatttagaattagagttagatttcttgaaagatcaacatgcttatgatgaagacatcccatctgtagtaaatgtgtccatacaggaaccagaaccatccaaacagacgccagagccagtggaacaatcgttgttgtctgcactttcttgtagacaggctgagaaccggctcaggatagcatcagaagcttgttatgatggtgaaagttctcattgggcatcatcagcttttcacataaatgatgctgcccgccacaaatctggttcaaagtctataggaaagcacaaagccgcattggaatctggtagacttctcaaatccaaagttcagaagattactgaatcgcatcaggaaggggcaattgctatgagtagttttctccgtatgcctgctcaactattgccaagtacagctgacttccacattagtgactccctatctgactttggtatcagagattctgaattctatttttccgaggatctcttgcaagaggttgacgcccttgagttcttcccagatcagggtgactctggtctccttcctggtattgaagagttagaatctctttcggatttcacagatatcggatgaacatagatgagcaaattattgttgatgggatgccctcctataccaagaggagacaagattgcctctggcaggagcccaaggatacaggttgaattgctcagccgtgcacagatgtgttgcaagcagcaagctatcatcatggctggctggagcaaagcactggcttggtgaggtcacattgatctgacaagctcggaggatgggtttgcactaatggcggcatttgggtaccaacatagaagggaaaagaagaggccctcagcatcacccatttgtcgctgtatctcttgttatgttcattctctgtttaatccaatgctgtttggctatcttgccattgaaaacatctcagatgtcaagttggtggtgtacatatctatcagaagtttaggatgcggcgtcaatatagctgccaaagaatgatcagtcaagtgcaacttatgggcacattatatatttggtcaggactcaacgcatggtatcaatattggcagaaatggtgttccagatgcacttgaggactgcaatttctggtttgattgagacaccggagacaggtttttcataggaggtaaagagcgtggtcatagttgtacatgtaataaaattatgtagggtagtaatctccatcctgtacttttgggcttatggttctttggactctcggtctcggttatgcacttgtagaacagcgggctgctgctgtgagcctgtaacaatgctattgattgttccccaccata

SEQ ID NO: 214111 - DNA, 1584 bp, Zea Mays
gatacaacgaggtagctacaatacggaattcttcaagaaacttgatcctatggaattcttttccgggcacacatctcttcatgcagaagatcaggagaagaattgctctacaacctcaggagtttcaaatgatgttgatctggctctgtcaattgcagatgttgaagcagctattagacaagcagaagatgaagctgactatatggctctcaagaagctggaggaggaagaagccgtggacaatcaagaattcagtgaggaggctgcgggcagacaagaggaggatgaattggttaatgaggagaatggaaaacccgatgagcacattaacgaagaacaaaaatataactcttctgatgtagagaaggagaagcacattactctgtctaccaatcgattaaataaggaaaaggctcttacattggctgttggtgatgaagatactgacatgcttgctgatgtgaaacagatggcagctgcagcagctgcagcaggacaagcgagttcatcatttgagaaccagctccggccaattgatagatatgcaatgcgctttatggaactctgggatccagtaattgacaaagctgctttaaatcatcaagtaaatgttgaggaggaagaatgggagcttgatcgtattgaaaaattcaaagaggatttagaagcagaaattgatgaggaccaagaaccactttcttatgaatcatgggatgttgattttgctacgacagcctatcggcaacatgttgaggctttaactcaaaagcagttgttagaagaacaggaaaggcaagctcaggaagcaacaaaagagttggaggagaagaatgataatatgagtcaccacagaaagtcaaaaaagaacaaaaagaagacaggcaaactcaagcccctgaaaagagtgcgtctgtcgcctgaatcagaagtcatactggaggaaacctctgtagataatgcaccctcacctgagcttacaagtgatgaatcgccacaccattattgtaacaagcgtaagaagattacggttgccactgaggaaaatagtaacagcagaagtttaaagaagctcaagaaaactactaaatcaagttttatttctgaagccttgtcacctaggctgaaggaggaccttaatgattcagattcaaaatcagtgggtagaactaaaagtgatggcagatttttcatcccttgcatgccagtgaaacgtgttattgtaataaagcctgagagattgaaaaggaagggaatatggtctcgagattgtgcttcagactcatggtcatctgaggaagatgcagttctttgtggaactgttcatgagtatggtccactttgggaattggcaagtgattttcttcattttttgccaggcggttccttgtataggggaagatatcatcatcctgtgcattgctgtgagagatacagagaactgttctgcaaacatggaatgtcagcaacagataattctaacagtgaaaaggttccttctgggactggaaaggctatacttagagtgtctgaggcagtgcatgttttgcttgttggcgtctacattgacgactaggttatcgtcgg

SEQ ID NO: 214112 - DNA, 1583 bp, Zea Mays
cttgatgatttagtgatacaacgaggtagctacaatacggaattcttcaagaaacttgatcctatggaattcttttccgggcacacatctcttcatgcagaagatcaggagaagaattgctctacaacctcaggagtttcaaatgatgttgatctggctctgtcaattgcagatgttgaagcagctattagacaagcagaagatgaagctgactatatggctctcaagaagctggaggaggaagaagccgtggacaatcaagaattcagtgaggaggctgcgggcagacaagaggaggatgaattggttaatgaggagaatggaaaacccgatgagcacattaacgaagaacaaaaatataactcttctgatgtagagaaggagaagcacattactctgtctaccaatcgattaaataaggaaaaggctcttacattggctgttggtgatgaagatactgacatgcttgctgatgtgaaacagatggcagctgcagcagctgcagcaggacaagcgagttcatcatttgagaaccagctccggccaattgatagatatgcaatgcgctttatggaactctgggatccagtaattgacaaagctgctttaaatcatcaagtaaatgttgaggaggaagaatgggagcttgatcgtattgaaaaattcaaagaggatttagaagcagaaattgatgaggaccaagaaccactttcttatgaatcatgggatgttgattttgctacgacagcctatcggcaacatgttgaggctttaactcaaaagcagttgttagaagaacaggaaaggcaagctcaggaagcaacaaaagagttggaggagaagaatgataatatgagtcaccacagaaagtcaaaaaagaacaaaaagaagacaggcaaactcaagcccctgaaaagagtgcgtctgtcgcctgaatcagaagtcatactggaggaaacctctgtagataatgcaccctcacctgagcttacaagtgatgaatcgccacaccattattgtaacaagcgtaagaagattacggttgccactgaggaaaatagtaacagcagaagtttaaagaagctcaagaaaactactaaatcaagttttatttctgaagccttgtcacctaggctgaaggaggaccttaatgattcagattcaaaatcagtgggtagaactaaaagtgatggcagatttttcatcccttgcatgccagtgaaacgtgttattgtaataaagcctgagagattgaaaaggaagggaatatggtctcgagattgtgcttcagactcatggtcatctgaggaagatgcagttctttgtggaactgttcatgagtatggtccactttgggaattggcaagtgattttcttcattttttgccaggcggttccttgtataggggaagatatcatcatcctgtgcattgctgtgagagatacagagaactgttctgcaaacatggaatgtcagcaacagataattctaacagtgaaaaggttccttctgggactggaaaggctatacttagagtgtctgaggagagctgcgtatcattatattaagaagaagatattag

SEQ ID NO: 214113 - DNA, 1652 bp, Zea Mays
agggtatttgttccctcaaggcctcaacgcgagccaccccctccgtcctcaatccatttccattcttccctttcctgtctcctgttgccaccgcataggtgagttgcaggtgcagtagaaagtttgaactctgtgcgtgatcgagtagaaattagaatggcgaatgtcatggattctgaggtagtgcaggtggtagagtcgtcgtttgtagtgccgagcgagccgacaccgtcggaggggctctggctctctccgctggacctcattctggccaacagaggccacaccccaacagtctacctgtacagctccagcagcaatgctgttgccgccgccgatggtttcttcgacgtggccaggctcaaggaggctatggccaagaccttggtggccttctaccccctcgctggccgcctcggcgtcaacaacgatggaagggcagagatcacctgcaccggcgagggcgcgctctttgtggtcgctcatgccgacctcactgtcggtgacatcgaggacgacttcaggccgtcgccggagctgaggaggctctttgttccacggattgagccagcatccgtcgtgttggccatacaggtgactttcctcaagtcgggaggtgtggtgcttgggacggctctccaccacgccgccatcgacgcctcaagcgcgttccacttcttccagacgtggtcagccttgtgcaagcacggcgaccgcgcgacagtggagctcccgtgccacgaccgcacgctcctccgtgcacggtccccgcctaccgtccacccggacgccctgtcgaggttccacccaaagctcactttctccgacccgtcaggacctctcgcctttcaagtcttcgccatttccaaggaccaggtcacctccctgaagcgcctctgtggcggcacgagcaccttctgcgccatcggcgccctcgtgtggcagtgcgcgctcgttgcgcgccggcttccgcccgactccgaagcacgcctcaccttcccggccaacgtccggcgcagggtgaggccgtctctcccgatccgctacttcggcaacgcgttggtcaggctgggcgccactgctgcggttcgggatattgcttcggaggttctggcgtccgtggccggccgcatcaaagatgccgtcgatcgggtggacgacgagctcgtgcggtctgcggtcgactactatgagatgaccgagatggacagccggccagtgaagggcaccttggcagagacggacctgcagattattagctggctgggcatgccaatgtacgacgcggatttcggatgggggaagccagcggtgatgtcgcgggcggagtccgtccgtggaggctttgtgtacctaatgagcgacgggccaacagacggcggcggcggtgtccgcgtgctcatgtgcatggaagctgcaaatatgaaggagctggagcggctgctttacgcaaaactctagaccctagagcctagacctgctaggtgcttgatgtgtggaacacaaaagacaataataaagagccaaagaggatacgactggctgttatttttttaatttgtctaaaaaactttgtgtttatgaaattccaccaccaactgatctacatcatacatgtatgacggagaagatccatcaatatggctagggat

SEQ ID NO: 214114 - DNA, 2433 bp, Zea Mays
tccatatcctcccccaatccctatccatctccccgctgcgctcctcgattcgacccccgcttccctccaactcgcctccgcgctcggcagtcggcacccacccctcttcctcctctctgccggcaacaggacgcaggcgcataaaaaatagcaccgccaccaccacgctccacacgctgcagtttctggaaggccaccccctctgtccgctttaaggcgccgtccgcaccggtcgcctccctcccccactagcgctgccgcggccctcgcccatatacagcgcggccgcgcccaatcgttcgttccgttccgctccgccacagcggctccgcaccaaatacaggcgtgtccaccgcgctcgccccctgctggtctgcgctgctctcgtcttgctcgccctcttattccctctcctccccgctccgaactcccaaagcctccacccgaggaggaggcctgccaggttcgttgccggccgtgtttgttcgcccggccggccggcccgaccgaggggaagctgcagcctgctcgctcgctcgagctattgcgtaggccgttgacgatgtcatgtggcccctgtgcgtcatctccgagaagctcttcaggatggcgggcgacgacggcgcgcagggggcggcgggctcgccgtaccccgacgggcggatttcactagcacgccgatcgtactacatcgatgttccgcatgtgcagcaggccttcacctgggactgcggcctcgcttgcgtgctcatggtgctcaggacgctagggattgattgctgcgacggcattgccgatctagagaggctctgccgcaccacaagcatttggacggttgacttagcatatctgttaaacaagttttcagtcagcttttctttctgtaccgtgacccttggagcaaatccacaatattctgctgaatccttttatagggagcaattgcaagaagacatcgatcgagtggatgagctatttgggaaggcgctcgatgctggaattagcattcaagtccatcaccgcatacgacattgcttttctactgttatctgggcactgcattgctattgctttagtggacaaatcgaagctaaagtgagtgctttcatgttgctgttactagagtgatatgtatctgcttttgattcactctttctccatgaactaaaaatttcatagaaacaaagttgaagttggttttaaaaatggtgatggttagcctatcgttatttcaactttcaagtgtgttgtgtacttgtgtgacagaagaggtgatagttgaaaagctcaactatatactggttgctctgctcccagcttttcaagagtgtcatctctgttgaagcagcagtggatacgagaacagtctgcagttcttgaaattcacttcgggtgaactttttttttgtttcataagacaaacatctgtccatgcatccatgtgtgcatgtactacaaataaacagcctattatttaggttacttaggtgcaaaatcatttggttttcaactgaaaacaagtggtcctatattgttatggttatgaaatttgaggtgccgacagaacataataataaccgtaatcttgaatgcagtttgccctgcatgagtgatcatgatgtacaacagcacaacgatgagcctgactacatgggacactatgtcgtaatatgtgggtatgatgctgatgattgtgaatttgagataagagatcctgccagttccaggaaacgcgaacgggtgacaatgaagagcttggacgaggcccggaaatcctttgggacagacgaggacattctcttggtctctttaacaggaaagagtgggatgaagctgtcgcgtaagctacttgcctgctccatgtagataaataaataggtcactagcaaccttgtgaatacgctgtacatgtccctgtagtagttatgactgtcgagtgccagccctgtacgtagctgagaacgttctcgcagttaccgctgataacagcagtgtggtagtgagcttagtaggcaccctgtatgttggcccatgccgtcgccaaaccatggccgcgcaaaggggttcagcggcagcaaaaggctctgctgaccttgtaaacgagcaagtgttctatgtacgattgttaactgaacgtgtacagatctccggaaataagaattaaaatcgtgctcctctctgcaaccgtgctccgtccgcttgctgtgctgtgctgggagcgctcgcgttgctgtcgcctgtcggagtgtcggtcgtgtctgaatctcgccaatcattcgaggtagcttctgccagacccaaccgctggtgagttgagtgttaggtcgcaggaatcgaactggcgccgaatccaacctctcactcacccttcctacctgcctgcacgttgctttctactagcggtttgcattttagagggagcgataataattg

SEQ ID NO: 214115 - DNA, 1122 bp, Zea Mays
cagcctctccgcagtgcgggggtggattagcaaggttatcaggaaaaagcatgaatcttctgtcactagtcttgcatggcatccaaacaatatatatcttgcaacatcgtctacggatggtaaatgcagagtgttctctacttttatcaagggtgtagacacaagaggatcaaaatcgagcacttcaaccgattcaaaattcggagagcaaatcgctcagcttgatctatcatctacctgggtatttggtgtaaggtggtcaccaagtgggaagacattggcctatgcagggcacaactccatgatttatttcatcgatgaagtcgaatcatctcctgtggcacaaaatttggcactgcgtgatctgcctctccgtgatgttctttttgtctctgagcgcacattgattggtgtcggatttgactgcaatcctatgatctttgctgctgatgatactgggctttggactttcataagattcttggacgagaggaaagctgccccatcagcttcaaaagcctcgcagctctctgaagcccttggaaagctatacggccaatcaaagcaagggactagtagtgataccgttgaaccatcaaaacctcgtggcggggcccatgagaattgcataacgtgtattgtacccttgagaaaaggaagcgacggtagtatcaaacgattcagcacatcaggattggatggtaagatcgtggtatgggatttggagaatcacgtcagcattgcaaaatagctcgagggagactttatcaccaatcaaatcgagggaactcctgtcattaccagccgtcctgcaggttttcaagatccagggccagccagatagattgttttttttttaatttttaaattttgttgtacctgtacacagaaacattgccttagcgtagggacagcttgcatctatcaagtagcttcatttttggcgagtaattttgccctttgaattgaatctatacaatattatactataattttagttaggtcgtaggcagttgacgtgatcccgcgttctttcgctctttctttccggtgccctgtgtaaaataaccacacgtggaatcttatctatccgggacttgtggtcatcttgtttcttctgct

SEQ ID NO: 214116 - DNA, 2759 bp, Zea Mays
aaaaaaccgcgagcagggagggagcggttaaaatgcgtgcaaaaagggaggagacgccgcgagcggcagacagacaggcagaggcaggcaggcaaggccaagagcccaagacggtcggggcggagcgcgagaggcaggcgacgcgaggagaggaggcggtgctgtggtggcctcacctgccctgccatgattataaaaaataacggagcgcgacgcgggtagaaaccggaaggcccgccgctgcccgccccttcttccttcccgtcccacacacgccgccgccgccgccgccgccgctcgcttcctccaccccccggtccgcgcggcgcgggctgcctgcgcgaccagggaggcagggcacgcggcaaccacgtggggaggcgacgacaccacaccaccctatgctctctgtcctcgcccgcaggattgcagcagcagtgaatttgggagcttgaagcgttcatccgagacatggaaaaagtgatctgccgggcatatctccttcaatgcaagcgattcttttcgaaagaaactcttgattggtgtgtcttagcccgtgggaacacccatctctcctctctggtgaactacacatagtggttatatgctcctctatgctccacaacaagcaggctgatgcgatattttcctgaagttattatattccagtctatgccagacatctacatgtagatgatgctcatataagggggggttaatatatttgccatcttcagcctacatctgttgctgccctaattagttgatttgtcttctgtgtactatctgaggcaagatattgatcagctagaacttggcaaacccttgcctttcgtgtctgttcatatttctcgtggcttggttattctgaagggtaaaacttgcacaaggcagctttgatattacaacaatggatagattcaagttgattaaggaagttggcgatgggacttttgggagtgtatggcgtgctatgaataaacagaatggcgaagttgttgctgttaagaaaatgaagaaaaaatattattcttttgaggaatgtatgagtctacgtgaagtaaagtctttgcggcgcatgaatcatcctaacattgtgaagctcaaagaggttatcagggaaaatgatatattatacttcataatggaatacatggagtgtaatctctatcaacttatgaaagaaagggtcaagcctttctccgagtctgaagtccgcaactggtgttttcagatatttcaggctcttgcatacatgcaccagaggggctactttcatcgtgacctcaaacctgagaatctgttggttagcaaaggtgtcataaagctagcagactttggtcttgcaagggaagtctcatcattgccaccatatacagaatatgtctcaactcgctggtatcgggcaccagaagtcttgctccagtcatctgcttatgattctgcagttgatatgtgggcaatgggtgccataatggctgagctgttgacactccatcctctctttcctggaaccagtgaaccagatgagattcacaagatatgcaatgtcatcggtagtccagatgagcaatcttggcctcaaggattgtctcttgcagaagcaatgaagtatcagttcccacagaccaaaggcagtcaattgtctgaggtgatgacaacagctagtagcgaggcaattgacctcatctcatcactatgctcatgggatcctagcaagagaccaaaggccacagaagtcctccagcataccttcttccagggttgtacatgtgttccgcttcctgtccgtcggaaagcttcatcgcttcctaaaacacctccatgtgttggatcaaagagaatttccgagaacagtgttgctagaagattctcgaccgggactctatctacgatgaaatctcatagcaatgcacctgcaaaatcaaacggtttatctaggactggtgtacaaagaaaacttcacttggatcgtcagccaccgcagaagagtacaaaaccgaccgagaacagcaataagctagctacaaatcgggtcccagcccggaacagcccagggaatcctgtacttaggcattcacgcagcttgcctgaaactggtcgacgagcagtacagaaggtctcatcaatcacagagaaactgtcgcaaatgtcggtgacctccagaacacgaagcgccgtgaagcctgccgccccgacgatgaaggccggacatggcaagtcagacttcctggggaagtctgacgatatccctccggcaaagaggctgacgagaaaattggtcagctaaacaagggtacgtagagtgaaaatccgatcatctgcaggagggtggagggatatggtgtatagtgtgcaggaaccagtgtgccgaagagaggctagctcatcctgagcgtttgcctgtcgatggtcgcgcggatttgccatcgccacagttttgctgcatcgagtcatcttaggaatggctttgcaaactcctttgtggagtgctagagcctgcttcgagccttaaccctcttcctggccttcgatctgccttttgcctgcgtcaactttgcccccatgttttaataaacatgatgtgtgctattaattttgtcttgttcatatcttgctgggatggacgtttcatgtttggtttgaatgtacaggtacagtgcacaggtgagaacaccgtaaaatgccaatttcacgtactgtatgcacatgagttgtcactctccaatatggataaagtattataccaagtggcgcta

SEQ ID NO: 214117 - DNA, 2699 bp, Zea Mays
gcagacagacaggcagaggcaggcaggcaaggccaagagcccaagacggtcggggcggagcgcgagaggcaggcgacgcgaggagaggaggcggtgctgtggtggcctcacctgccctgccatgattataaaaaataacggagcgcgacgcgggtagaaaccggaaggcccgccgctgcccgccccttcttccttcccgtcccacacacgccgccgccgccgccgccgccgctcgcttcctccaccccccggtccgcgcggcgcgggctgcctgcgcgaccagggaggcagggcacgcggcaaccacgtggggaggcgacgacaccacaccaccctatgctctctgtcctcgcccgcagggtaagattgcagcagcagtgaatttgggagcttgaagcgttcatccgagacatggaaaaagtgatctgccgggcatatctccttcaatgcaagcgattcttttcgaaagaaactcttgattggtgtgtcttagcccgtgggaacacccatctctcctctctggtgaactacacatagtggttatatgctcctctatgctccacaacaagcaggctgatgcgatattttcctgaagttattatattccagtctatgccagacatctacatgtagatgatgctcatataagggggggttaatatatttgccatcttcagcctacatctgttgctgccctaattagttgatttgtcttctgtgtactatctgaggcaagatattgatcagctagaacttggcaaacccttgcctttcgtgtctgttcatatttctcgtggcttggttattctgaagggtaaaacttgcacaaggcagctttgatattacaacaatggatagattcaagttgattaaggaagttggcgatgggacttttgggagtgtatggcgtgctatgaataaacagaatggcgaagttgttgctgttaagaaaatgaagaaaaaatattattcttttgaggaatgtatgagtctacgtgaagtaaagtctttgcggcgcatgaatcatcctaacattgtgaagctcaaagaggttatcagggaaaatgatatattatacttcataatggaatacatggagtgtaatctctatcaacttatgaaagaaagggtcaagcctttctccgagtctgaagtccgcaactggtgttttcagatatttcaggctcttgcatacatgcaccagaggggctactttcatcgtgacctcaaacctgagaatctgttggttagcaaaggtgtcataaagctagcagactttggtcttgcaagggaagtctcatcattgccaccatatacagaatatgtctcaactcgctggtatcgggcaccagaagtcttgctccagtcatctgcttatgattctgcagttgatatgtgggcaatgggtgccataatggctgagctgttgacactccatcctctctttcctggaaccagtgaaccagatgagattcacaagatatgcaatgtcatcggtagtccagatgagcaatcttggcctcaaggattgtctcttgcagaagcaatgaagtatcagttcccacagaccaaaggcagtcaattgtctgaggtgatgacaacagctagtagcgaggcaattgacctcatctcatcactatgctcatgggatcctagcaagagaccaaaggccacagaagtcctccagcataccttcttccagggttgtacatgtgttccgcttcctgtccgtcggaaagcttcatcgcttcctaaaacacctccatgtgttggatcaaagagaatttccgagaacagtgttgctagaagattctcgaccgggactctatctacgatgaaatctcatagcaatgcacctgcaaaatcaaacggtttatctaggactggtgtacaaagaaaacttcacttggatcgtcagccaccgcagaagagtacaaaaccgaccgagaacagcaataagctagctacaaatcgggtcccagcccggaacagcccagggaatcctgtacttaggcattcacgcagcttgcctgaaactggtcgacgagcagtacagaaggtctcatcaatcacagagaaactgtcgcaaatgtcggtgacctccagaacacgaagcgccgtgaagcctgccgccccgacgatgaaggccggacatggcaagtcagacttcctggggaagtctgacgatatccctccggcaaagaggctgacgagaaaattggtcagctaaacaagggtacgtagagtgaaaatccgatcatctgcaggagggtggagggatatggtgtatagtgtgcaggaaccagtgtgccgaagagaggctagctcatcctgagcgtttgcctgtcgatggtcgcgcggatttgccatcgccacagttttgctgcatcgagtcatcttaggaatggctttgcaaactcctttgtggagtgctagagcctgcttcgagccttaaccctcttcctggccttcgatctgccttttgcctgcgtcaactttgcccccatgttttaataaacatgatgtgtgctattaattttgtcttgttcatatcttgctgggatggacgtttcatgtttggtttgaatgtacaggtacagtgcacaggtgagaacaccgtaaaatgccaatttcacgtactgtatgcacatgagttgtcactctccaatatggataaagtattataccaagtggcgcta

SEQ ID NO: 214118 - DNA, 2256 bp, Zea Mays
gcagacagacaggcagaggcaggcaggcaaggccaagagcccaagacggtcggggcggagcgcgagaggcaggcgacgcgaggagaggaggcggtgctgtggtggcctcacctgccctgccatgattataaaaaataacggagcgcgacgcgggtagaaaccggaaggcccgccgctgcccgccccttcttccttcccgtcccacacacgccgccgccgccgccgccgccgctcgcttcctccaccccccggtccgcgcggcgcgggctgcctgcgcgaccagggaggcagggcacgcggcaaccacgtggggaggcgacgacaccacaccaccctatgctctctgtcctcgcccgcagggtaagcagcagtgaatttgggagcttgaagcgttcatccgagacatggaaaaagtgatctgccgggcatatctccttcaatgcaagcgattcttttcgaaagaaactcttgattggtgtgtcttagcccgtgggaacacccatctctcctctctggtgaactacacatagtggttatatgctcctctatgctccacaacaagcaggctgatgcgatattttcctgaagttattatattccagtctatgccagacatctacatgtagatgatgctcatataagggggggttaatatatttgccatcttcagcctacatctgttgctgccctaattagttgatttgtcttctgtgtactatctgaggcaagatattgatcagctagaacttggcaaacccttgcctttcgtgtctgttcatatttctcgtggcttggttattctgaagggtaaaacttgcacaaggcagctttgatattacaacaatggatagattcaagttgattaaggaagttggcgatgggacttttgggagtgtatggcgtgctatgaataaacagaatggcgaagttgttgctgttaagaaaatgaagaaaaaatattattcttttgaggaatgtatgagtctacgtgaagtaaagtctttgcggcgcatgaatcatcctaacattgtgaagctcaaagaggttatcagggaaaatgatatattatacttcataatggaatacatgatatttcaggctcttgcatacatgcaccagaggggctactttcatcgtgacctcaaacctgagaatctgttggttagcaaaggtgtcataaagctagcagactttggtcttgcaagggaagtctcatcattgccaccatatacagaatatgtctcaactcgctggtatcgggcaccagaagtcttgctccagtcatctgcttatgattctgcagttgatatgtgggcaatgggtgccataatggctgagctgttgacactccatcctctctttcctggaaccagtgaaccagatgagattcacaagatatgcaatgtcatcggtagtccagatgagcaatcttggcctcaaggattgtctcttgcagaagcaatgaagtatcagttcccacagaccaaaggcagtcaattgtctgaggtgatgacaacagctagtagcgaggcaattgacctcatctcatcactatgctcatgggatcctagcaagagaccaaaggccacagaagtcctccagcataccttcttccagggttgtacatgtgttccgcttcctgtccgtcggaaagcttcatcgcttcctaaaacacctccatgtgttggatcaaagagaatttccgagaacagtgttgctagaagattctcgaccgggactctatctacgatgaaatctcatagcaatgcacctgcaaaatcaaacggtttatctaggactggtgtacaaagaaaacttcacttggatcgtcagccaccgcagaagagtacaaaaccgaccgagaacagcaataagctagctacaaatcgggtcccagcccggaacagcccagggaatcctgtacttaggcattcacgcagcttgcctgaaactggtcgacgagcagtacagaaggtctcatcaatcacagagaaactgtcgcaaatgtcggtgacctccagaacacgaagcgccgtgaagcctgccgccccgacgatgaaggccggacatggcaagtcagacttcctggggaagtctgacgatatccctccggcaaagaggctgacgagaaaattggtcagctaaacaagggtacagtgcacaggtgagaacaccgtaaaatgccaatttcacgtactgtatgcacatgagttgtcactctccaatatggataaagtattataccaagtggcgcta

SEQ ID NO: 214119 - DNA, 2225 bp, Zea Mays
gcagacagacaggcagaggcaggcaggcaaggccaagagcccaagacggtcggggcggagcgcgagaggcaggcgacgcgaggagaggaggcggtgctgtggtggcctcacctgccctgccatgattataaaaaataacggagcgcgacgcgggtagaaaccggaaggcccgccgctgcccgccccttcttccttcccgtcccacacacgccgccgccgccgccgccgccgctcgcttcctccaccccccggtccgcgcggcgcgggctgcctgcgcgaccagggaggcagggcacgcggcaaccacgtggggaggcgacgacaccacaccaccctatgctctctgtcctcgcccgcagggtaagcagcagtgaatttgggagcttgaagcgttcatccgagacatggaaaaagtgatctgccgggcatatctccttcaatgcaagcgattcttttcgaaagaaactcttgattggtgtgtcttagcccgtgggaacacccatctctcctctctggtgaactacacatagtggttatatgctcctctatgctccacaacaagcaggctgatgcgatattttcctgaagttattatattccagtctatgccagacatctacatgtagatgatgctcatataagggggggttaatatatttgccatcttcagcctacatctgttgctgccctaattagttgatttgtcttctgtgtactatctgaggcaagatattgatcagctagaacttggcaaacccttgcctttcgtgtctgttcatatttctcgtggcttggttattctgaagggtaaaacttgcacaaggcagctttgatattacaacaatggatagattcaagttgattaaggaagttggcgatgggacttttgggagtgtatggcgtgctatgaataaacagaatggcgaagttgttgctgttaagaaaatgaagaaaaaatattattcttttgaggaatgtatgagtctacgtgaagtaaagtctttgcggcgcatgaatcatcctaacattgtgaagctcaaagaggttatcagggaaaatgatatattatacttcataatggaatacatggagtgtaatctctatcaacttatgaaagaaagggtcaagcctttctccgagtctgaagtccgcaactggtgttttcagatatttcaggctcttgcatacatgcaccagaggggctactttcatcgtgacctcaaacctgagaatctgttggttagcaaaggtgtcataaagctagcagactttggtcttgcaagggaagtctcatcattgccaccatatacagaatatgtctcaactcgctggtatcgggcaccagaagtcttgctccagtcatctgcttatgattctgcagttgatatgtgggcaatgggtgccataatggctgagctgttgacactccatcctctctttcctggaaccagaccaaaggcagtcaattgtctgaggtgatgacaacagctagtagcgaggcaattgacctcatctcatcactatgctcatgggatcctagcaagagaccaaaggccacagaagtcctccagcataccttcttccagggttgtacatgtgttccgcttcctgtccgtcggaaagcttcatcgcttcctaaaacacctccatgtgttggatcaaagagaatttccgagaacagtgttgctagaagattctcgaccgggactctatctacgatgaaatctcatagcaatgcacctgcaaaatcaaacggtttatctaggactggtgtacaaagaaaacttcacttggatcgtcagccaccgcagaagagtacaaaaccgaccgagaacagcaataagctagctacaaatcgggtcccagcccggaacagcccagggaatcctgtacttaggcattcacgcagcttgcctgaaactggtcgacgagcagtacagaaggtctcatcaatcacagagaaactgtcgcaaatgtcggtgacctccagaacacgaagcgccgtgaagcctgccgccccgacgatgaaggccggacatggcaagtcagacttcctggggaagtctgacgatatccctccggcaaagaggctgacgagaaaattggtcagctaaacaagggtacagtgcacaggtgagaacaccgtaaaatgccaatttcacgtactgtatgcacatgagttgtcactctccaatatggataaagtattataccaagtggcgcta

SEQ ID NO: 214120 - DNA, 2566 bp, Zea Mays
gcagacagacaggcagaggcaggcaggcaaggccaagagcccaagacggtcggggcggagcgcgagaggcaggcgacgcgaggagaggaggcggtgctgtggtggcctcacctgccctgccatgattataaaaaataacggagcgcgacgcgggtagaaaccggaaggcccgccgctgcccgccccttcttccttcccgtcccacacacgccgccgccgccgccgccgccgctcgcttcctccaccccccggtccgcgcggcgcgggctgcctgcgcgaccagggaggcagggcacgcggcaaccacgtggggaggcgacgacaccacaccaccctatgctctctgtcctcgcccgcagggtaagattgcagcagcagtgaatttgggagcttgaagcgttcatccgagacatggaaaaagtgatctgccgggcatatctccttcaatgcaagcgattcttttcgaaagaaactcttgattggtgtgtcttagcccgtgggaacacccatctctcctctctggtgaactacacatagtggttatatgctcctctatgctccacaacaagcaggctgatgcgatattttcctgaagttattatattccagtctatgccagacatctacatggttaatatatttgccatcttcagcctacatctgttgctgccctaattagttgatttgtcttctgtgtactatctgaggcaagatattgatcagctagaacttggcaaacccttgcctttcgtgtctgttcatatttctcgtggcttggttattctgaagggtaaaacttgcacaaggcagctttgatattacaacaatggatagattcaagttgattaaggaagttggcgatgggacttttgggagtgtatggcgtgctatgaataaacagaatggcgaagttgttgctgttaagaaaatgaagaaaaaatattattcttttgaggaatgtatgagtctacgtgaagtaaagtctttgcggcgcatgaatcatcctaacattgtgaagctcaaagaggttatcagggaaaatgatatattatacttcataatggaatacatggagtgtaatctctatcaacttatgaaagaaagggtcaagcctttctccgagtctgaagtccgcaactggtgttttcagatatttcaggctcttgcatacatgcaccagaggggctactttcatcgtgacctcaaacctgagaatctgttggttagcaaaggtgtcataaagctagcagactttggtcttgcaagggaagtctcatcattgccaccatatacagaatatgtctcaactcgctggtatcgggcaccagaagtcttgctccagtcatctgcttatgattctgcagttgatatgtgggcaatgggtgccataatggctgagctgttgacactccatcctctctttcctggaaccagaccaaaggcagtcaattgtctgaggtgatgacaacagctagtagcgaggcaattgacctcatctcatcactatgctcatgggatcctagcaagagaccaaaggccacagaagtcctccagcataccttcttccagggttgtacatgtgttccgcttcctgtccgtcggaaagcttcatcgcttcctaaaacacctccatgtgttggatcaaagagaatttccgagaacagtgttgctagaagattctcgaccgggactctatctacgatgaaatctcatagcaatgcacctgcaaaatcaaacggtttatctaggactggtgtacaaagaaaacttcacttggatcgtcagccaccgcagaagagtacaaaaccgaccgagaacagcaataagctagctacaaatcgggtcccagcccggaacagcccagggaatcctgtacttaggcattcacgcagcttgcctgaaactggtcgacgagcagtacagaaggtctcatcaatcacagagaaactgtcgcaaatgtcggtgacctccagaacacgaagcgccgtgaagcctgccgccccgacgatgaaggccggacatggcaagtcagacttcctggggaagtctgacgatatccctccggcaaagaggctgacgagaaaattggtcagctaaacaagggtacgtagagtgaaaatccgatcatctgcaggagggtggagggatatggtgtatagtgtgcaggaaccagtgtgccgaagagaggctagctcatcctgagcgtttgcctgtcgatggtcgcgcggatttgccatcgccacagttttgctgcatcgagtcatcttaggaatggctttgcaaactcctttgtggagtgctagagcctgcttcgagccttaaccctcttcctggccttcgatctgccttttgcctgcgtcaactttgcccccatgttttaataaacatgatgtgtgctattaattttgtcttgttcatatcttgctgggatggacgtttcatgtttggtttgaatgtacaggtacagtgcacaggtgagaacaccgtaaaatgccaatttcacgtactgtatgcacatgagttgtcactctccaatatggataaagtattataccaagtggcgcta

SEQ ID NO: 214121 - DNA, 2668 bp, Zea Mays
gcagacagacaggcagaggcaggcaggcaaggccaagagcccaagacggtcggggcggagcgcgagaggcaggcgacgcgaggagaggaggcggtgctgtggtggcctcacctgccctgccatgattataaaaaataacggagcgcgacgcgggtagaaaccggaaggcccgccgctgcccgccccttcttccttcccgtcccacacacgccgccgccgccgccgccgccgctcgcttcctccaccccccggtccgcgcggcgcgggctgcctgcgcgaccagggaggcagggcacgcggcaaccacgtggggaggcgacgacaccacaccaccctatgctctctgtcctcgcccgcagggtaagcagcagtgaatttgggagcttgaagcgttcatccgagacatggaaaaagtgatctgccgggcatatctccttcaatgcaagcgattcttttcgaaagaaactcttgattggtgtgtcttagcccgtgggaacacccatctctcctctctggtgaactacacatagtggttatatgctcctctatgctccacaacaagcaggctgatgcgatattttcctgaagttattatattccagtctatgccagacatctacatggttaatatatttgccatcttcagcctacatctgttgctgccctaattagttgatttgtcttctgtgtactatctgaggcaagatattgatcagctagaacttggcaaacccttgcctttcgtgtctgttcatatttctcgtggcttggttattctgaagggtaaaacttgcacaaggcagctttgatattacaacaatggatagattcaagttgattaaggaagttggcgatgggacttttgggagtgtatggcgtgctatgaataaacagaatggcgaagttgttgctgttaagaaaatgaagaaaaaatattattcttttgaggaatgtatgagtctacgtgaagtaaagtctttgcggcgcatgaatcatcctaacattgtgaagctcaaagaggttatcagggaaaatgatatattatacttcataatggaatacatggagtgtaatctctatcaacttatgaaagaaagggtcaagcctttctccgagtctgaagtccgcaactggtgttttcagatatttcaggctcttgcatacatgcaccagaggggctactttcatcgtgacctcaaacctgagaatctgttggttagcaaaggtgtcataaagctagcagactttggtcttgcaagggaagtctcatcattgccaccatatacagaatatgtctcaactcgctggtatcgggcaccagaagtcttgctccagtcatctgcttatgattctgcagttgatatgtgggcaatgggtgccataatggctgagctgttgacactccatcctctctttcctggaaccagtgaaccagatgagattcacaagatatgcaatgtcatcggtagtccagatgagcaatcttggcctcaaggattgtctcttgcagaagcaatgaagtatcagttcccacagaccaaaggcagtcaattgtctgaggtgatgacaacagctagtagcgaggcaattgacctcatctcatcactatgctcatgggatcctagcaagagaccaaaggccacagaagtcctccagcataccttcttccagggttgtacatgtgttccgcttcctgtccgtcggaaagcttcatcgcttcctaaaacacctccatgtgttggatcaaagagaatttccgagaacagtgttgctagaagattctcgaccgggactctatctacgatgaaatctcatagcaatgcacctgcaaaatcaaacggtttatctaggactggtgtacaaagaaaacttcacttggatcgtcagccaccgcagaagagtacaaaaccgaccgagaacagcaataagctagctacaaatcgggtcccagcccggaacagcccagggaatcctgtacttaggcattcacgcagcttgcctgaaactggtcgacgagcagtacagaaggtctcatcaatcacagagaaactgtcgcaaatgtcggtgacctccagaacacgaagcgccgtgaagcctgccgccccgacgatgaaggccggacatggcaagtcagacttcctggggaagtctgacgatatccctccggcaaagaggctgacgagaaaattggtcagctaaacaagggtacgtagagtgaaaatccgatcatctgcaggagggtggagggatatggtgtatagtgtgcaggaaccagtgtgccgaagagaggctagctcatcctgagcgtttgcctgtcgatggtcgcgcggatttgccatcgccacagttttgctgcatcgagtcatcttaggaatggctttgcaaactcctttgtggagtgctagagcctgcttcgagccttaaccctcttcctggccttcgatctgccttttgcctgcgtcaactttgcccccatgttttaataaacatgatgtgtgctattaattttgtcttgttcatatcttgctgggatggacgtttcatgtttggtttgaatgtacaggtacagtgcacaggtgagaacaccgtaaaatgccaatttcacgtactgtatgcacatgagttgtcactctccaatatggataaagtattataccaagtggcgcta

SEQ ID NO: 214122 - DNA, 2705 bp, Zea Mays
gcagacagacaggcagaggcaggcaggcaaggccaagagcccaagacggtcggggcggagcgcgagaggcaggcgacgcgaggagaggaggcggtgctgtggtggcctcacctgccctgccatgattataaaaaataacggagcgcgacgcgggtagaaaccggaaggcccgccgctgcccgccccttcttccttcccgtcccacacacgccgccgccgccgccgccgccgctcgcttcctccaccccccggtccgcgcggcgcgggctgcctgcgcgaccagggaggcagggcacgcggcaaccacgtggggaggcgacgacaccacaccaccctatgctctctgtcctcgcccgcaggattgcagcagcagtgaatttgggagcttgaagcgttcatccgagacatggaaaaagtgatctgccgggcatatctccttcaatgcaagcgattcttttcgaaagaaactcttgattggtgtgtcttagcccgtgggaacacccatctctcctctctggtgaactacacatagtggttatatgctcctctatgctccacaacaagcaggctgatgcgatattttcctgaagttattatattccagtctatgccagacatctacattttcttttcaggtagatgatgctcatataagggggggttaatatatttgccatcttcagcctacatctgttgctgccctaattagttgatttgtcttctgtgtactatctgaggcaagatattgatcagctagaacttggcaaacccttgcctttcgtgtctgttcatatttctcgtggcttggttattctgaagggtaaaacttgcacaaggcagctttgatattacaacaatggatagattcaagttgattaaggaagttggcgatgggacttttgggagtgtatggcgtgctatgaataaacagaatggcgaagttgttgctgttaagaaaatgaagaaaaaatattattcttttgaggaatgtatgagtctacgtgaagtaaagtctttgcggcgcatgaatcatcctaacattgtgaagctcaaagaggttatcagggaaaatgatatattatacttcataatggaatacatggagtgtaatctctatcaacttatgaaagaaagggtcaagcctttctccgagtctgaagtccgcaactggtgttttcagatatttcaggctcttgcatacatgcaccagaggggctactttcatcgtgacctcaaacctgagaatctgttggttagcaaaggtgtcataaagctagcagactttggtcttgcaagggaagtctcatcattgccaccatatacagaatatgtctcaactcgctggtatcgggcaccagaagtcttgctccagtcatctgcttatgattctgcagttgatatgtgggcaatgggtgccataatggctgagctgttgacactccatcctctctttcctggaaccagtgaaccagatgagattcacaagatatgcaatgtcatcggtagtccagatgagcaatcttggcctcaaggattgtctcttgcagaagcaatgaagtatcagttcccacagaccaaaggcagtcaattgtctgaggtgatgacaacagctagtagcgaggcaattgacctcatctcatcactatgctcatgggatcctagcaagagaccaaaggccacagaagtcctccagcataccttcttccagggttgtacatgtgttccgcttcctgtccgtcggaaagcttcatcgcttcctaaaacacctccatgtgttggatcaaagagaatttccgagaacagtgttgctagaagattctcgaccgggactctatctacgatgaaatctcatagcaatgcacctgcaaaatcaaacggtttatctaggactggtgtacaaagaaaacttcacttggatcgtcagccaccgcagaagagtacaaaaccgaccgagaacagcaataagctagctacaaatcgggtcccagcccggaacagcccagggaatcctgtacttaggcattcacgcagcttgcctgaaactggtcgacgagcagtacagaaggtctcatcaatcacagagaaactgtcgcaaatgtcggtgacctccagaacacgaagcgccgtgaagcctgccgccccgacgatgaaggccggacatggcaagtcagacttcctggggaagtctgacgatatccctccggcaaagaggctgacgagaaaattggtcagctaaacaagggtacgtagagtgaaaatccgatcatctgcaggagggtggagggatatggtgtatagtgtgcaggaaccagtgtgccgaagagaggctagctcatcctgagcgtttgcctgtcgatggtcgcgcggatttgccatcgccacagttttgctgcatcgagtcatcttaggaatggctttgcaaactcctttgtggagtgctagagcctgcttcgagccttaaccctcttcctggccttcgatctgccttttgcctgcgtcaactttgcccccatgttttaataaacatgatgtgtgctattaattttgtcttgttcatatcttgctgggatggacgtttcatgtttggtttgaatgtacaggtacagtgcacaggtgagaacaccgtaaaatgccaatttcacgtactgtatgcacatgagttgtcactctccaatatggataaagtattataccaagtggcgcta

SEQ ID NO: 214123 - DNA, 2444 bp, Zea Mays
ctccgtttttcgcttgcttggcgggatttggccctggatctgtgcacaggacggcggatctgggcggcgagttgattgcagcagcagtgaatttgggagcttgaagcgttcatccgagacatggaaaaagtgatctgccgggcatatctccttcaatgcaagcgattcttttcgaaagaaactcttgattggtgtgtcttagcccgtgggaacacccatctctcctctctggtgaactacacatagtggttatatgctcctctatgctccacaacaagcaggctgatgcgatattttcctgaagttattatattccagtctatgccagacatctacatgtagatgatgctcatataaggggggtatgcaaatctctctgcactttgccacatacattgggttaatatatttgccatcttcagcctacatctgttgctgccctaattagttgatttgtcttctgtgtactatctgaggcaagatattgatcagctagaacttggcaaacccttgcctttcgtgtctgttcatatttctcgtggcttggttattctgaagggtaaaacttgcacaaggcagctttgatattacaacaatggatagattcaagttgattaaggaagttggcgatgggacttttgggagtgtatggcgtgctatgaataaacagaatggcgaagttgttgctgttaagaaaatgaagaaaaaatattattcttttgaggaatgtatgagtctacgtgaagtaaagtctttgcggcgcatgaatcatcctaacattgtgaagctcaaagaggttatcagggaaaatgatatattatacttcataatggaatacatggagtgtaatctctatcaacttatgaaagaaagggtcaagcctttctccgagtctgaagtccgcaactggtgttttcagatatttcaggctcttgcatacatgcaccagaggggctactttcatcgtgacctcaaacctgagaatctgttggttagcaaaggtgtcataaagctagcagactttggtcttgcaagggaagtctcatcattgccaccatatacagaatatgtctcaactcgctggtatcgggcaccagaagtcttgctccagtcatctgcttatgattctgcagttgatatgtgggcaatgggtgccataatggctgagctgttgacactccatcctctctttcctggaaccagtgaaccagatgagattcacaagatatgcaatgtcatcggtagtccagatgagcaatcttggcctcaaggattgtctcttgcagaagcaatgaagtatcagttcccacagaccaaaggcagtcaattgtctgaggtgatgacaacagctagtagcgaggcaattgacctcatctcatcactatgctcatgggatcctagcaagagaccaaaggccacagaagtcctccagcataccttcttccagggttgtacatgtgttccgcttcctgtccgtcggaaagcttcatcgcttcctaaaacacctccatgtgttggatcaaagagaatttccgagaacagtgttgctagaagattctcgaccgggactctatctacgatgaaatctcatagcaatgcacctgcaaaatcaaacggtttatctaggactggtgtacaaagaaaacttcacttggatcgtcagccaccgcagaagagtacaaaaccgaccgagaacagcaataagctagctacaaatcgggtcccagcccggaacagcccagggaatcctgtacttaggcattcacgcagcttgcctgaaactggtcgacgagcagtacagaaggtctcatcaatcacagagaaactgtcgcaaatgtcggtgacctccagaacacgaagcgccgtgaagcctgccgccccgacgatgaaggccggacatggcaagtcagacttcctggggaagtctgacgatatccctccggcaaagaggctgacgagaaaattggtcagctaaacaagggtacgtagagtgaaaatccgatcatctgcaggagggtggagggatatggtgtatagtgtgcaggaaccagtgtgccgaagagaggctagctcatcctgagcgtttgcctgtcgatggtcgcgcggatttgccatcgccacagttttgctgcatcgagtcatcttaggaatggctttgcaaactcctttgtggagtgctagagcctgcttcgagccttaaccctcttcctggccttcgatctgccttttgcctgcgtcaactttgcccccatgttttaataaacatgatgtgtgctattaattttgtcttgttcatatcttgctgggatggacgtttcatgtttggtttgaatgtacaggtacagtgcacaggtgagaacaccgtaaaatgccaatttcacgtactgtatgcacatgagttgtcactctccaatatggataaagtattataccaagtggcgcta

SEQ ID NO: 214124 - DNA, 1318 bp, Zea Mays
ctcctttggatatgtccgaaccatatcaaacagtattggacaagcttatgtgtgatcccatcctctttcaccaaaagtgaaccagatgagattcacaagatatgcaatgtcatcggtagtccagatgagcaatcttggcctcaaggattgtctcttgcagaagcaatgaagtatcagttcccacagaccaaaggcagtcaattgtctgaggtgatgacaacagctagtagcgaggcaattgacctcatctcatcactatgctcatgggatcctagcaagagaccaaaggccacagaagtcctccagcataccttcttccagggttgtacatgtgttccgcttcctgtccgtcggaaagcttcatcgcttcctaaaacacctccatgtgttggatcaaagagaatttccgagaacagtgttgctagaagattctcgaccgggactctatctacgatgaaatctcatagcaatgcacctgcaaaatcaaacggtttatctaggactggtgtacaaagaaaacttcacttggatcgtcagccaccgcagaagagtacaaaaccgaccgagaacagcaataagctagctacaaatcgggtcccagcccggaacagcccagggaatcctgtacttaggcattcacgcagcttgcctgaaactggtcgacgagcagtacagaaggtctcatcaatcacagagaaactgtcgcaaatgtcggtgacctccagaacacgaagcgccgtgaagcctgccgccccgacgatgaaggccggacatggcaagtcagacttcctggggaagtctgacgatatccctccggcaaagaggctgacgagaaaattggtcagctaaacaagggtacgtagagtgaaaatccgatcatctgcaggagggtggagggatatggtgtatagtgtgcaggaaccagtgtgccgaagagaggctagctcatcctgagcgtttgcctgtcgatggtcgcgcggatttgccatcgccacagttttgctgcatcgagtcatcttaggaatggctttgcaaactcctttgtggagtgctagagcctgcttcgagccttaaccctcttcctggccttcgatctgccttttgcctgcgtcaactttgcccccatgttttaataaacatgatgtgtgctattaattttgtcttgttcatatcttgctgggatggacgtttcatgtttggtttgaatgtacaggtacagtgcacaggtgagaacaccgtaaaatgccaatttcacgtactgtatgcacatgagttgtcactctccaatatggataaagtattataccaagtggcgcta

SEQ ID NO: 214125 - DNA, 936 bp, Zea Mays
atcaaacagtattggacaagcttatgtgtgatcccatcctctttcaccaaaagtgaaccagatgagattcacaagatatgcaatgtcatcggtagtccagatgagcaatcttggcctcaaggattgtctcttgcagaagcaatgaagtatcagttcccacagaccaaaggcagtcaattgtctgaggtgatgacaacagctagtagcgaggcaattgacctcatctcatcactatgctcatgggatcctagcaagagaccaaaggccacagaagtcctccagcataccttcttccagggttgtacatgtgttccgcttcctgtccgtcggaaagcttcatcgcttcctaaaacacctccatgtgttggatcaaagagaatttccgagaacagtgttgctagaagattctcgaccgggactctatctacgatgaaatctcatagcaatgcacctgcaaaatcaaacggtttatctaggactggtgtacaaagaaaacttcacttggatcgtcagccaccgcagaagagtacaaaaccgaccgagaacagcaataagctagctacaaatcgggtcccagcccggaacagcccagggaatcctgtacttaggcattcacgcagcttgcctgaaactggtcgacgagcagtacagaaggtctcatcaatcacagagaaactgtcgcaaatgtcggtgacctccagaacacgaagcgccgtgaagcctgccgccccgacgatgaaggccggacatggcaagtcagacttcctggggaagtctgacgatatccctccggcaaagaggctgacgagaaaattggtcagctaaacaagggtacagtgcacaggtgagaacaccgtaaaatgccaatttcacgtactgtatgcacatgagttgtcactctccaatatggataaagtattataccaagtggcgcta

SEQ ID NO: 214126 - DNA, 2145 bp, Zea Mays
gaacaccattgttgtactatatttatatgattattttgatcgaaggaacgaggcaaagagtcaattaccattgacaaaggctactgtaacaaaggtcgaggttgttggtatgggtgatcgtgtttgtgtggatctttgcagtatcatgcgacctggcgaaggccttctggttggatcgtatgccagaggaatgtttcttgttcattctgaatgcttggagactaattacattgcaagcaggcctttcagagtcaatgcggggcctgtacatgcatatgtcaccgttcctggtggcaagacaagctacctctcagagttggggtcaggaaaggaagtcatcgtgatcaatcagagtgggctatggcgtactgcaattgtcggtcgtgtgaagatcgaatcaaggcctctgatccttgtagaagcgaaggataactctggagacgagacgtatagcatttttctacaaaacgcagaaacagttgcacttattacccctaacacaggatcaagtggaaggaccgccattcccgtgacttcgctgaaagtcggtgatgaagttctggtgaggaaacagggcgccgcccgtcacactgggatagagattcaggagtttattgttgagagatgaaaatggaaacgctgaatgcaccagtttcacgtcgttttgaacaaaaaaatgatgtatgattgcaacattcatctgttctgttggttaagattgtgagattccattgcagcatacaattgtgagattccattgcaacgtacaataatagatcaagacattgatgccaagtgagtgaatttcggaacagtcacgacacaggtcaataatgaaccaggcctgacaacttatcataaggttgacatggtcatattcccgtggcacacaccatcgccgaaacatcagtagaagcaaaagctacaacatgctcagtgctcacagcttgagcccacaaacacacagcctacaggggccttggccccgctaataagtccagttctagtgcacttgggcaaagttctagtgcacttgggcagtgcggtatcctgccaaaggtgctgctgctccaagcgagcgccgtggcgaaggccgtgctgccggttgagctctcatcggcgattttggggtgctgctcagcggcgattttggggtgctggtcataggcgatttgggggcagcgtgcgaggctttccggatgtcgactaatggcgatggtgcaccatatttggcatcttgtagctgttccagctcttccagcacctgcgacattggaggccgcagcttggcgtcaccgcaaatgcattgcgaggcaatgcttgcaatggcatttgcgccctttttggggtactgtcctcccaacttcgtgtccatgatacggtacagtctgcgcttgtcgcccaggtgaggtctggcccagtcaactaggttctgctcaaagcctggttttgatttatccagagcccttcttccagtgagcagttcaagcaacaccaccccgaagctatagacatctgcctttgcagagagacggcctgcaaagacgcaagcaacatgaaactaaacagatccagaaccgccactgtaaattacctaaatcgaagatttatattccacgtgttgccactgttatgaacaaagttgactggactaatcttgttgactggagcattcaaggactaatctgatgtatcatgctgtttaaggaattgaagcacaaaattgaacaagtacaattgactccaaaagaaatataaatacagttatttgatggcaggtccccacaatgatttcttttagcttaaacaaatagccctttgttataccctgtatcaccaaatatgctttaggtagaaaatgaaatgttcaggcatccttagttgttgcagtacgaggaagtattattgacatctccctttaaaagttgaagccacaaaccagagtaatgcacaacactactaccccaatatttcatcagtacgcacgcgaggaaaaaatatctaacctgttgcaatgtactctggagctgcatatccatgagtacccatgacttgtgtggatacatgggttttatccccagttggaccggcttttgccaagccaaaatctgaaagttttgcgttgaattcctgcaccgaaacaag

SEQ ID NO: 214127 - DNA, 2230 bp, Zea Mays
cttcagcatacgacaccatctccgtgcatacaatgctggccttggagcaagggcttgatggagttgtacttaaagtagatgacatggatgatatcattaagctcaaggattattttgatcgaaggaacgaggcaaagagtcaattaccattgacaaaggctactgtaacaaaggtcgaggttgttggtatgggtgatcgtgtttgtgtggatctttgcagtatcatgcgacctggcgaaggccttctggtttgtgttggatcgtatgccagaggaatgtttcttgttcattctgaatgcttggagactaattacattgcaagcaggcctttcagagtcaatgcggggcctgtacatgcatatgtcaccgttcctggtggcaagacaagctacctctcagagttggggtcaggaaaggaagtcatcgtgatcaatcagagtgggctatggcgtactgcaattgtcggtcgtgtgaagatcgaatcaaggcctctgatccttgtagaagcgaaggataactctggagacgagacgtatagcatttttctacaaaacgcagaaacagttgcacttattacccctaacacaggatcaagtggaaggaccgccattcccgtgacttcgctgaaagtcggtgatgaagttctggtgaggaaacagggcgccgcccgtcacactgggatagagattcaggagtttattgttgagagatgaaaatggaaacgctgaatgcaccagtttcacgtcgttttgaacaaaaaaatgatgtatgattgcaacattcatctgttctgttggttaagattgtgagattccattgcagcatacaattgtgagattccattgcaacgtacaataatagatcaagacattgatgccaagtgagtgaatttcggaacagtcacgacacaggtcaataatgaaccaggcctgacaacttatcataaggttgacatggtcatattcccgtggcacacaccatcgccgaaacatcagtagaagcaaaagctacaacatgctcagtgctcacagcttgagcccacaaacacacagcctacaggggccttggccccgctaataagtccagttctagtgcacttgggcaaagttctagtgcacttgggcagtgcggtatcctgccaaaggtgctgctgctccaagcgagcgccgtggcgaaggccgtgctgccggttgagctctcatcggcgattttggggtgctgctcagcggcgattttggggtgctggtcataggcgatttgggggcagcgtgcgaggctttccggatgtcgactaatggcgatggtgcaccatatttggcatcttgtagctgttccagctcttccagcacctgcgacattggaggccgcagcttggcgtcaccgcaaatgcattgcgaggcaatgcttgcaatggcatttgcgccctttttggggtactgtcctcccaacttcgtgtccatgatacggtacagtctgcgcttgtcgcccaggtgaggtctggcccagtcaactaggttctgctcaaagcctggttttgatttatccagagcccttcttccagtgagcagttcaagcaacaccaccccgaagctatagacatctgcctttgcagagagacggcctgcaaagacgcaagcaacatgaaactaaacagatccagaaccgccactgtaaattacctaaatcgaagatttatattccacgtgttgccactgttatgaacaaagttgactggactaatcttgttgactggagcattcaaggactaatctgatgtatcatgctgtttaaggaattgaagcacaaaattgaacaagtacaattgactccaaaagaaatataaatacagttatttgatggcaggtccccacaatgatttcttttagcttaaacaaatagccctttgttataccctgtatcaccaaatatgctttaggtagaaaatgaaatgttcaggcatccttagttgttgcagtacgaggaagtattattgacatctccctttaaaagttgaagccacaaaccagagtaatgcacaacactactaccccaatatttcatcagtacgcacgcgaggaaaaaatatctaacctgttgcaatgtactctggagctgcatatccatgagtacccatgacttgtgtggatacatgggttttatccccagttggaccggcttttgccaagccaaaatctgaaagttttgcgttgaattcctgcaccgaaacaag

SEQ ID NO: 214128 - DNA, 2879 bp, Zea Mays
ggctcttccgatgattcagccatcacaatggcatcctcctcttccttggcctccgccaaagccctagcacgctcccacgcgtccctcctcgcgccccaaacccagagaacaggtacccggtgtctcgctttctttctcgcaggattctctcgcccggtccctcagtccggtccgtgtctcgcggctccgtgcgaccgtgccgggcaattcaagctgctccccttcgacgatccgtcttccgccgtcactctgccgatggcttctgcacttcagcgcctgatgcgcgcctctgctgccgcgccggcggagccgaagaagaccgtctgggtgtggaccgagagccggcaggtgatgacggcggccgtggagagggggtggagcactttcctcttcggatccaaagacctcggcaaggactggtcatcaaccgctcgcataaatgctctcttcattgacggtccagggattttcgatgaggagaaccagaaggttgctgtaatttcacaagtctcttcgcccggtgaacttgaccttgtacaaccggacaacgccgaagccgagaacattgtcatagactttcgaggtggctggcaggttatacgggcagaaaatatagttgctgcattccaaggatgtaaaggaaatgtattggctgtatcaacgaacacaactgaggcgcaagtttttcttgaggccttggagcaagggcttgatggagttgtacttaaagtagatgacatggatgatatcattaagctcaaggattattttgatcgaaggaacgaggcaaagagtcaattaccattgacaaaggctactgtaacaaaggtcgaggttgttggtatgggtgatcgtgtttgtgtggatctttgcagtatcatgcgacctggcgaaggccttctggttggatcgtatgccagaggaatgtttcttgttcattctgaatgcttggagactaattacattgcaagcaggcctttcagagtcaatgcggggcctgtacatgcatatgtcaccgttcctggtggcaagacaagctacctctcagagttggggtcaggaaaggaagtcatcgtgatcaatcagagtgggctatggcgtactgcaattgtcggtcgtgtgaagatcgaatcaaggcctctgatccttgtagaagcgaaggataactctggagacgagacgtatagcatttttctacaaaacgcagaaacagttgcacttattacccctaacacaggatcaagtggaaggaccgccattcccgtgacttcgctgaaagtcggtgatgaagttctggtgaggaaacagggcgccgcccgtcacactgggatagagattcaggagtttattgttgagagatgaaaatggaaacgctgaatgcaccagtttcacgtcgttttgaacaaaaaaatgatgtatgattgcaacattcatctgttctgttggttaagattgtgagattccattgcagcatacaattgtgagattccattgcaacgtacaataatagatcaagacattgatgccaagtgagtgaatttcggaacagtcacgacacaggtcaataatgaaccaggcctgacaacttatcataaggttgacatggtcatattcccgtggcacacaccatcgccgaaacatcagtagaagcaaaagctacaacatgctcagtgctcacagcttgagcccacaaacacacagcctacaggggccttggccccgctaataagtccagttctagtgcacttgggcaaagttctagtgcacttgggcagtgcggtatcctgccaaaggtgctgctgctccaagcgagcgccgtggcgaaggccgtgctgccggttgagctctcatcggcgattttggggtgctgctcagcggcgattttggggtgctggtcataggcgatttgggggcagcgtgcgaggctttccggatgtcgactaatggcgatggtgcaccatatttggcatcttgtagctgttccagctcttccagcacctgcgacattggaggccgcagcttggcgtcaccgcaaatgcattgcgaggcaatgcttgcaatggcatttgcgccctttttggggtactgtcctcccaacttcgtgtccatgatacggtacagtctgcgcttgtcgcccaggtgaggtctggcccagtcaactaggttctgctcaaagcctggttttgatttatccagagcccttcttccagtgagcagttcaagcaacaccaccccgaagctatagacatctgcctttgcagagagacggcctgcaaagacgcaagcaacatgaaactaaacagatccagaaccgccactgtaaattacctaaatcgaagatttatattccacgtgttgccactgttatgaacaaagttgactggactaatcttgttgactggagcattcaaggactaatctgatgtatcatgctgtttaaggaattgaagcacaaaattgaacaagtacaattgactccaaaagaaatataaatacagttatttgatggcaggtccccacaatgatttcttttagcttaaacaaatagccctttgttataccctgtatcaccaaatatgctttaggtagaaaatgaaatgttcaggcatccttagttgttgcagtacgaggaagtattattgacatctccctttaaaagttgaagccacaaaccagagtaatgcacaacactactaccccaatatttcatcagtacgcacgcgaggaaaaaatatctaacctgttgcaatgtactctggagctgcatatccatgagtacccatgacttgtgtggatacatgggttttatccccagttggaccggcttttgccaagccaaaatctgaaagttttgcgttgaattcctgcaccgaaacaag

SEQ ID NO: 214129 - DNA, 728 bp, Zea Mays
ctatcccctatatagccgtgcaggtcgtcttcttcctcctctccactcctctcgtctccgtctccatctccgtctccgtctccacaccgtgccgtagctgctgctgtccgtgtccctcgcctcgaagaagacaactccaacactgttgctgcgtgactgctgaattcgctccacacacgcgcgaacccagcaaggcaagaacacgaacgagagagagagagagacagggagggatcatccatccatcagaccatcacccatggacaaccttaaggagggagggaagaagttcctgagctacttccagtgctgtatcaaggcctgaagaggagctgccgcaatgctatgtctgtgtgcctgtgctttgtcgcagcagaacactcgtgagcaattaggtcccggctttgttaagtatccaaaaaatgtgcaatgtatttgccctgatggtcactcgtttgacctgttagcctgtatgaagaacaagtcaggttatggggccaggcagccgtctatctgtacatggcaccatcgatttgtttgcgactggtggtataatgttgccctgtaatcattgtattggatgggaatttgcaccgcctccgtatttttgaacgatcacaaggggcatggttcgtttggattggttttgtgattacttatgatgggaaaatacggaaacaacaaatggcccctggaacattttttttatatataggagtgcactacat

SEQ ID NO: 214130 - DNA, 1832 bp, Zea Mays
ctctccactcctctcgtctccgtctccatctccgtctccgtctccacaccgtgccgtagctgctgctgtccgtgtccctcgcctcgaagaagacaactccaacactgttgctgcgtgactgctgaattcgctccacacacgcgcgaacccagcaaggcaagaacacgaacgagagagagagagagacagggagggatcatccatccatcagaccatcacccatggacaaccttaaggagtcatcacaccgtgcgctggtgcgtgcgtgcgtgcagcagcggggccacgatgccgcgggcgccaacagcggcgtctggatgacggtgccggcgttcggggactgggacacgaagaacggcgcgctgccggactactccatggacttctccaagatccgcgagacgcgcaagcagaacaagaaggagctctcccgcgccagcctcggcggcgacgacgacctcttcgcccacgcccacgcccacgcccagaagccgcaggccaacagcgcccagcccaagctcggccgcccctgccccgccgccgaccgccgaccgctccacgcccgcgaccactccccaacggtaaatctccgtgtcccggcccgtttcgttccagagtcactaaaatgaacttgacccatcttttctttcttcatttcttttgcgtggaaattcgggatattacatctcaaattcgtctcgtcttagttggattttacaagcgcggggggtaataattagtgtcggggattgaacttgctaattgcgagtgaccgcaagtacaaaagtgttaccttagtccggacaagccagattagcaaagctgacagcggagtaaaaaaaaactgtaactggcgaaaccagtttttttttagtgtagcattacaacacgcagtaaaatcgcctcgccgcttcagtaggcagcatcacatactgctgtccttctgaagcagattcttgagatggcataatggttctggaggtttagtttagaaaactagcgcatatgggttttccagtaaatggacgcatcaagccaagaaccacccattccaactccaccattgcattattatattttgtcgtaactgataggcaaggacgaatcttcctgtttttttcttaatcatactgtccatgtctacacgccttcagaaagctgcgcggatgtattgacgtggcactgtccgtaggaggatcttagggaaactgatgatgaggtttagccagttgaggggataagcaactgtccaggctgttgctgtgatatatcacaaatagcagaatggctgaagaagcatacttttaactgccaacaactacagaacactttgcatcagttcattgggttctccagaatgccttttcttacaccgttgcttggagggaagaagttcctgagctacttccagtgctgtatcaaggcctgaagaggagctgccgcaatgctatgtctgtgtgcctgtgctttgtcgcagcagaacactcgtgagcaattaggtcccggctttgttaagtatccaaaaaatgtgcaatgtatttgccctgatggtcactcgtttgacctgttagcctgtatgaagaacaagtcaggttatggggccaggcagccgtctatctgtacatggcaccatcgatttgtttgcgactggtggtataatgttgccctgtaatcattgtattggatgggaatttgcaccgcctccgtatttttgaacgatcacaaggggcatggttcgtttggattggttttgtgattacttatgatgggaaaatacggaaacaacaaatggcccctggaacattttttttatatataggagtgcactacat

SEQ ID NO: 214131 - DNA, 1720 bp, Zea Mays
agcttagagtttgtttggttagcacaagattggagtggattagaggggattgaagggaacttgtggagtttgaatgcaaggattgggccagcaagaaaatcaacataaaatatgaaattcgggaaagtaggaagggatacaaagcaggagccctgaagaagggcatggaacatagttacgcccaagaatgtgattttgttgccatctttgatgcagattttcaacctgatcctgacttccttttaagaactataccatttcttgtgcataacccgaagattgctctagtacagacacgttgggagtttgtgaactacaatatttgcctactgacaaggatacagaagatgtcactagattatcattttaaggtagagcaggaatcagggtcatctgtgcatgccttctttggtttcaacggtacggctggcgtgtggcgggtatcagctatcggtgaagcaggaggatggaaggatcgcaccactgtggaagacatggacttggctgtgcgggcaagcctcaagggatggcagttcctgtatgttggtgatataagggtgcgtctttctgcacacttgtagtaaaggttaagagtgaactcccaagtactttcaaggcctaccgtcatcaacagcacaggtggacttgtggtgctgccaacctcttcaggaaaatggccggggacattgttataagcaagggggcgactgtatggaagaagcttcaccttctgtacagcttcttcttcgtccgaagggtcatcgctcccatcctaacgttcctgttctactgcgtcgtgatcccactgtctgtcatggtccccgaagtcagcatccctgcctggggaatgttctacattcccactgccatcaccatcatgacagccatcaggaatccttggtctatccatctggtgccaatatggatcctgttcgagaacgtcatgtccatgcaccgaatgcgcgcggcgctgacggggctgctggagaccacgtacgtggacgagtgggtggtcaccgagaaggtgggcgatcatgtgaaggacaagctcgaggtccctctccttacaccggtgaagccaaccgagtgcgtcgagaggatctacttgcctgagctcctggtcgcgttctacctgttgctatgcgcgtcgtacgatgtcgtgctcggagccgggcactactacccgtacatcttcctccaggccttcgctttcctcgtgctggggtttggcttcgccggcaccgtgacgccctgctcttgttcataagccatcgcgcgcatagcgctagcgcccatggctattttgctgcattcttccctgattcgcctcctctaaagtctgtaactagaaaagagaaagcgattctttctgtaaatcgaacagaataaacgctgcacgcgtgtgcagcatttgagcagtaacttggtttttttgagctgactgcatgtcattttcacggtcgctgcaggccggtaagcaagaatagcagtagccctggctttgggtgcctgtgtgggtacgtgggtatgggcctggagtggaccagaggctatcagatcagccagtgccagcccatctgcccatgagaggtttgtctgaactctgaagtgatcgagtgaacccgtcgctgcaatggacagcacagtacggagtacggtacagttccacggagtcacggactcatctccagcgaggcgtcgccgatcgcttttcatcgac

SEQ ID NO: 214132 - DNA, 1711 bp, Zea Mays
agcttagagtttgtttggttagcacaagattggagtggattagaggggattgaagggaacttgtggagtttgaatgcaaggattgggccagcaagaaaatcaacataaaatatgaaattcgggaaagtaggaagggatacaaagcaggagccctgaagaagggcatggaacatagttacgcccaagaatgtgattttgttgccatctttgatgcagattttcaacctgatcctgacttccttttaagaactataccatttcttgtgcataacccgaagattgctctagtacagacacgttgggagtttgtgaactacaatatttgcctactgacaaggatacagaagatgtcactagattatcattttaaggtagagcaggaatcagggtcatctgtgcatgccttctttggtttcaacggtacggctggcgtgtggcgggtatcagctatcggtgaagcaggaggatggaaggatcgcaccactgtggaagacatggacttggctgtgcgggcaagcctcaagggatggcagttcctgtatgttggtgatataagggttaagagtgaactcccaagtactttcaaggcctaccgtcatcaacagcacaggtggacttgtggtgctgccaacctcttcaggaaaatggccggggacattgttataagcaagggggcgactgtatggaagaagcttcaccttctgtacagcttcttcttcgtccgaagggtcatcgctcccatcctaacgttcctgttctactgcgtcgtgatcccactgtctgtcatggtccccgaagtcagcatccctgcctggggaatgttctacattcccactgccatcaccatcatgacagccatcaggaatccttgtcatatttcgtgcacgccaggtctatccatctggtgccaatatggatcctgttcgagaacgtcatgtccatgcaccgaatgcgcgcggcgctgacggggctgctggagaccacgtacgtggacgagtgggtggtcaccgagaaggtgggcgatcatgtgaaggacaagctcgaggtccctctccttacaccggtgaagccaaccgagtgcgtcgagaggatctacttgcctgagctcctggtcgcgttctacctgttgctatgcgcgtcgtacgatgtcgtgctcggagccgggcactactacccgtacatcttcctccaggccttcgctttcctcgtgctggggtttggcttcgccggcaccgtgacgccctgctcttgttcataagccatcgcgcgcatagcgctagcgcccatggctattttgctgcattcttccctgattcgcctcctctaaagtctgtaactagaaaagagaaagcgattctttctgtaaatcgaacagaataaacgctgcacgcgtgtgcagcatttgagcagtaacttggtttttttgagctgactgcatgtcattttcacggtcgctgcaggccggtaagcaagaatagcagtagccctggctttgggtgcctgtgtgggtacgtgggtatgggcctggagtggaccagaggctatcagatcagccagtgccagcccatctgcccatgagaggtttgtctgaactctgaagtgatcgagtgaacccgtcgctgcaatggacagcacagtacggagtacggtacagttccacggagtcacggactcatctccagcgaggcgtcgccgatcgcttttcatcgac

SEQ ID NO: 214133 - DNA, 1821 bp, Zea Mays
agcttagagtttgtttggttagcacaagattggagtggattagaggggattgaagggaacttgtggagtttgaatgcaaggattgggccagcaagaaaatcaacataaaatatgaaattcgggaaagtaggaagggatacaaagcaggagccctgaagaagggcatggaacatagttacgcccaagaatgtgattttgttgccatctttgatgcagattttcaacctgatcctgacttccttttaagaactataccatttcttgtgcataacccgaagattgctctagtacagacacgttgggagtttgtgaactacaatatttgcctactgacaaggatacagaagatgtcactagattatcattttaaggtagagcaggaatcagggtcatctgtgcatgccttctttggtttcaacggtacggctggcgtgtggcgggtatcagctatcggtgaagcaggaggatggaaggatcgcaccactgtggaagacatggacttggctgtgcgggcaagcctcaagggatggcagttcctgtatgttggtgatataaggttttttgtacaggttaagagtgaactcccaagtactttcaaggcctaccgtcatcaacagcacaggtggacttgtggtgctgccaacctcttcaggaaaatggccggggacattgttataagcaagggggcgactgtatggaagaagcttcaccttctgtacagcttcttcttcgtccgaagggtcatcgctcccatcctaacgttcctgttctactgcgtcgtgatcccactgtctgtcatggtccccgaagtcagcatccctgcctggggaatgttctacattcccactgccatcaccatcatgacagccatcaggaatccttggtaagtggcccatctttcccctgactgatgcgtggagcggatttccctagctagctatgcgctcgttaatctcgcgtgtctactgatgatgccactagtcatatttcgtgcacgccaggtctatccatctggtgccaatatggatcctgttcgagaacgtcatgtccatgcaccgaatgcgcgcggcgctgacggggctgctggagaccacgtacgtggacgagtgggtggtcaccgagaaggtgggcgatcatgtgaaggacaagctcgaggtccctctccttacaccggtgaagccaaccgagtgcgtcgagaggatctacttgcctgagctcctggtcgcgttctacctgttgctatgcgcgtcgtacgatgtcgtgctcggagccgggcactactacccgtacatcttcctccaggccttcgctttcctcgtgctggggtttggcttcgccggcaccgtgacgccctgctcttgttcataagccatcgcgcgcatagcgctagcgcccatggctattttgctgcattcttccctgattcgcctcctctaaagtctgtaactagaaaagagaaagcgattctttctgtaaatcgaacagaataaacgctgcacgcgtgtgcagcatttgagcagtaacttggtttttttgagctgactgcatgtcattttcacggtcgctgcaggccggtaagcaagaatagcagtagccctggctttgggtgcctgtgtgggtacgtgggtatgggcctggagtggaccagaggctatcagatcagccagtgccagcccatctgcccatgagaggtttgtctgaactctgaagtgatcgagtgaacccgtcgctgcaatggacagcacagtacggagtacggtacagttccacggagtcacggactcatctccagcgaggcgtcgccgatcgcttttcatcgac

SEQ ID NO: 214134 - DNA, 805 bp, Zea Mays
ctcgcatggtgcaaaagggaggaagcaaagatcacagcttgggaaaatctacagaaagcaaaagcagaggcagctatccgtaagctggagatgaaacttgaaaagaaacggtcatcatcaatggacaaaattttaggcaaactccgctctgctcagaagaaagcacaagacatgcgaagtgtagtttcttctagtgaaggtcagtgtagtgtgagggcaaccaagaagacatcttcctctgtcaaaactggcaggcctttcagctgctgctttacctaccgtgcttgctagttgtgatacacagttggtgcctgtggatacagcaatggatataggtctattcgttatggacgcgaagggaagtcagttgggttttgactacaaggcctaattgttaatgagatttgcactgatgaatgagatatcgttatggagcagcagacgaagaaagccacgcgaaatccactcatgtaactgatggagtggactaatgcagtctagtatgcgacgatcaatctctgtacacccggtagaaaaagttcatgagcttcatggcagttagaatcaggattgagctgatattcatcccgcttgatgtgtagctagcattcttgtaactggaattgtgtgtgtaatgcaaatcatgggcgcattagactgtaatgaagaaaaagtcagggctgcgcctttagaatgcagcttgctcactttttgagtttagtactgagactgggcttgtttgttattggttggcagcaattggaactgtgacgacgtatattttccttttttttggaacgcgcta

SEQ ID NO: 214135 - DNA, 2376 bp, Zea Mays
aaaaagaaaaagggcaaaaaagccgagcgggtttgaacgaagcgaaagcggagctgctctccccgcccgcgctcgctccatcgctttactatcattttgctcttttggtcgtttctcagcggctcacggatcgcgcgcgctcccccgctcgtcgtggcgcggccgcgctccacgtttcaatccgtttttgctgccgtgcggtgacgtgacgcctctaccgttggcgctttctgcagacggtgggactgggaccacgcggcgcggccgatccagatcccgcgcactcgtccgcgctgctgcctctcaccagcggcggcagcggcagcggctttgcctcgcggggcacggttgcgccagacgaggaagaggggagagacggggcgagctcggctgaatcgcaggaagtggcagaagcagcaaacgattcgttctcctactcactaagagagtgccagaagcagcggcgtctcaagtcagagaggtctgcactggtgcggccaccggcctcgcataagctcaataatgccggaggtattgagcttctagtgctctcgccgaggtgcttgattggtggtaacccgggaggaatgagcaagagctcaacgacatcatcccggagcagatcaggcacaggcacgttcccaagccctgggactccgagctgcaaccggcattgtgcaggcagcatgcagtactccaagggttggagttcagagcgcgtgccactgggcactggtaggaatagaaggtatgggggcagtggggttgtgcttccatttaacaatgggaggaagctgccatcgaaatgggaggatgcagagaagtggatcctaagtccagtttcctgtgatgggttggggaggatgtctgcaccagctccacatcatagacggcccaagtcgaagagtgggccacttggccatccagctggcattccaggggcttatgcggctgtttcaccgcttgttccttgctttgatggtgtgctggcagcagctaatttcgcagcacattcacctttctctgctggggttctcataccagagcacgggcgcattggcgacttcagcagtggaagagacagatgtggtgatgacggtagcagcagatcctactccgctgagaaagagtcctatatattaagatctgcaagcatacatgcatggacagaaacacttatggaggcatctgcttttgctaatatctcagaagaaaccgtacaagatgataaactgcaacgccagacagaagcaacttccatgatttccagtccaatcataaagaaagacatcggcacacagatgagtcctgaggatagtatatcttctccaaaagcgagacattcctgctccagtctgccttcaggacatctgataaaggaagcaaatagtcatatacctaaacctgaaattcgggacgtgcaggttgatgaccaagtaactgtgacccggtggtccaagcgacatgtaacacgaggctctgataagaggtcaacaaatattattgaatggaggaagaagaccactgaaacccgaactccatcttttgatgaaaaagaaagagaaagatgcatgtcacagtgcaaaagggaggaagcaaagatcacagcttgggaaaatctacagaaagcaaaagcagaggcagctatccgtaagctggagatgaaacttgaaaagaaacggtcatcatcaatggacaaaattttaggcaaactccgctctgctcagaagaaagcacaagacatgcgaagtgtagtttcttctagtgaaggtcagtgtagtgtgagggcaaccaagaagacatcttcctctgtcaaaactggcaggcctttcagctgctgctttacctaccgtgcttgctagttgtgatacacagttggtgcctgtggatacagcaatggatataggtctattcgttatggacgcgaagggaagtcagttgggttttgactacaaggcctaattgttaatgagatttgcactgatgaatgagatatcgttatggagcagcagacgaagaaagccacgcgaaatccactcatgtaactgatggagtggactaatgcagtctagtatgcgacgatcaatctctgtacacccggtagaaaaagttcatgagcttcatggcagttagaatcaggattgagctgatattcatcccgcttgatgtgtagctagcattcttgtaactggaattgtgtgtgtaatgcaaatcatgggcgcattagactgtaatgaagaaaaagtcagggctgcgcctttagaatgcagcttgctcactttttgagtttagtactgagactgggcttgtttgttattggttggcagcaattggaactgtgacgacgtatattttccttttttttggaacgcgcta

SEQ ID NO: 214136 - DNA, 2267 bp, Zea Mays
actccccgtttttctccgcaccgccctgctccccgaccccaactgccgtctccttcctcggggaatgcgaccgcgcgccagagcatgctccgcccggagcccgcgctagggttccccgccgccggccccgcccgcgcgcccgagcgccgccgtaagaagcagccgccgacgaggcggaggcgaccggccggtgccacaacggtgggactgggaccacgcggcgcggccgatccagatcccgcgcactcgtccgcgctgctgcctctcaccagcggcggcagcggcagcggctttgcctcgcggggcacggttgcgccagacgaggaagaggggagagacggggcgagctcggctgaatcgcaggaagtggcagaagcagcaaacgattcgttctcctactcactaagagagtgccagaagcagcggcgtctcaagtcagagaggtctgcactggtgcggccaccggcctcgcataagctcaataatgccggaggtattgagcttctagtgctctcgccgaggtgcttgattggtggtaacccgggaggaatgagcaagagctcaacgacatcatcccggagcagatcaggcacaggcacgttcccaagccctgggactccgagctgcaaccggcattgtgcaggcagcatgcagtactccaagggttggagttcagagcgcgtgccactgggcactggtaggaatagaaggtatgggggcagtggggttgtgcttccatttaacaatgggaggaagctgccatcgaaatgggaggatgcagagaagtggatcctaagtccagtttcctgtgatgggttggggaggatgtctgcaccagctccacatcatagacggcccaagtcgaagagtgggccacttggccatccagctggcattccaggggcttatgcggctgtttcaccgcttgttccttgctttgatggtgtgctggcagcagctaatttcgcagcacattcacctttctctgctggggttctcataccagagcacgggcgcattggcgacttcagcagtggaagagacagatgtggtgatgacggtagcagcagatcctactccgctgagaaagagtcctatatattaagatctgcaagcatacatgcatggacagaaacacttatggaggcatctgcttttgctaatatctcagaagaaaccgtacaagatgataaactgcaacgccagacagaagcaacttccatgatttccagtccaatcataaagaaagacatcggcacacagatgagtcctgaggatagtatatcttctccaaaagttgatgaccaagtaactgtgacccggtggtccaagcgacatgtaacacgaggctctgataagaggtcaacaaatattattgaatggaggaagaagaccactgaaacccgaactccatcttttgatgaaaaagaaagagaaagatgcatgtcacagtgcaaaagggaggaagcaaagatcacagcttgggaaaatctacagaaagcaaaagcagaggcagctatccgtaagctggagatgaaacttgaaaagaaacggtcatcatcaatggacaaaattttaggcaaactccgctctgctcagaagaaagcacaagacatgcgaagtgtagtttcttctagtgaaggtcagtgtagtgtgagggcaaccaagaagacatcttcctctgtcaaaactggcaggcctttcagctgctgctttacctaccgtgcttgctagttgtgatacacagttggtgcctgtggatacagcaatggatataggtctattcgacctcttctcaggcaacagttatggacgcgaagggaagtcagttgggttttgactacaaggcctaattgttaatgagatttgcactgatgaatgagatatcgttatggagcagcagacgaagaaagccacgcgaaatccactcatgtaactgatggagtggactaatgcagtctagtatgcgacgatcaatctctgtacacccggtagaaaaagttcatgagcttcatggcagttagaatcaggattgagctgatattcatcccgcttgatgtgtagctagcattcttgtaactggaattgtgtgtgtaatgcaaatcatgggcgcattagactgtaatgaagaaaaagtcagggctgcgcctttagaatgcagcttgctcactttttgagtttagtactgagactgggcttgtttgttattggttggcagcaattggaactgtgacgacgtatattttccttttttttggaacgcgcta

SEQ ID NO: 214137 - DNA, 1299 bp, Zea Mays
ctcgctagtagctgatgctggcatacagcgtacactgcaattttggccctgggcttcgatgagaaattcatccgtatatgggaatactacttcatatactgcgccgctggtttcaagtcacggacacttgggaactaccagattgtgttttctcgccctggcaacgacaaattaggtgacagcggtatacactccttaagcaagctttctggcagctaataatgcgaggatctatatatatgtggtggtagctggatcagtcggagcctacacacctgaacttgagcctttttatttgtgatcgaattggacacgcagtgctgtgtacacgtcgctaactaactgtacttgcagcggcggatcattccattgcttcgatccaatttgacgtttcatcactttctgtttctgttggcgcaacgtaactccaatgattaaccttggcacatggccggctgggacgcaggagagactcgagcattcactttcgctggatatacatttgtgtattgtgtccagtctccagactccagcgctgtatgatgagctcaagaacgtagatatattgtcgtcagagtaagacaccacggtaccaaagtgctaggaaaaatcagagatatagaaagatagaggagcgcagacctaaaaccgctggatcagagtatcgatatagctgtatgcacacgtacaatataaagaggtttggactcttaagcataataccctacgtcatctatgtggtgattggttaggtgcaaatgtggatacagcttagactcagatgatatctgagctacccagtgagaacggccctaactaccacttagaatctgaatgtctacccctagagagaatgatattgaaccctttttacgttgctctacatattccttttatagcacaagagatgagagagtcattcatacatagagaagatagcgggctctgctcaatagaggtccatctaattttgatttgtcttagttgtcccaccatacatggagcacacatctgacgtgtcacaagagtgagtgtgacatgctgcagtagcaggtagctgctgaagggtacacaatgtatagtgctcttggttcatctatggtctgaggcctggctacaatggagcattttaaccgaccgctatgtcacctctctcaaaagaatgtgatagacaaaaacattatcttaatcggtcgatcgccattggagaaaggggctttagacccctagcattggtacagattgagttagaacctacactgacgcaagcatcaatatggattctaattgtcaggacaa

SEQ ID NO: 214138 - DNA, 4231 bp, Zea Mays
agtcggcactctcatctccactctcccccaaaaccctataggctatagcggcagggagaaagtgagcacccacctcaacccgcccgccgccatggcgctccgccgcatcacaccgcggaggagacccgttctccccgtcccccgtgccttctcctcgagtccgccgtttcctccacccccgcctccggcgaacgaccccgaccccgacgccgcccaacccccatcctcttctccgccccctaattccggcgcgccgcggaacccggagtcctcgttcttccaggacatcaaagatcgcctccgttcgtctcccacgtctccgtctccgcgccggatcccgacgaccctgccccgccccgaccctgcgcgcggcgctccttcttcgggaccgcccattggagacatccgccggatgctccagaacttccgcttaaccggctcaaccagcgacgcgccctccacctccgctcccggatccaacccctccttcatggacctgctcaagaaccacttggaccagggtgccaacgcccggcaggcggagctcggcttcaatgccatcggagagagcctcaagcgcccccgtccgccgaagccttttataaccccttcgtcgagaaacatcttctgccgggagctagagaggacctcgaaggctttaggtgcgcggcaggaagagaatggctctgccattgagcttaaggggagctacagctacgaagagcttgggaagagactaggggagctgcggccggcgggtgcaggtaaagacggtaaggagtggttctcgctcaaggagctgcaggggcgtatcgccaagctcgcggagcaggagagccagcttgccgggccgttttcggaaatgcggcggggcattaggaacctgcagaaacaaggaaaaccgggtcggcctgtaaacatccaagcactgctgaaccctgtcggtcagccgacgccagactacatgagtgggcctccgcaggtggaattgttagagaagatcatatgtcatccgaagagaagatgaaattggagctccaaagggtgagggacgaattcaagatgtccgagaatgactgtggttctgcacgagttcaaattgcccagctgactctgaaaatcaagcatctgtcaactgttctacacaagaaggataaacattctagaaaggggcttcaggagatggtccaaaggaggaagaaatacctgaaatacttgcgaaggacggactgggactcttactgtcttgttctgtcaaagctggggcttcgcgatgtgcccgagtacaaagctcctgactacaagagcaaagcaaccaccaaggccaaatctaagaagagcaagagcaagggcaagaagaggaaggtgaaggcataaaagtagcgaacaaatatgccctgtttttggtcttgaattgcatgctcagaaaatgaatcgagaagacgctcaggcctgagatggcttgatccaatcttgcaatgctgttttttttgcatggtcagaaaataaatcgagaagacgctcaggccccaattggctcgatccaatcttgtaatgttgttttcgaagctgtttgtaataaccatttcactgattcggtccagccttcaaacaatcgccttttagttctccccctcaatttgcgagaacggatgtggagtaaccgacactagtactataccgttgcattatcaccagtttgtaactttaccagaattcttgtttgtccttgacgtaatttggacaaatttcttgtacaaaaaatacatgaaccatatgtcaggcttgctagcttagcacgaatacgatactgtgtttggccgtatcgtgaagatcggagcggcaagacgtgttagatttggaaaaaaatcatatagattagttttaaaaactgtttttaaaaatgtttaaattataaaaagatcttatttttgaaggccgcgacccgacctgcggtcctcggccagcggctggttggctgtgccctggttcctcgtcctcctagtcaccacgcaaccagtaaaaacattcccccaatcccgaacccctccgccgccgccgccgccgccgccgccgtggccaaggagcaagaaagggacacggcctatcccttggtcgcggcgccagatctcgccgctgctcgcctctcatccatggaggcgagatcctcgtcgtccgcggccgcagtgccgccgcccctctccataccttcgtccagcgaccagtgcgtctgggctgacgcctcgccgctcctcgccgccgcgtgccgtgatctcgaggatggggaacttgtacatggagaaaactttagtctatttgctgcaatgtctgcattggaaataatggatccaaaaatggattctggaattgagagaagtcgatacaactccattgatgaagcaatagaagatggtgttgccccaatcccacttagcttggacaggacacttgatgttcaacgctctattgatgtcatggatcatcttttctcatgtgaggcaacatggcacaaggggcacactctagctcagactgtatttacatgtatctaccttatgagaatggaaagaacttcatcgcatgctgtactaaatagcttttgcaggattttgcgtgctacttgtaatgctgtcatttctgctgtttctactgcccgaactcatgaggaagaggatctctttactatgtcctttggtctgcctttgagagatgaaggtgatgataagtgcctgtcaattctaaactcagtcgaagagataatatctcgtcaattacgtgcatgtaaagcccaggcgttgtccaagaaaaaaacactagaaggtcttgaatcccttcaagataatcctgatctggaggaggattactgcagagctctgttatgcagattacgttttcgtaagcatttctaccatgttattatgtgcatgaggaaacctcatggaagaggattggagttggcccggaagcatgttgcttcatgcttgacagagcttaatttgatgcataagtctcggaagtttctcaagtcccagtccagcactatggtacagcaaagtgatggaaactgcaccactgcatctggttgtcagcctgttggctttgatgttagcttaaacagcagacttttgagtcccacaccgccacgtgcagtaaaagttcttagctggagcaatgcaatcaggtactttgagaggcttctgcatgatcttgatgtcatctgcgctttgtcgctcaatccggtgcttgataatgtgcttcactttattgtccagttccaaaaaacagtgccagatttggttcctagagcatttcttcagactttgttggtccaagatggtaaactttatggggaatacttcttttctgatgtcatttcaagggctttatcactaccggacattataggagataaggagtttcagatgaatgagtttgtggtgcagctaggtcagttggttatcaacctgataaaaattctttgtacaaacactgcatggcaacggcgcaagcttgggaagagtttgcaggattggagtactatttccatacagttggagcttgcactgaaaagagagtttggtgaaactagaaatgtcttgcagaatgagaatatgtgcatgagagtatcaaagcaacttcttatttggactcaggaacatgcatactgggttgcttttcggtttctcacattgggttttgaacttgacctatattctccgggcgaatacagtatggtgtactggtacatgtatgtggtgctcacaaagctaatagaaaagatgcagttacgagttctggccagtagtgaaacctcacgaagaaaggggaaaaagaagaaggatcatttgaaggattcagctcgggatatggcattttcgtcgtcttgtttattgcctcaatgctatcttttgctatcagagggactctcgatgatgctagctgtcctcagaaacgaaagtaggtcattccaattaccaagtatcttcaacactgaacaagagagattcatgcagcactttgatcttcttctgaaagctcgagtccctgagcacatttccttctacagtttcaaggaatcatcttcccgggcaggcatgtcggatttggtgaagtacaacttcttcaaggaaattcagaagatagtgccctcactacggggcagctttgcaagtgaaccagaaaaactcgctgaggtccgtcggatagagcaggttggatgggaccgtgcagc

SEQ ID NO: 214139 - DNA, 2539 bp, Zea Mays
ctcggccagcggctggttggctgtgccctggttcctcgtcctcctagtcaccacgcaaccagtaaaaacattcccccaatcccgaacccctccgccgccgccgccgccgccgccgccgtggccaaggagcaagaaagggacacggcctatcccttggtcgcggcgccagatctcgccgctgctcgcctctcatccatggaggcgagatcctcgtcgtccgcggccgcagtgccgccgcccctctccataccttcgtccagcgaccagtgcgtctgggctgacgcctcgccgctcctcgccgccgcgtgccgtgatctcgaggatggggaacttgtacatggagaaaactttagtctatttgctgcaatgtctgcattggaaataatggatccaaaaatggattctggaattgagagaagtcgatacaactccattgatgaagcaatagaagatggtgttgccccaatcccacttagcttggacaggacacttgatgttcaacgctctattgatgtcatggatcatcttttctcatgtgaggaagaggatctctttactatgtcctttggtctgcctttgagagatgaaggtgatgataagtgcctgtcaattctaaactcagtcgaagagataatatctcgtcaattacgtgcatgtaaagcccaggcgttgtccaagaaaaaaacactagaaggtcttgaatcccttcaagataatcctgatctggaggaggattactgcagagctctgttatgcagattacgttttcgtaagcatttctaccatgttattatgtgcatgaggaaacctcatggaagaggattggagttggcccggaagcatgttgcttcatgcttgacagagcttaatttgatgcataagtctcggaagtttctcaagtcccagtccagcactatggtacagcaaagtgatggaaactgcaccactgcatctggttgtcagcctgttggctttgatgttagcttaaacagcagacttttgagtcccacaccgccacgtgcagtaaaagttcttagctggagcaatgcaatcaggtactttgagaggcttctgcatgatcttgatgtcatctgcgctttgtcgctcaatccggtgcttgataatgtgcttcactttattgtccagttccaaaaaacagtgccagatttggttcctagagcatttcttcagactttgttggtccaagatggtaaactttatggggaatacttcttttctgatgtcatttcaagggctttatcactaccggacattataggagataaggagtttcagatgaatgagtttgtggtgcagctaggtcagttggttatcaacctgataaaaattctttgtacaaacactgcatggcaacggcgcaagcttgggaagagtttgcaggattggagtactatttccatacagttggagcttgcactgaaaagagagtttggtgaaactagaaatgtcttgcagaatgagaatatgtgcatgagagtatcaaagcaacttcttatttggactcaggaacatgcatactgggttgcttttcggtttctcacattgggttttgaacttgacctatattctccgggcgaatacagtatggtgtactggtacatgtatgtggtgctcacaaagctaatagaaaagatgcagttacgagttctggccagtagtgaaacctcacgaagaaaggggaaaaagaagaaggatcatttgaaggattcagctcgggatatggcattttcgtcgtcttgtttattgcctcaatgctatcttttgctatcagagggactctcgatgatgctagctgtcctcagaaacgaaagtaggtcattccaattaccaagtatcttcaacactgaacaagagagattcatgcagcactttgatcttcttctgaaagctcgagtccctgagcacatttccttctacagtttcaaggaatcatcttcccgggcaggcatgtcggatttggtgaagtacaacttcttcaaggaaattcagaagatagtgccctcactacggggcagctttgcaagtgaaccagaaaaactcgctgaggtccgtcggatagagcaggtggctgagcacaacaggatagccctaaatattatcagccaagttggagctggcgatccgtctctgagggtctcgtttgagtttacacaccaccctcacttcgcagtggcagttgtgaagagatcatgattcaagtttggcatcgccaattctttacccttctcaatcttgatagtgatagcggatgattcttgttcacgtgttgctcacgtgtttattggttctccagagcgcaagcaacaccatgtgttttaggctgtacacaaacaccattagcaattttgtaggcaagataagaaaaaaaaaacatatgctggggaaaaaagtcctttcccctggcattattttgtaagcaaatttttttagctcactttgttatgcgaaacatgattatacagatgtgtaatttgagtcgtaattcgttactggtatgacaaggacgacaattttctct

SEQ ID NO: 214140 - DNA, 2375 bp, Zea Mays
ctcggccagcggctggttggctgtgccctggttcctcgtcctcctagtcaccacgcaaccagtaaaaacattcccccaatcccgaacccctccgccgccgccgccgccgccgccgccgtggccaaggagcaagaaagggacacggcctatcccttggtcgcggcgccagatctcgccgctgctcgcctctcatccatggaggcgagatcctcgtcgtccgcggccgcagtgccgccgcccctctccataccttcgtccagcgaccagtgcgtctgggctgacgcctcgccgctcctcgccgccgcgtgccgtgatctcgaggatggggaacttgtacatggagaaaactttagtctatttgctgcaatgtctgcattggaagaagaggatctctttactatgtcctttggtctgcctttgagagatgaaggtgatgataagtgcctgtcaattctaaactcagtcgaagagataatatctcgtcaattacgtgcatgtaaagcccaggcgttgtccaagaaaaaaacactagaaggtcttgaatcccttcaagataatcctgatctggaggaggattactgcagagctctgttatgcagattacgttttccatttctaccatgttattatgtgcatgaggaaacctcatggaagaggattggagttggcccggaagcatgttgcttcatgcttgacagagcttaatttgatgcataagtctcggaagtttctcaagtcccagtccagcactatggtacagcaaagtgatggaaactgcaccactgcatctggttgtcagcctgttggctttgatgttagcttaaacagcagacttttgagtcccacaccgccacgtgcagtaaaagttcttagctggagcaatgcaatcaggtactttgagaggcttctgcatgatcttgatgtcatctgcgctttgtcgctcaatccggtgcttgataatgtgcttcactttattgtccagttccaaaaaacagtgccagatttggttcctagagcatttcttcagactttgttggtccaagatggtaaactttatggggaatacttcttttctgatgtcatttcaagggctttatcactaccggacattataggagataaggagtttcagatgaatgagtttgtggtgcagctaggtcagttggttatcaacctgataaaaattctttgtacaaacactgcatggcaacggcgcaagcttgggaagagtttgcaggattggagtactatttccatacagttggagcttgcactgaaaagagagtttggtgaaactagaaatgtcttgcagaatgagaatatgtgcatgagagtatcaaagcaacttcttatttggactcaggaacatgcatactgggttgcttttcggtttctcacattgggttttgaacttgacctatattctccgggcgaatacagtatggtgtactggtacatgtatgtggtgctcacaaagctaatagaaaagatgcagttacgagttctggccagtagtgaaacctcacgaagaaaggggaaaaagaagaaggatcatttgaaggattcagctcgggatatggcattttcgtcgtcttgtttattgcctcaatgctatcttttgctatcagagggactctcgatgatgctagctgtcctcagaaacgaaagtaggtcattccaattaccaagtatcttcaacactgaacaagagagattcatgcagcactttgatcttcttctgaaagctcgagtccctgagcacatttccttctacagtttcaaggaatcatcttcccgggcaggcatgtcggatttggtgaagtacaacttcttcaaggaaattcagaagatagtgccctcactacggggcagctttgcaagtgaaccagaaaaactcgctgaggtccgtcggatagagcaggtggctgagcacaacaggatagccctaaatattatcagccaagttggagctggcgatccgtctctgagggtctcgtttgagtttacacaccaccctcacttcgcagtggcagttgtgaagagatcatgattcaagtttggcatcgccaattctttacccttctcaatcttgatagtgatagcggatgattcttgttcacgtgttgctcacgtgtttattggttctccagagcgcaagcaacaccatgtgttttaggctgtacacaaacaccattagcaattttgtaggcaagataagaaaaaaaaaacatatgctggggaaaaaagtcctttcccctggcattattttgtaagcaaatttttttagctcactttgttatgcgaaacatgattatacagatgtgtaatttgagtcgtaattcgttactggtatgacaaggacgacaattttctct

SEQ ID NO: 214141 - DNA, 2492 bp, Zea Mays
ctcggccagcggctggttggctgtgccctggttcctcgtcctcctagtcaccacgcaaccagtaaaaacattcccccaatcccgaacccctccgccgccgccgccgccgccgccgccgtggccaaggagcaagaaagggacacggcctatcccttggtcgcggcgccagatctcgccgctgctcgcctctcatccatggaggcgagatcctcgtcgtccgcggccgcagtgccgccgcccctctccataccttcgtccagcgaccagtgcgtctgggctgacgcctcgccgctcctcgccgccgcgtgccgtgatctcgaggatggggaacttgtacatggagaaaactttagtctatttgctgcaatgtctgcattggaaataatggatccaaaaatggattctggaattgagagaagtcgatacaactccattgatgaagcaatagaagatggtgttgccccaatcccacttagcttggacaggacacttgatgttcaacgctctattgatgtcatggatcatcttttctcatgcaacatggcacaaggggcacactctagctcagactgtatttacatgtatctaccttatgagaatggaaagaacttcatcgcatgctgtactaaatagcttttgcaggattttgcgtgctacttgtaatgctgtcatttctgctgtttctactgcccgaactcatgaggaagaggatctctttactatgtcctttggtctgcctttgagagatgaaggtgatgataagtgcctgtcaattctaaactcagtcgaagagataatatctcgtcaattacgtgcatgtaaagcccaggcgttgtccaagaaaaaaacactagaaggtcttgaatcccttcaagataatcctgatctggaggaggattactgcagagctctgttatgcagattacgttttccatttctaccatgttattatgtgcatgaggaaacctcatggaagaggattggagttggcccggaagcatgttgcttcatgcttgacagagcttaatttgatgcataagtctcggaagtttctcaagtcccagtccagcactatggtacagcaaagtgatggaaactgcaccactgcatctggttgtcagcctgttggctttgatgttagcttaaacagcagacttttgagtcccacaccgccacgtgcagtaaaagttcttagctggagcaatgcaatcaggtactttgagaggcttctgcatgatcttgatgtcatctgcgctttgtcgctcaatccggtgcttgataatgtgcttcactttattgtccagttccaaaaaacagtgccagatttggttcctagagcatttcttcagactttgttggtccaagatggtaaactttatggggaatacttcttttctgatgtcatttcaagggctttatcactaccggacattataggagataaggagtttcagatgaatgagtttgtggtgcagctaggtcagttggttatcaacctgataaaaattctttgtacaaacactgcatggcaacggcgcaagcttgggaagagtttgcaggattggagtactatttccatacagttggagcttgcactgaaaagagagtttggtgaaactagaaatgtcttgcagaatgagcacgaagaaaggggaaaaagaagaaggatcatttgaaggattcagctcgggatatggcattttcgtcgtcttgtttattgcctcaatgctatcttttgctatcagagggactctcgatgatgctagctgtcctcagaaacgaaagtaggtcattccaattaccaagtatcttcaacactgaacaagagagattcatgcagcactttgatcttcttctgaaagctcgagtccctgagcacatttccttctacagtttcaaggaatcatcttcccgggcaggcatgtcggatttggtgaagtacaacttcttcaaggaaattcagaagatagtgccctcactacggggcagctttgcaagtgaaccagaaaaactcgctgaggtccgtcggatagagcaggtggctgagcacaacaggatagccctaaatattatcagccaagttggagctggcgatccgtctctgagggtctcgtttgagtttacacaccaccctcacttcgcagtggcagttgtgaagagatcatgattcaagtttggcatcgccaattctttacccttctcaatcttgatagtgatagcggatgattcttgttcacgtgttgctcacgtgtttattggttctccagagcgcaagcaacaccatgtgttttaggctgtacacaaacaccattagcaattttgtaggcaagataagaaaaaaaaaacatatgctggggaaaaaagtcctttcccctggcattattttgtaagcaaatttttttagctcactttgttatgcgaaacatgattatacagatgtgtaatttgagtcgtaattcgttactggtatgacaaggacgacaattttctct

SEQ ID NO: 214142 - DNA, 4673 bp, Zea Mays
agtcggcactctcatctccactctcccccaaaaccctataggctatagcggcagggagaaagtgagcacccacctcaacccgcccgccgccatggcgctccgccgcatcacaccgcggaggagacccgttctccccgtcccccgtgccttctcctcgagtccgccgtttcctccacccccgcctccggcgaacgaccccgaccccgacgccgcccaacccccatcctcttctccgccccctaattccggcgcgccgcggaacccggagtcctcgttcttccaggacatcaaagatcgcctccgttcgtctcccacgtctccgtctccgcgccggatcccgacgaccctgccccgccccgaccctgcgcgcggcgctccttcttcgggaccgcccattggagacatccgccggatgctccagaacttccgcttaaccggctcaaccagcgacgcgccctccacctccgctcccggatccaacccctccttcatggacctgctcaagaaccacttggaccagggtgccaacgcccggcaggcggagctcggcttcaatgccatcggagagagcctcaagcgcccccgtccgccgaagccttttataaccccttcgtcgagaaacatcttctgccgggagctagagaggacctcgaaggctttaggtgcgcggcaggaagagaatggctctgccattgagcttaaggggagctacagctacgaagagcttgggaagagactaggggagctgcggccggcgggtgcaggtaaagacggtaaggagtggttctcgctcaaggagctgcaggggcgtatcgccaagctcgcggagcaggagagccagcttgccgggccgttttcggaaatgcggcggggcattaggaacctgcagaaacaaggaaaaccgggtcggcctgtaaacatccaagcactgctgaaccctgtcggtcagccgacgccagactacatgagtgggcctccgcaggtggaattgttagagaagtacttccatccagatcatatgtcatccgaagagaagatgaaattggagctccaaagggtgagggacgaattcaagatgtccgagaatgactgtggttctgcacgagttcaaattgcccagctgactctgaaaatcaagcatctgtcaactgttctacacaagaaggataaacattctagaaaggggcttcaggagatggtccaaaggaggaagaaatacctgaaatacttgcgaaggacggactgggactcttactgtcttgttctgtcaaagctggggcttcgcgatgtgcccgagtacaaagctcctgactacaagagcaaagcaaccaccaaggccaaatctaagaagagcaagagcaagggcaagaagaggaaggtgaaggcataaaagtagcgaacaaatatgccctgtttttggtcttgaattgcatgctcagaaaatgaatcgagaagacgctcaggcctgagatggcttgatccaatcttgcaatgctgttttttttgcatggtcagaaaataaatcgagaagacgctcaggccccaattggctcgatccaatcttgtaatgttgttttcgaagctgtttgtaataaccatttcactgattcggtccagccttcaaacaatcgccttttagttctccccctcaatttgcgagaacggatgtggagtaaccgacactagtactataccgttgcattatcaccagtttgtaactttaccagaattcttgtttgtccttgacgtaatttggacaaatttcttgtacaaaaaatacatgaaccatatgtcaggcttgctagcttagcacgaatacgatactgtgtttggccgtatcgtgaagatcggagcggcaagacgtgttagatttggaaaaaaatcatatagattagttttaaaaactgtttttaaaaatgtttaaattataaaaagatcttatttttgaaggccgcgacccgacctgcggtcctcggccagcggctggttggctgtgccctggttcctcgtcctcctagtcaccacgcaaccagtaaaaacattcccccaatcccgaacccctccgccgccgccgccgccgccgccgccgtggccaaggagcaagaaagggacacggcctatcccttggtcgcggcgccagatctcgccgctgctcgcctctcatccatggaggcgagatcctcgtcgtccgcggccgcagtgccgccgcccctctccataccttcgtccagcgaccagtgcgtctgggctgacgcctcgccgctcctcgccgccgcgtgccgtgatctcgaggatggggaacttgtacatggagaaaactttagtctatttgctgcaatgtctgcattggaaataatggatccaaaaatggattctggaattgagagaagtcgatacaactccattgatgaagcaatagaagatggtgttgccccaatcccacttagcttggacaggacacttgatgttcaacgctctattgatgtcatggatcatcttttctcatgtgaggcaacatggcacaaggggcacactctagctcagactgtatttacatgtatctaccttatgagaatggaaagaacttcatcgcatgctgtactaaatagcttttgcaggattttgcgtgctacttgtaatgctgtcatttctgctgtttctactgcccgaactcatgaggaagaggatctctttactatgtcctttggtctgcctttgagagatgaaggtgatgataagtgcctgtcaattctaaactcagtcgaagagataatatctcgtcaattacgtgcatgtaaagcccaggcgttgtccaagaaaaaaacactagaaggtcttgaatcccttcaagataatcctgatctggaggaggattactgcagagctctgttatgcagattacgttttccatttctaccatgttattatgtgcatgaggaaacctcatggaagaggattggagttggcccggaagcatgttgcttcatgcttgacagagcttaatttgatgcataagtctcggaagtttctcaagtcccagtccagcactatggtacagcaaagtgatggaaactgcaccactgcatctggttgtcagcctgttggctttgatgttagcttaaacagcagacttttgagtcccacaccgccacgtgcagtaaaagttcttagctggagcaatgcaatcaggtactttgagaggcttctgcatgatcttgatgtcatctgcgctttgtcgctcaatccggtgcttgataatgtgcttcactttattgtccagttccaaaaaacagtgccagatttggttcctagagcatttcttcagactttgttggtccaagatggtaaactttatggggaatacttcttttctgatgtcatttcaagggctttatcactaccggacattataggagataaggagtttcagatgaatgagtttgtggtgcagctaggtcagttggttatcaacctgataaaaattctttgtacaaacactgcatggcaacggcgcaagcttgggaagagtttgcaggattggagtactatttccatacagttggagcttgcactgaaaagagagtttggtgaaactagaaatgtcttgcagaatgagaatatgtgcatgagagtatcaaagcaacttcttatttggactcaggaacatgcatactgggttgcttttcggtttctcacattgggttttgaacttgacctatattctccgggcgaatacagtatggtgtactggtacatgtatgtggtgctcacaaagctaatagaaaagatgcagttacgagttctggccagtagtgaaacctcacgaagaaaggggaaaaagaagaaggatcatttgaaggattcagctcgggatatggcattttcgtcgtcttgtttattgcctcaatgctatcttttgctatcagagggactctcgatgatgctagctgtcctcagaaacgaaagtaggtcattccaattaccaagtatcttcaacactgaacaagagagattcatgcagcactttgatcttcttctgaaagctcgagtccctgagcacatttccttctacagtttcaaggaatcatcttcccgggcaggcatgtcggatttggtgaagtacaacttcttcaaggaaattcagaagatagtgccctcactacggggcagctttgcaagtgaaccagaaaaactcgctgaggtccgtcggatagagcaggtggctgagcacaacaggatagccctaaatattatcagccaagttggagctggcgatccgtctctgagggtctcgtttgagtttacacaccaccctcacttcgcagtggcagttgtgaagagatcatgattcaagtttggcatcgccaattctttacccttctcaatcttgatagtgatagcggatgattcttgttcacgtgttgctcacgtgtttattggttctccagagcgcaagcaacaccatgtgttttaggctgtacacaaacaccattagcaattttgtaggcaagataagaaaaaaaaaacatatgctggggaaaaaagtcctttcccctggcattattttgtaagcaaatttttttagctcactttgttatgcgaaacatgattatacagatgtgtaatttgagtcgtaattcgttactggtatgacaaggacgacaattttctct

SEQ ID NO: 214143 - DNA, 4678 bp, Zea Mays
agtcggcactctcatctccactctcccccaaaaccctataggctatagcggcagggagaaagtgagcacccacctcaacccgcccgccgccatggcgctccgccgcatcacaccgcggaggagacccgttctccccgtcccccgtgccttctcctcgagtccgccgtttcctccacccccgcctccggcgaacgaccccgaccccgacgccgcccaacccccatcctcttctccgccccctaattccggcgcgccgcggaacccggagtcctcgttcttccaggacatcaaagatcgcctccgttcgtctcccacgtctccgtctccgcgccggatcccgacgaccctgccccgccccgaccctgcgcgcggcgctccttcttcgggaccgcccattggagacatccgccggatgctccagaacttccgcttaaccggctcaaccagcgacgcgccctccacctccgctcccggatccaacccctccttcatggacctgctcaagaaccacttggaccagggtgccaacgcccggcaggcggagctcggcttcaatgccatcggagagagcctcaagcgcccccgtccgccgaagccttttataaccccttcgtcgagaaacatcttctgccgggagctagagaggacctcgaaggctttaggtgcgcggcaggaagagaatggctctgccattgagcttaaggggagctacagctacgaagagcttgggaagagactaggggagctgcggccggcgggtgcaggtaaagacggtaaggagtggttctcgctcaaggagctgcaggggcgtatcgccaagctcgcggagcaggagagccagcttgccgggccgttttcggaaatgcggcggggcattaggaacctgcagaaacaaggaaaaccgggtcggcctgtaaacatccaagcactgctgaaccctgtcggtcagccgacgccagactacatgagtgggcctccgcaggtggaattgttagagaagtacttccatccagatcatatgtcatccgaagagaagatgaaattggagctccaaagggtgagggacgaattcaagatgtccgagaatgactgtggttctgcacgagttcaaattgcccagctgactctgaaaatcaagcatctgtcaactgttctacacaagaaggataaacattctagaaaggggcttcaggagatggtccaaaggaggaagaaatacctgaaatacttgcgaaggacggactgggactcttactgtcttgttctgtcaaagctggggcttcgcgatgtgcccgagtacaaagctcctgactacaagagcaaagcaaccaccaaggccaaatctaagaagagcaagagcaagggcaagaagaggaaggtgaaggcataaaagtagcgaacaaatatgccctgtttttggtcttgaattgcatgctcagaaaatgaatcgagaagacgctcaggcctgagatggcttgatccaatcttgcaatgctgttttttttgcatggtcagaaaataaatcgagaagacgctcaggccccaattggctcgatccaatcttgtaatgttgttttcgaagctgtttgtaataaccatttcactgattcggtccagccttcaaacaatcgccttttagttctccccctcaatttgcgagaacggatgtggagtaaccgacactagtactataccgttgcattatcaccagtttgtaactttaccagaattcttgtttgtccttgacgtaatttggacaaatttcttgtacaaaaaatacatgaaccatatgtcaggcttgctagcttagcacgaatacgatactgtgtttggccgtatcgtgaagatcggagcggcaagacgtgttagatttggaaaaaaatcatatagattagttttaaaaactgtttttaaaaatgtttaaattataaaaagatcttatttttgaaggccgcgacccgacctgcggtcctcggccagcggctggttggctgtgccctggttcctcgtcctcctagtcaccacgcaaccagtaaaaacattcccccaatcccgaacccctccgccgccgccgccgccgccgccgccgtggccaaggagcaagaaagggacacggcctatcccttggtcgcggcgccagatctcgccgctgctcgcctctcatccatggaggcgagatcctcgtcgtccgcggccgcagtgccgccgcccctctccataccttcgtccagcgaccagtgcgtctgggctgacgcctcgccgctcctcgccgccgcgtgccgtgatctcgaggatggggaacttgtacatggagaaaactttagtctatttgctgcaatgtctgcattggaaataatggatccaaaaatggattctggaattgagagaagtcgatacaactccattgatgaagcaatagaagatggtgttgccccaatcccacttagcttggacaggacacttgatgttcaacgctctattgatgtcatggatcatcttttctcatgtgaggcaacatggcacaaggggcacactctagctcagactgtatttacatgtatctaccttatgagaatggaaagaacttcatcgcatgctgtactaaatagcttttgcaggattttgcgtgctacttgtaatgctgtcatttctgctgtttctactgcccgaactcatgaggaagaggatctctttactatgtcctttggtctgcctttgagagatgaaggtgatgataagtgcctgtcaattctaaactcagtcgaagagataatatctcgtcaattacgtgcatgtaaagcccaggcgttgtccaagaaaaaaacactagaaggtcttgaatcccttcaagataatcctgatctggaggaggattactgcagagctctgttatgcagattacgttttcgtaagcatttctaccatgttattatgtgcatgaggaaacctcatggaagaggattggagttggcccggaagcatgttgcttcatgcttgacagagcttaatttgatgcataagtctcggaagtttctcaagtcccagtccagcactatggtacagcaaagtgatggaaactgcaccactgcatctggttgtcagcctgttggctttgatgttagcttaaacagcagacttttgagtcccacaccgccacgtgcagtaaaagttcttagctggagcaatgcaatcaggtactttgagaggcttctgcatgatcttgatgtcatctgcgctttgtcgctcaatccggtgcttgataatgtgcttcactttattgtccagttccaaaaaacagtgccagatttggttcctagagcatttcttcagactttgttggtccaagatggtaaactttatggggaatacttcttttctgatgtcatttcaagggctttatcactaccggacattataggagataaggagtttcagatgaatgagtttgtggtgcagctaggtcagttggttatcaacctgataaaaattctttgtacaaacactgcatggcaacggcgcaagcttgggaagagtttgcaggattggagtactatttccatacagttggagcttgcactgaaaagagagtttggtgaaactagaaatgtcttgcagaatgagaatatgtgcatgagagtatcaaagcaacttcttatttggactcaggaacatgcatactgggttgcttttcggtttctcacattgggttttgaacttgacctatattctccgggcgaatacagtatggtgtactggtacatgtatgtggtgctcacaaagctaatagaaaagatgcagttacgagttctggccagtagtgaaacctcacgaagaaaggggaaaaagaagaaggatcatttgaaggattcagctcgggatatggcattttcgtcgtcttgtttattgcctcaatgctatcttttgctatcagagggactctcgatgatgctagctgtcctcagaaacgaaagtaggtcattccaattaccaagtatcttcaacactgaacaagagagattcatgcagcactttgatcttcttctgaaagctcgagtccctgagcacatttccttctacagtttcaaggaatcatcttcccgggcaggcatgtcggatttggtgaagtacaacttcttcaaggaaattcagaagatagtgccctcactacggggcagctttgcaagtgaaccagaaaaactcgctgaggtccgtcggatagagcaggtggctgagcacaacaggatagccctaaatattatcagccaagttggagctggcgatccgtctctgagggtctcgtttgagtttacacaccaccctcacttcgcagtggcagttgtgaagagatcatgattcaagtttggcatcgccaattctttacccttctcaatcttgatagtgatagcggatgattcttgttcacgtgttgctcacgtgtttattggttctccagagcgcaagcaacaccatgtgttttaggctgtacacaaacaccattagcaattttgtaggcaagataagaaaaaaaaaacatatgctggggaaaaaagtcctttcccctggcattattttgtaagcaaatttttttagctcactttgttatgcgaaacatgattatacagatgtgtaatttgagtcgtaattcgttactggtatgacaaggacgacaattttctct

SEQ ID NO: 214144 - DNA, 1642 bp, Zea Mays
aatagcgttcagtccccactccccactcctcactctcgcggtcgcggcctcaccggtcactgcttctcgaaccgccgggagctggaatcgcctccatagggaactgctctaatgcccgcggcgatctggaggcggccgcccgcccacctaggccacgtgcgatggtgaggtcgaggcctagggtttggctagtggcgggctgcgccgccgtcctgctgtgggcctccgtcgcgcagctcgtcgccgtcggccgccttctcctcctttttggcctcgcgggcgacgcggtttcatcgccgccacctactgcgcttccgcccccgagaatatacaagagcaatggttatctgaagatatcttgtaatgggggtctgaatcagatgcgctcagagatatgtgacatggtagcagttgctcgccttctaaacctcactatggttgtcccagaacttgacaagagatcattctgggctgatcaaagtaattttggggacatatttgacgtgaagcattttattgactcattgagagatgaggtccacatcattgaacagcttccggagaagcttggtccaagagattcagacattattatacttgaaatgtcacctgtgagctggtcagatgaaaaatattacttgcatcagatcttaccactgttcagcaaatacagtgtcatccattttaacaaaacagatgctcgcttagccaataatgggaatgaactggtacataaactgcgagccaagggatcatttgtagccttgcatttacgttatgagatggatatgctggcgttttctggttgcaaccatggcctttcacctgaagaagctgaggagctcaaaaaaatgagatatgcttatccatggtggagagataaagaaattgattcccaagccaagaggttgcaaggactatgcccacttactcccgaggaggcatcacttgttttgaaagctcttggatttcaaaaggatgctcttatatacatcgcagctggggaaatttatgggggagataggagactagagccactacgggctgcttttccaaaccttgtacgaaaggtgatgctgctaaactctgaagttctgcgtcaattccaaaatcactcttcccagatggctgcacttgatttcattgtatccacagctagtgatgttttcattcccactttcgatggtaacatggcaaaacttgttgaaggtcaccgaaggttcctgggtttccggagaagtgtggtgctagaccgacggaaattagttgaacttctagacctgtacaccaacaagacaatgtcttgggacaattttgcatcttctgttcaggaagcacataagaactgtgtagctcagccatcctgcaggcgagaacttaaaaacagaccaaaagaagaggattacttctatgctaacccccacgaatgcctagccaattcaaccttgtgcagctaaactgagtttctggtttctttaaggtaaccaggtgggcgtgaaatcatttccgagcacgcagtggctcacagtcgttttggtgtcgtgttgtcaagggaccgagccagcttacacggagcatcacatatcttttggctttacattccttatttcactgttatatagttagacttggcgtaagatgg

SEQ ID NO: 214145 - DNA, 2005 bp, Zea Mays
tttctctctctcgtgttcaaaattattcaaagctgtggttgaaagctgtggttttgcccagctgctagcaacccagcaggtgaaggagaatggcgggaggtggcacgggcatcaggaaatacatgggggctcttaaggacaccacaacagtcagcatagcaaaagtaaacagcgattacaaggagctggacattgctattgtgaaggccacaaaccatgtcgagaatccaacaaaggagaaatacgtgagagatatcttttaccatctttcacccggaaggcctcgggcagatgtcgcctactgcatccgcgcccttggtagacgtctttcaaagacacgcaattgggcggttgctatgaagacattaattgtcatacaccgtgctcttcgggaagttgatcctgctttccgtgaagagcttattagttatggaagatctagctcccatatgctctatctgtcatactttaaggacgattctagcgcagaagcttgggattactctgcttgggtgcgcaattatgctttatatttggaggagaaacttgaatcattccgtgtactgaactatgatgttgaaaaggatccgttgcaaattcgggatcttgatacaaatggattgctcgatcagttgccagctttacagcagcttcttttccgactacttggttgccagccacaaggggcgtcatcttataacgtcataattcagcatgcactttcaatggttgctctagagagtgttaggatccaaacagccatcaatgacgggatactcaatcttgttgacaagttctttgagatgcagagagatgacgcaataagggcactgggcatgtatagaagagcaatcgagcaggcagaacaactttcagaattttatgaagtgtgtaaaagtatacatattgggcggggtgagagattcctaaaaatcgaacagccgcctgcatccttcttggcgactatggaggaatatgtgagcaatgctccccttgcttcaacagttcaaagaaatcaggctgtactggccatagaggacagcaaaaaatcagaagttgaagaatcacaaccaacgctgcctcctccccactctccagctcaagaatctgggcctgagccagttcaacaagtcccacctgcagctgatccaacagatttactgggaatcaatgaaccaacccctgccacatctgaaatagatcaaaagaatgcgggggccttggccatggttccacaggataatgcgccaaaagcacctgcttctactaccagttctggaagtgtggagactagctgggagctggccttggtcactgcacccagttcaaatgggactgctgtcactccaagcaaattggccggtgggctggacttgcttacactcgacagcttgtacaacgaggcgcaccgaagagcgcagcagaacgcaagctacaacccttgggagaccaatccagcgtcaggcccagtgatgcagcagcaaatgtacgacccgttctacgcctccaatcaccccgtggccgcagcccgcaacgtccagatggctgccatggagcagcagcagcaacaacaacatgccttcgtgctccagcagcagcagcagcagcagatgattgtgatgatgatggcacagcagcagcagcagcaagcttcttccaatccgttgtatacggccgccgccgcccacacgtatggtgcaggggtgcagctccacgcgggcaacgcgtactctggagctgggatgatgtaagcgttgcacagaacctgctgtctggttctgaccggcatcttccgttctttcttgttttttctcattattttcttgcatttttttttacattgtaagaactgtgttagggctagaactagaaatctgatatagcatcaatatgagcacattcttgatgttcatgaccaataatggtcgatgcgatgatggctttgaactgaagcactaaaatagtatcgatccttgcaaatttaggacttgtttggtagggctct

SEQ ID NO: 214146 - DNA, 1975 bp, Zea Mays
tggagaccgtttatctgttccgaagccccagctgctagcaacccagcaggtgaaggagaatggcgggaggtggcacgggcatcaggaaatacatgggggctcttaaggacaccacaacagtcagcatagcaaaagtaaacagcgattacaaggagctggacattgctattgtgaaggccacaaaccatgtcgagaatccaacaaaggagaaatacgtgagagatatcttttaccatctttcacccggaaggcctcgggcagatgtcgcctactgcatccgcgcccttggtagacgtctttcaaagacacgcaattgggcggttgctatgaagacattaattgtcatacaccgtgctcttcgggaagttgatcctgctttccgtgaagagcttattagttatggaagatctagctcccatatgctctatctgtcatactttaaggacgattctagcgcagaagcttgggattactctgcttgggtgcgcaattatgctttatatttggaggagaaacttgaatcattccgtgtactgaactatgatgttgaaaaggatccgttgcaaattcgggatcttgatacaaatggattgctcgatcagttgccagctttacagcagcttcttttccgactacttggttgccagccacaaggggcgtcatcttataacgtcataattcagcatgcactttcaatggttgctctagagagtgttaggatccaaacagccatcaatgacgggatactcaatcttgttgacaagttctttgagatgcagagagatgacgcaataagggcactgggcatgtatagaagagcaatcgagcaggcagaacaactttcagaattttatgaagtgtgtaaaagtatacatattgggcggggtgagagattcctaaaaatcgaacagccgcctgcatccttcttggcgactatggaggaatatgtgagcaatgctccccttgcttcaacagttcaaagaaatcaggctgtactggccatagaggacagcaaaaaatcagaagttgaagaatcacaaccaacgctgcctcctccccactctccagctcaagaatctgggcctgagccagttcaacaagtcccacctgcagctgatccaacagatttactgggaatcaatgaaccaacccctgccacatctgaaatagatcaaaagaatgcgggggccttggccatggttccacaggataatgcgccaaaagcacctgcttctactaccagttctggaagtgtggagactagctgggagctggccttggtcactgcacccagttcaaatgggactgctgtcactccaagcaaattggccggtgggctggacttgcttacactcgacagcttgtacaacgaggcgcaccgaagagcgcagcagaacgcaagctacaacccttgggagaccaatccagcgtcaggcccagtgatgcagcagcaaatgtacgacccgttctacgcctccaatcaccccgtggccgcagcccgcaacgtccagatggctgccatggagcagcagcagcaacaacaacatgccttcgtgctccagcagcagcagcagcagcagatgattgtgatgatgatggcacagcagcagcagcagcaagcttcttccaatccgttgtatacggccgccgccgcccacacgtatggtgcaggggtgcagctccacgcgggcaacgcgtactctggagctgggatgatgtaagcgttgcacagaacctgctgtctggttctgaccggcatcttccgttctttcttgttttttctcattattttcttgcatttttttttacattgtaagaactgtgttagggctagaactagaaatctgatatagcatcaatatgagcacattcttgatgttcatgaccaataatggtcgatgcgatgatggctttgaactgaagcactaaaatagtatcgatccttgcaaatttaggacttgtttggtagggctct

SEQ ID NO: 214147 - DNA, 2096 bp, Zea Mays
acacgcctccttccttccttcctagcccttccgtcctgtccagactccagactccctccacaccagtagggactagggaggacgccgccactgcgacctgccggcagacgtctgccccctgcttccggcatccggactcccctgcgccgcagttacgttacgccggcgatctcctcggctcaacccggggcctttctctctgcgccccgccagcccagctgctagcaacccagcaggtgaaggagaatggcgggaggtggcacgggcatcaggaaatacatgggggctcttaaggacaccacaacagtcagcatagcaaaagtaaacagcgattacaaggagctggacattgctattgtgaaggccacaaaccatgtcgagaatccaacaaaggagaaatacgtgagagatatcttttaccatctttcacccggaaggcctcgggcagatgtcgcctactgcatccgcgcccttggtagacgtctttcaaagacacgcaattgggcggttgctatgaagacattaattgtcatacaccgtgctcttcgggaagttgatcctgctttccgtgaagagcttattagttatggaagatctagctcccatatgctctatctgtcatactttaaggacgattctagcgcagaagcttgggattactctgcttgggtgcgcaattatgctttatatttggaggagaaacttgaatcattccgtgtactgaactatgatgttgaaaaggatccgttgcaaattcgggatcttgatacaaatggattgctcgatcagttgccagctttacagcagcttcttttccgactacttggttgccagccacaaggggcgtcatcttataacgtcataattcagcatgcactttcaatgttctttgagatgcagagagatgacgcaataagggcactgggcatgtatagaagagcaatcgagcaggcagaacaactttcagaattttatgaagtgtgtaaaagtatacatattgggcggggtgagagattcctaaaaatcgaacagccgcctgcatccttcttggcgactatggaggaatatgtgagcaatgctccccttgcttcaacagttcaaagaaatcaggctgtactggccatagaggacagcaaaaaatcagaagttgaagaatcacaaccaacgctgcctcctccccactctccagctcaagaatctgggcctgagccagttcaacaagtcccacctgcagctgatccaacagatttactgggaatcaatgaaccaacccctgccacatctgaaatagatcaaaagaatgcgggggccttggccatggttccacaggataatgcgccaaaagcacctgcttctactaccagttctggaagtgtggagactagctgggagctggccttggtcactgcacccagttcaaatgggactgctgtcactccaagcaaattggccggtgggctggacttgcttacactcgacagcttgtacaacgaggcgcaccgaagagcgcagcagaacgcaagctacaacccttgggagaccaatccagcgtcaggcccagtgatgcagcagcaaatgtacgacccgttctacgcctccaatcaccccgtggccgcagcccgcaacgtccagatggctgccatggagcagcagcagcaacaacaacatgccttcgtgctccagcagcagcagcagcagcagatgattgtgatgatgatggcacagcagcagcagcagcaagcttcttccaatccgttgtatacggccgccgccgcccacacgtatggtgcaggggtgcagctccacgcgggcaacgcgtactctggagctgggatgatgtaagcgttgcacagaacctgctgtctggttctgaccggcatcttccgttctttcttgttttttctcattattttcttgcatttttttttacattgtaagaactgtgttagggctagaactagaaatctgatatagcatcaatatgagcacattcttgatgttcatgaccaataatggtcgatgcgatgatggctttgaactgaagcactaaaatagtatcgatccttgcaaatttaggacttgtttggtagggctct

SEQ ID NO: 214148 - DNA, 2100 bp, Zea Mays
acacgcctccttccttccttcctagcccttccgtcctgtccagactccagactccctccacaccagtagggactagggaggacgccgccactgcgacctgccggcagacgtctgccccctgcttccggcatccggactcccctgcgccgcacccagctgctagcaacccagcaggtgaaggagaatggcgggaggtggcacgggcatcaggaaatacatgggggctcttaaggacaccacaacagtcagcatagcaaaagtaaacagcgattacaaggagctggacattgctattgtgaaggccacaaaccatgtcgagaatccaacaaaggagaaatacgtgagagatatcttttaccatctttcacccggaaggcctcgggcagatgtcgcctactgcatccgcgcccttggtagacgtctttcaaagacacgcaattgggcggttgctatgaagacattaattgtcatacaccgtgctcttcgggaagttgatcctgctttccgtgaagagcttattagttatggaagatctagctcccatatgctctatctgtcatactttaaggacgattctagcgcagaagcttgggattactctgcttgggtgcgcaattatgctttatatttggaggagaaacttgaatcattccgtgtactgaactatgatgttgaaaaggatccgttgcaaattcgggatcttgatacaaatggattgctcgatcagttgccagctttacagcagcttcttttccgactacttggttgccagccacaaggggcgtcatcttataacgtcataattcagcatgcactttcaatggttgctctagagagtgttaggatccaaacagccatcaatgacgggatactcaatcttgttgacaagttctttgagatgcagagagatgacgcaataagggcactgggcatgtatagaagagcaatcgagcaggcagaacaactttcagaattttatgaagtgtgtaaaagtatacatattgggcggggtgagagattcctaaaaatcgaacagccgcctgcatccttcttggcgactatggaggaatatgtgagcaatgctccccttgcttcaacagttcaaagaaatcaggctgtactggccatagaggacagcaaaaaatcagaagttgaagaatcacaaccaacgctgcctcctccccactctccagctcaagaatctgggcctgagccagttcaacaagtcccacctgcagctgatccaacagatttactgggaatcaatgaaccaacccctgccacatctgaaatagatcaaaagaatgcgggggccttggccatggttccacaggataatgcgccaaaagcacctgcttctactaccagttctggaagtgtggagactagctgggagctggccttggtcactgcacccagttcaaatgggactgctgtcactccaagcaaattggccggtgggctggacttgcttacactcgacagcttgtacaacgaggcgcaccgaagagcgcagcagaacgcaagctacaacccttgggagaccaatccagcgtcaggcccagtgatgcagcagcaaatgtacgacccgttctacgcctccaatcaccccgtggccgcagcccgcaacgtccagatggctgccatggagcagcagcagcaacaacaacatgccttcgtgctccagcagcagcagcagcagcagatgattgtgatgatgatggcacagcagcagcagcagcaagcttcttccaatccgttgtatacggccgccgccgcccacacgtatggtgcaggggtgcagctccacgcgggcaacgcgtactctggagctgggatgatgtaagcgttgcacagaacctgctgtctggttctgaccggcatcttccgttctttcttgttttttctcattattttcttgcatttttttttacattgtaagaactgtgttagggctagaactagaaatctgatatagcatcaatatgagcacattcttgatgttcatgaccaataatggtcgatgcgatgatggctttgaactgaagcactaaaatagtatcgatccttgcaaatttaggacttgtttggtagggctct

SEQ ID NO: 214149 - DNA, 2157 bp, Zea Mays
acacgcctccttccttccttcctagcccttccgtcctgtccagactccagactccctccacaccagtagggactagggaggacgccgccactgcgacctgccggcagacgtctgccccctgcttccggcatccggactcccctgcgccgcagttacgttacgccggcgatctcctcggctcaacccggggcctttctctctgcgccccgccagctgctagcaacccagcaggtgaaggagaatggcgggaggtggcacgggcatcaggaaatacatgggggctcttaaggacaccacaacagtcagcatagcaaaagtaaacagcgattacaaggagctggacattgctattgtgaaggccacaaaccatgtcgagaatccaacaaaggagaaatacgtgagagatatcttttaccatctttcacccggaaggcctcgggcagatgtcgcctactgcatccgcgcccttggtagacgtctttcaaagacacgcaattgggcggttgctatgaagacattaattgtcatacaccgtgctcttcgggaagttgatcctgctttccgtgaagagcttattagttatggaagatctagctcccatatgctctatctgtcatactttaaggacgattctagcgcagaagcttgggattactctgcttgggtgcgcaattatgctttatatttggaggagaaacttgaatcattccgtgtactgaactatgatgttgaaaaggatccgttgcaaattcgggatcttgatacaaatggattgctcgatcagttgccagctttacagcagcttcttttccgactacttggttgccagccacaaggggcgtcatcttataacgtcataattcagcatgcactttcaatggttgctctagagagtgttaggatccaaacagccatcaatgacgggatactcaatcttgttgacaagttctttgagatgcagagagatgacgcaataagggcactgggcatgtatagaagagcaatcgagcaggcagaacaactttcagaattttatgaagtgtgtaaaagtatacatattgggcggggtgagagattcctaaaaatcgaacagccgcctgcatccttcttggcgactatggaggaatatgtgagcaatgctccccttgcttcaacagttcaaagaaatcaggctgtactggccatagaggacagcaaaaaatcagaagttgaagaatcacaaccaacgctgcctcctccccactctccagctcaagaatctgggcctgagccagttcaacaagtcccacctgcagctgatccaacagatttactgggaatcaatgaaccaacccctgccacatctgaaatagatcaaaagaatgcgggggccttggccatggttccacaggataatgcgccaaaagcacctgcttctactaccagttctggaagtgtggagactagctgggagctggccttggtcactgcacccagttcaaatgggactgctgtcactccaagcaaattggccggtgggctggacttgcttacactcgacagcttgtacaacgaggcgcaccgaagagcgcagcagaacgcaagctacaacccttgggagaccaatccagcgtcaggcccagtgatgcagcagcaaatgtacgacccgttctacgcctccaatcaccccgtggccgcagcccgcaacgtccagatggctgccatggagcagcagcagcaacaacaacatgccttcgtgctccagcagcagcagcagcagcagatgattgtgatgatgatggcacagcagcagcagcagcaagcttcttccaatccgttgtatacggccgccgccgcccacacgtatggtgcaggggtgcagctccacgcgggcaacgcgtactctggagctgggatgatgtaagcgttgcacagaacctgctgtctggttctgaccggcatcttccgttctttcttgttttttctcattattttcttgcatttttttttacattgtaagaactgtgttagggctagaactagaaatctgatatagcatcaatatgagcacattcttgatgttcatgaccaataatggtcgatgcgatgatggctttgaactgaagcactaaaatagtatcgatccttgcaaatttaggacttgtttggtagggctct

SEQ ID NO: 214150 - DNA, 1091 bp, Zea Mays
ccagagtgcgtccaactcggcgcgagtcatccttatagaatcacctctccgcctccaagcgccagtcgccgcctctccccactccctctcgtcgccgtcctctcccgttcgcaacgccacgctccccaccgccgaaatggccccgaagcgaggtggcagggcaccggtgccggccaagaagaagacggataaagtgacgaaccctctgttcgagaaaaggccgaagcagttcggcatcggcggcgcgttgcctcccaagaaggacctgcaccgattcgtcaagtggcccaaggtcgtgcgcatccagcgccagcgtcgcatcctcaagcagcgcctcaaggtgcctccggcgctcaaccagttcacccgcaccctcgacaagaacctcgctaccaacctgttcaagatgcttcttaagtaccggcccgaagacaaggctgccaagaaggagaggcttctgaagagggcccaggctgagaatgaaggaaaaactgttgaatccaagaaaccaattgttgtgaagtatggccttaaccatgtgacttacctcattgagcagaacaaggctcagctcgttgtcatcgctcatgatgtggatccgattgaactggttgtttggcttccagccctgtgcaggaagatggaggtcccatactgcattgttaaaggaaaggctcgccttggatcgatcgttcacaagaagactgcatcagtcttgtgtctgaccactgtcaagaacgaggacaagcttgagttcagcaagatcttggaggctattaaggcgaacttcaatgacaagtttgatgaagtcaggaagaagtggggaggtggcatcatgggctccaagtcgcaggccaagaccaaggccagggaaaagttgctggccaaggaggccgcccagcggatgacgtagattatccactgttgagtttgcccctgtagtttgacgtggaagaaccgatgagcattgtgcactcgtattgtgtttttttgaatctactttcatatgtttctgtccatcagaccgtgtttagaaactttggaagacagttctacagtgtttgtgcaatgtcttatatcgaaaaaaaaga

SEQ ID NO: 214151 - DNA, 4419 bp, Zea Mays
atgagatatttgcgctatatctcgacgaggaatgtcatgcctgagtggcctccagctgatagagccctcacattagattgtgttattttgaggatggttccaaattttcatggccaaggtggtttccgtccaatattcaggatatacggcccggatcatctcatgccccctgatcagactccaaaagttcttttttcaactccaaagaaaagcaaccttgtccgtttttattcacagatgaactggtgaaaatagaccttcaatgtcatgtccaaggtgatattgtcctagagtgtatccatctgtatgaggatctggatcgtgaagagatggttttccgaatcatgttcaatacagcattcatccggtcaaacatcttgatgcttaaccgtgatcacatagacatgttatggaatgcaaaagaccaattccctaaagattttcggtttgaggttatcttttccgatatggacatagttacttcacatgtcacaacagagcctgttattcatcaagagaaacaaggacttggggttgaagagtttgctaaggtgctagatatctttaaccatttggactggttggatgggaaaaaagacaccgtacctcacacaacccagctaaagatctcagcgattaccgatgaacctgagactttctttgatactcgtgaagaacttgaatctgaaagttcttctggtgaaatttattcttctagtgttgttctgaaggtcggaaatgaattggatatgcttgtcagcactaaaccgagacatattccccaagattcaagttcagctaatgttcaatccaaatcacaaactacagtgcagtctccttcgcgaatgcggcgcacagcattgttatcaccttctaaggttaaggtttcaaagaccagtgcttcaccaatggaactgtcttcaagtacaatcatgccacaacaatcatcttcgccggttcagcctcggcgagtgatgtctgactctgcagtaaaatttttatcagagataacagaatcagcatcaggtgagatgtcttgttcacaaactccagttgaacatgaaccttcctctctgatggaaaacaatccagcaccaacagcatctctgttacctttgtgcacacctcctcctcttcctccccctccacccactgtctctttactccctgttcccactaagttacccataaatactagcacaagtaccatcaacatttcccttagagcaaccgtgcgttcctctccaccttcagaaccatcagtccctcctaaagatcttttgagaaccgaagagctgggtaaatcacaagaaccttcctatgaaactcgtgggaaattacaaactgatagtactacaggttccaatgatttcatactgtcaccagccgcttcatcttcactggatgaggaattgagcaacgcaagagcatctctcccgacagatttgccagcagtacctcaaaatccagacactaggccctttgcaattcaagcgacaagatctgaaactatgccgccgccgccaccaccaccaccaccgcctccgtcaaaatcaggcatgacgctgtttcctttgacacatggtgaagaggtaaaaatcactatagaaaaagtcgtaccacatcagcctccgcatccaccagcagcagcagcgtcattttcaagctcaaatccagatgctgtatctgtaattctagctccacaaaagagagctcggtctccaccgcccccgcccctgcccccacccccagggttggcaaaaccaccattttcctctctacggtcacgatcatcacctgaagtctcattgtctcaaccgcagtttctagataacaaggacagtgcaacaatggaatatccagacaccccgtctttgacacctacattttcacaaagcgttacacgggtgcaaacactgcatgttccacctccaccacctcctccatctcgaacaccgcctgttccacctccacctcctcgaacaccacctgttccgcctccaccaccaccttcatctcgaacaccgcctgttccatctccacctcctggaacaccacacgttccacctccaccaccacattcttctcaaacaccacctactccacctccaccacctccctcttcacaaagtttcccatccttaagtagaagaaatcgtgtggcagcccctcatccacctccgcctccagcaccactgtcatcccgtgttacttctgcaccatcagtaccaccttcacccccattacctcctcctaagctagccgtggccaataacacttcacagaagtcaccaacaatccgaccacctccacctccacccggcccccttcataagcttacgaagggaagtgttgccaattctaaccctcccccacatccagcattttcatttggtgcaaaggatcgtagcacagcccgctcaaaaagtcctagaagtttacgtgccaaccaggcatctaaaaggaccccgctgaagccattgcactgggtgaaagtttcaagagcaacacagggaagtttgtgggctgaaacacagaagtctgatgaaatatctaggaccccagagattgatatctctgagctggaaagtcttttctctgtaacgatgccaaatatggaggcaaaacgtcaacggcaacaacaacacccttctgttgcaacaaagcaagaaaaagttcatctggattgagctccaacgcgcaaagaattgtgaaattatgctgagaaacattaagatgccactgcctgatctaatggggtttagtagttgctcttgatgattccgtagttgatggtgatcaagtagattacctaataaagttctgtccaactaaggaagaaatggaactactcaaaagttatacgggcaaaaaggagaacctagggaactgtgaacagttcttcatggagatgatgaaagtaccaagggtggaatcaaaactgagaattttgtcatttaagataaagtttgttacacaggttgcggacctaaaaagtaatttgaataccatcaatttggttgctgaagaggttaggagctctgtgaaacttaagcgagtgatgcagacaattctttctttgggaaacgcattaaaccaaggaactgcaaggggtgcagctgttggatttagattggatagtcttcttaagctcagtgatatacgagcacgtaataataggatgactctcatgcattatctatgcaaggttctttcggacaagcttcctgaagtgcttgacttcagcagggatcttgcaaatttagaacctgcctcaaagatacaactgaaggagttagcagaagaaatgcaagcgataactaaaggactggaaaaagtggagcaggaactggcaacagctgaaaaggatccttcagagacagagatattttacaggaaactgaatttattccttgatgacgcccaagctgaaggaaggtcgttagcttcgctttacagcagtgcggggaaaagtgccgattctctagcacattattttggtgaagatcccgtgcggtgtcctttcgagcaagttgtctcaacgttgctaagcttcacgaagacgttcgagcgggcccatgcggagaatgttaagcagatggagctggagaagaaaagagcacaagcggaagcagagaaagagaaggccaaactaactgcccacaagaagagggagtcgctggagcttggaatttcaggccggtgacacaccatatattgcatctgtggatagcacgcacttcactaattctgtgccgcctgatcacctagaccagcggcagaaaattttgtagcgctccttcagcgtgtatcacaaggaagctagggagaagtaatgatgtgtagtcctaatataacagttcactcgatgtacatagcagtttcagatctgttgcttctgtaaagaaaggttccacagctagctcacgaagggagctgcagtctctttggtttgtcaggaagttagggagaagtaatgttgtgttagtcctaatgtaacagttcacctaattagcgagaagcaatactgtacatagcagtttcaggtctattgctgttgtaaagaaaggttctgcaaactcgtttagctctcgatttatcttggggaattcacctgttactgccacttgctatagcaaatctgtaatcttgcgagtacattctccaatctccatttctactacgatgggcgtttggatgacggtaggagctgatatggctaagagcatgtacagttgtgtttaatgtagagtcttttgaggtgtttaaatgagatatctgcaaaaaaatgtagagtcgtctctccgtgaagtgacgtctctgtctcgtaacacaagtagcaatagacagacgacgtcacttcccattgtatgaattcgtctgttctatcaattcgatgttgtacagacgtatttactt

SEQ ID NO: 214152 - DNA, 5509 bp, Zea Mays
cagccaaagagtggagtaaatgagcagccaggaaaaaaaaaataacaaactaacagctgcgcgttagtaataaaataaaacaattaaatgtagtcaaacgccaatttcttcctcctcctgccttatcgtcttcctccttcctgccttgtcttcgtcctcgctcaacgccaatctctctcctcttaccattacccatttctcaaatttccaactgaaatacgcccgccccttttcctgcgcgctccgattccaaaccctcggagctctcaagacaagagattcaacagagccggagcggtagcacctctttcctgtttgcctgtaaccttcctgctacagtacgccgcagcgattagcggcccgaacccaaatccgcaacggcctgagcgagctattgagctcggcggggcgggattctcggcgtagagagtatccttcagctgtatcgcgaaagattgagccgaatcggttgctggagttgagccagctcttggacttcctgcgagcagaagtgatccggagattggagctgctggtcctgccgcgtcatgtcgctgttccggaagttcttctataagaagccgcccgatggtctgctcctcatcacagataacgtctacgtttttgatcactgcttctccctgaaagaggtggaaggggaccatttcgatgctcacattagaggcattgcagcagatcttctggaaaattttcgcgatcactcattcatgatctcgaatttcgggactaaagaggaagaaagccctatataccatattttgtctgagtatggtatgactgtattggactaccctggccactatgagggatgtccactcctcaccatggaaatgatccactgcatcttgaagtccagcgaaagctggctttctttgggtcagcataacttactgctaatgcactgtcaacgagggagctggcctattctggctttcatgttagctgctcttctaatatacctggggcattattccgacgaggagaaagtgctggatatggtctacaagcaatcgtctttggagcttttggagatgatttcacctctgaatcccatgccttctcaaatgagatatttgcgctatatctcgacgaggaatgtcatgcctgagtggcctccagctgatagagccctcacattagattgtgttattttgaggatggttccaaattttcatggccaaggtggtttccgtccaatattcaggatatacggcccggatcatctcatgccccctgatcagactccaaaagttcttttttcaactccaaagaaaagcaaccttgtccgtttttattcacagtaggcagatgaactggtgaaaatagaccttcaatgtcatgtccaaggtgatattgtcctagagtgtatccatctgtatgaggatctggatcgtgaagagatggttttccgaatcatgttcaatacagcattcatccggtcaaacatcttgatgcttaaccgtgatcacatagacatgttatggaatgcaaaagaccaattccctaaagattttcggtttgaggttatcttttccgatatggacatagttacttcacatgtcacaacagagcctgttattcatcaagagaaacaaggacttggggttgaagagtttgctaaggtgctagatatctttaaccatttggactggttggatgggaaaaaagacaccgtacctcacacaacccagctaaagatctcagcgattaccgatgaacctgagactttctttgatactcgtgaagaacttgaatctgaaagttcttctggtgaaatttattcttctagtgttgttctgaaggtcggaaatgaattggatatgcttgtcagcactaaaccgagacatattccccaagattcaagttcagctaatgttcaatccaaatcacaaactacagtgcagtctccttcgcgaatgcggcgcacagcattgttatcaccttctaaggttaaggtttcaaagaccagtgcttcaccaatggaactgtcttcaagtacaatcatgccacaacaatcatcttcgccggttcagcctcggcgagtgatgtctgactctgcagtaaaatttttatcagagataacagaatcagcatcaggtgagatgtcttgttcacaaactccagttgaacatgaaccttcctctctgatggaaaacaatccagcaccaacagcatctctgttacctttgtgcacacctcctcctcttcctccccctccacccactgtctctttactccctgttcccactaagttacccataaatactagcacaagtaccatcaacatttcccttagagcaaccgtgcgttcctctccaccttcagaaccatcagtccctcctaaagatcttttgagaaccgaagagctgggtaaatcacaagaaccttcctatgaaactcgtgggaaattacaaactgatagtactacaggttccaatgatttcatactgtcaccagccgcttcatcttcactggatgaggaattgagcaacgcaagagcatctctcccgacagatttgccagcagtacctcaaaatccagacactaggccctttgcaattcaagcgacaagatctgaaactatgccgccgccgccaccaccaccaccaccgcctccgtcaaaatcaggcatgacgctgtttcctttgacacatggtgaagaggtaaaaatcactatagaaaaagtcgtaccacatcagcctccgcatccaccagcagcagcagcgtcattttcaagctcaaatccagatgctgtatctgtaattctagctccacaaaagagagctcggtctccaccgcccccgcccctgcccccacccccagggttggcaaaaccaccattttcctctctacggtcacgatcatcacctgaagtctcattgtctcaaccgcagtttctagataacaaggacagtgcaacaatggaatatccagacaccccgtctttgacacctacattttcacaaagcgttacacgggtgcaaacactgcatgttccacctccaccacctcctccatctcgaacaccgcctgttccacctccacctcctcgaacaccacctgttccgcctccaccaccaccttcatctcgaacaccgcctgttccatctccacctcctggaacaccacacgttccacctccaccaccacattcttctcaaacaccacctactccacctccaccacctccctcttcacaaagtttcccatccttaagtagaagaaatcgtgtggcagcccctcatccacctccgcctccagcaccactgtcatcccgtgttacttctgcaccatcagtaccaccttcacccccattacctcctcctaagctagccgtggccaataacacttcacagaagtcaccaacaatccgaccacctccacctccacccggcccccttcataagcttacgaagggaagtgttgccaattctaaccctcccccacatccagcattttcatttggtgcaaaggatcgtagcacagcccgctcaaaaagtcctagaagtttacgtgccaaccaggcatctaaaaggaccccgctgaagccattgcactgggtgaaagtttcaagagcaacacagggaagtttgtgggctgaaacacagaagtctgatgaaatatctaggaccccagagattgatatctctgagctggaaagtcttttctctgtaacgatgccaaatatggaggcaaaacgtcaacggcaacaacaacacccttctgttgcaacaaagcaagaaaaagttcatctgattgagctccaacgcgcaaagaattgtgaaattatgctgagaaacattaagatgccactgcctgatctaatgggtttagtagttgctcttgatgattccgtagttgatggtgatcaagtagattacctaataaagttctgtccaactaaggaagaaatggaactactcaaaagttatacgggcaaaaaggagaacctagggaactgtgaacagttcttcatggagatgatgaaagtaccaagggtggaatcaaaactgagaattttgtcatttaagataaagtttgttacacaggttgcggacctaaaaagtaatttgaataccatcaatttggttgctgaagaggttaggagctctgtgaaacttaagcgagtgatgcagacaattctttctttgggaaacgcattaaaccaaggaactgcaaggggtgcagctgttggatttagattggatagtcttcttaagctcagtgatatacgagcacgtaataataggatgactctcatgcattatctatgcaaggttctttcggacaagcttcctgaagtgcttgacttcagcagggatcttgcaaatttagaacctgcctcaaagatacaactgaaggagttagcagaagaaatgcaagcgataactaaaggactggaaaaagtggagcaggaactggcaacagctgaaaaggatccttcagagacagagatattttacaggaaactgaatttattccttgatgacgcccaagctgaaggaaggtcgttagcttcgctttacagcagtgcggggaaaagtgccgattctctagcacattattttggtgaagatcccgtgcggtgtcctttcgagcaagttgtctcaacgttgctaagcttcacgaagacgttcgagcgggcccatgcggagaatgttaagcagatggagctggagaagaaaagagcacaagcggaagcagagaaagagaaggccaaactaactgcccacaagaagagggagtcgctggagcttggaatttcaggccggtgacacaccatatattgcatctgtggatagcacgcacttcactaattctgtgccgcctgatcacctagaccagcggcagaaaattttgtagcgctccttcagcgtgtatcacaaggaagctagggagaagtaatgatgtgtagtcctaatataacagttcactcgatgtacatagcagtttcagatctgttgcttctgtaaagaaaggttccacagctagctcacgaagggagctgcagtctctttggtttgtcaggaagttagggagaagtaatgttgtgttagtcctaatgtaacagttcacctaattagcgagaagcaatactgtacatagcagtttcaggtctattgctgttgtaaagaaaggttctgcaaactcgtttagctctcgatttatcttggggaattcacctgttactgccacttgctatagcaaatctgtaatcttgcgagtacattctccaatctccatttctactacgatgggcgtttggatgacggtaggagctgatatggctaagagcatgtacagttgtgtttaatgtagagtcttttgaggtgtttaaatgagatatctgcaaaaaaatgtagagtcgtctctccgtgaagtgacgtctctgtctcgtaacacaagtagcaatagacagacgacgtcacttcccattgtatgaattcgtctgttctatcaattcgatgttgtacagacgtatttactt

SEQ ID NO: 214153 - DNA, 5545 bp, Zea Mays
aaagaagccattttgacgaaataataaagaattagtaagcagccaaagagtggagtaaatgagcagccaggaaaaaaaaaataacaaactaacagctgcgcgttagtaataaaataaaacaattaaatgtagtcaaacgccaatttcttcctcctcctgccttatcgtcttcctccttcctgccttgtcttcgtcctcgctcaacgccaatctctctcctcttaccattacccatttctcaaatttccaactgaaatacgcccgccccttttcctgcgcgctccgattccaaaccctcggagctctcaagacaagagattcaacagagccggagcggtagcacctctttcctgtttgcctgtaaccttcctgctacagtacgccgcagcgattagcggcccgaacccaaatccgcaacggcctgagcgagctattgagctcggcggggcgggattctcggcgtagagagtatccttcagctgtatcgcgaaagattgagccgaatcggttgctggagttgagccagctcttggacttcctgcgagcagaagtgatccggagattggagctgctggtcctgccgcgtcatgtcgctgttccggaagttcttctataagaagccgcccgatggtctgctcctcatcacagataacgtctacgtttttgatcactgcttctccctgaaagaggtggaaggggaccatttcgatgctcacattagaggcattgcagcagatcttctggaaaattttcgcgatcactcattcatgatctcgaatttcgggactaaagaggaagaaagccctatataccatattttgtctgagtatggtatgactgtattggactaccctggccactatgagggatgtccactcctcaccatggaaatgatccactgcatcttgaagtccagcgaaagctggctttctttgggtcagcataacttactgctaatgcactgtcaacgagggagctggcctattctggctttcatgttagctgctcttctaatatacctggggcattattccgacgaggagaaagtgctggatatggtctacaagcaatcgtctttggagcttttggagatgatttcacctctgaatcccatgccttctcaaatgagatatttgcgctatatctcgacgaggaatgtcatgcctgagtggcctccagctgatagagccctcacattagattgtgttattttgaggatggttccaaattttcatggccaaggtggtttccgtccaatattcaggatatacggcccggatcatctcatgccccctgatcagactccaaaagttcttttttcaactccaaagaaaagcaaccttgtccgtttttattcacaggcagatgaactggtgaaaatagaccttcaatgtcatgtccaaggtgatattgtcctagagtgtatccatctgtatgaggatctggatcgtgaagagatggttttccgaatcatgttcaatacagcattcatccggtcaaacatcttgatgcttaaccgtgatcacatagacatgttatggaatgcaaaagaccaattccctaaagattttcggtttgaggttatcttttccgatatggacatagttacttcacatgtcacaacagagcctgttattcatcaagagaaacaaggacttggggttgaagagtttgctaaggtgctagatatctttaaccatttggactggttggatgggaaaaaagacaccgtacctcacacaacccagctaaagatctcagcgattaccgatgaacctgagactttctttgatactcgtgaagaacttgaatctgaaagttcttctggtgaaatttattcttctagtgttgttctgaaggtcggaaatgaattggatatgcttgtcagcactaaaccgagacatattccccaagattcaagttcagctaatgttcaatccaaatcacaaactacagtgcagtctccttcgcgaatgcggcgcacagcattgttatcaccttctaaggttaaggtttcaaagaccagtgcttcaccaatggaactgtcttcaagtacaatcatgccacaacaatcatcttcgccggttcagcctcggcgagtgatgtctgactctgcagtaaaatttttatcagagataacagaatcagcatcaggtgagatgtcttgttcacaaactccagttgaacatgaaccttcctctctgatggaaaacaatccagcaccaacagcatctctgttacctttgtgcacacctcctcctcttcctccccctccacccactgtctctttactccctgttcccactaagttacccataaatactagcacaagtaccatcaacatttcccttagagcaaccgtgcgttcctctccaccttcagaaccatcagtccctcctaaagatcttttgagaaccgaagagctgggtaaatcacaagaaccttcctatgaaactcgtgggaaattacaaactgatagtactacaggttccaatgatttcatactgtcaccagccgcttcatcttcactggatgaggaattgagcaacgcaagagcatctctcccgacagatttgccagcagtacctcaaaatccagacactaggccctttgcaattcaagcgacaagatctgaaactatgccgccgccgccaccaccaccaccaccgcctccgtcaaaatcaggcatgacgctgtttcctttgacacatggtgaagaggtaaaaatcactatagaaaaagtcgtaccacatcagcctccgcatccaccagcagcagcagcgtcattttcaagctcaaatccagatgctgtatctgtaattctagctccacaaaagagagctcggtctccaccgcccccgcccctgcccccacccccagggttggcaaaaccaccattttcctctctacggtcacgatcatcacctgaagtctcattgtctcaaccgcagtttctagataacaaggacagtgcaacaatggaatatccagacaccccgtctttgacacctacattttcacaaagcgttacacgggtgcaaacactgcatgttccacctccaccacctcctccatctcgaacaccgcctgttccacctccacctcctcgaacaccacctgttccgcctccaccaccaccttcatctcgaacaccgcctgttccatctccacctcctggaacaccacacgttccacctccaccaccacattcttctcaaacaccacctactccacctccaccacctccctcttcacaaagtttcccatccttaagtagaagaaatcgtgtggcagcccctcatccacctccgcctccagcaccactgtcatcccgtgttacttctgcaccatcagtaccaccttcacccccattacctcctcctaagctagccgtggccaataacacttcacagaagtcaccaacaatccgaccacctccacctccacccggcccccttcataagcttacgaagggaagtgttgccaattctaaccctcccccacatccagcattttcatttggtgcaaaggatcgtagcacagcccgctcaaaaagtcctagaagtttacgtgccaaccaggcatctaaaaggaccccgctgaagccattgcactgggtgaaagtttcaagagcaacacagggaagtttgtgggctgaaacacagaagtctgatgaaatatctaggaccccagagattgatatctctgagctggaaagtcttttctctgtaacgatgccaaatatggaggcaaaacgtcaacggcaacaacaacacccttctgttgcaacaaagcaagaaaaagttcatctgattgagctccaacgcgcaaagaattgtgaaattatgctgagaaacattaagatgccactgcctgatctaatgggtttagtagttgctcttgatgattccgtagttgatggtgatcaagtagattacctaataaagttctgtccaactaaggaagaaatggaactactcaaaagttatacgggcaaaaaggagaacctagggaactgtgaacagttcttcatggagatgatgaaagtaccaagggtggaatcaaaactgagaattttgtcatttaagataaagtttgttacacaggttgcggacctaaaaagtaatttgaataccatcaatttggttgctgaagaggttaggagctctgtgaaacttaagcgagtgatgcagacaattctttctttgggaaacgcattaaaccaaggaactgcaaggggtgcagctgttggatttagattggatagtcttcttaagctcagtgatatacgagcacgtaataataggatgactctcatgcattatctatgcaaggttctttcggacaagcttcctgaagtgcttgacttcagcagggatcttgcaaatttagaacctgcctcaaagatacaactgaaggagttagcagaagaaatgcaagcgataactaaaggactggaaaaagtggagcaggaactggcaacagctgaaaaggatccttcagagacagagatattttacaggaaactgaatttattccttgatgacgcccaagctgaaggaaggtcgttagcttcgctttacagcagtgcggggaaaagtgccgattctctagcacattattttggtgaagatcccgtgcggtgtcctttcgagcaagttgtctcaacgttgctaagcttcacgaagacgttcgagcgggcccatgcggagaatgttaagcagatggagctggagaagaaaagagcacaagcggaagcagagaaagagaaggccaaactaactgcccacaagaagagggagtcgctggagcttggaatttcaggccggtgacacaccatatattgcatctgtggatagcacgcacttcactaattctgtgccgcctgatcacctagaccagcggcagaaaattttgtagcgctccttcagcgtgtatcacaaggaagctagggagaagtaatgatgtgtagtcctaatataacagttcactcgatgtacatagcagtttcagatctgttgcttctgtaaagaaaggttccacagctagctcacgaagggagctgcagtctctttggtttgtcaggaagttagggagaagtaatgttgtgttagtcctaatgtaacagttcacctaattagcgagaagcaatactgtacatagcagtttcaggtctattgctgttgtaaagaaaggttctgcaaactcgtttagctctcgatttatcttggggaattcacctgttactgccacttgctatagcaaatctgtaatcttgcgagtacattctccaatctccatttctactacgatgggcgtttggatgacggtaggagctgatatggctaagagcatgtacagttgtgtttaatgtagagtcttttgaggtgtttaaatgagatatctgcaaaaaaatgtagagtcgtctctccgtgaagtgacgtctctgtctcgtaacacaagtagcaatagacagacgacgtcacttcccattgtatgaattcgtctgttctatcaattcgatgttgtacagacgtatttactt

SEQ ID NO: 214154 - DNA, 1667 bp, Zea Mays
atactctctacctagggcttgcttgctatcctgatccaacgtcacactgatactatatactcatcgactgctgctagtatatactagctgcgcagtttgaacgacgaattgaaatcttcagctttttatttattattgattgactcgatccaccagcagcagcagcaccaccaccagcagcaaggccacggccacctgcagattgccgtcagcggcagcggcgacgccaatcatgagctcctccagcaaccaatcatggggggagcgcttcccgatggaggaggaggaggtggtggcggggggcaggttgggggccccgccaagcccatgtccatggcggagcgcgcgcgcctcgcgaggatcccgctgccggagccggggctcaagtgcccgcgctgcgactcaaccaacaccaagttctgctacttcaacaactactccctcacccagccgcgccacttctgccgggcctgccgccgctactggacgcgcggcggcgcgctccgcaacgtgccggtcggcggcggataccgccgccacgccaagcgcgccaagcccaagcagcagcagcagcagcacgcggccgccgggaccggggctgccaccggcgcgatgcagcagcctcccgctgggtccatggcgtcgtcggccgccgcgtgcaccgcgaccacgacgatgacgaccaacgcgctccacgccgggcccggcggcggcatgctgcccatgctgccgccgctgctgcgcctagccgacttcgacgcaatgagcctcggctccagcttctccggcatatcgtccatggggaagcccggctccatcggcgcggcctgctacccgcactcggtcggcgggctggagcagtggagggtgcagcagatgcagagcttcccgttcttgcatgcgatggaccagggcccgctggggccacctctggccatggcgatggcggcgccaggagggatgttccagctaggtctagacaccaccagtgataacagccgtggcggtggcggcggcggagaagacgggtcgtctgccggagaggcgctccatatgatgcaagccaccaagagggagagctaccccgcggcaccaagagccatgtacggcgaccaacaacacaatcacctggctgctgctggtggctacacttcctattccaccaatgctgctgcaggtaaccatctcttgtaatggccggccgatcgatcgatcgagagctcaacaattcaagtgtcctgctatagctagctactacgacgtcgtgctacgatcgtatcggttcgtttcctacaaatatagcctagagatagagtgtctctgtctgtgtgatcgatggtattgttatgatcatatagaaaagaccagtagcatgcatgcacttgttgcaatgtttgctttcaagaagaaactctggagggaggagaggctcggtttggatgctgatcatgcgcaaatattactagtgtctacagctgctacttcattatagctgctagcatggtcacttgttttatgtttcttcttctgctgcttttttatctgatccctttgttagggtttactactactatcgatcatttgtggtcaagtaatgtgtactggtgtacgttcatcattttgttaacgaaaacacctatcatatatatgtcaattattcaacccca

SEQ ID NO: 214155 - DNA, 3205 bp, Zea Mays
gaacagaaaaggcctggaggcgacccgtaacaacgcggagcgtcagcctatagccgtcgctcccgtgtcccgtccgccgtcccccttcctctcgtattcgcttcgccgcccaacccactgtgcaccgctgccttcccgaccgttctcgccgccgccgtctccgcgcctgccaccccgcgcgctcggccaccggcgcccacggtgcggctcgatcaaggccagatcagaacccgccccggtccgcgtcacgccgatattttctgttttttggtacggatctagggttttcctgctgcggattcgttcgattcgctcatggccgctgggcgccatgggggttacagggactacgaggcgagggagcgggagctcgacgcggaggcctccaggaggagcaaggagcagcaccaccatctcggcggccgccaccgcgacgtggaccgccaccgcgatggcgggcgcagcaggggtggcagagactttgccaacggctacggtcgccgacgctcgccgccaccccggagccggctggcgggaaggcttggtgaccgtgagcctggcgaggtgctgagcggtagtgcatctgatgactccggtgggaggccgcatagagggagggagaatggcgtgctcagttccggcagggagggtgatgtgatggcagtcactgatgactccggtgggaggtcgcataggaggagggagaatggcgtgctcagttccggcagggatggtgatgtgatggcagtcacagggatatcttcgccgagcaagaagaggaaattctcaccgataatttgggacagggatagcccaaagccaccacattctgatgcagccagggacaagaaagctgtagaacctgtgccttctgagctccctccgcccccgccgttgcctccacaagaccacatcacactgaggttggctgtggagaagtcacttatggatatagaacctactgttggtacagagagtgctgtgcagttgctggaacatgaggtgaataaggtgacagagcaggaagaggagtatgcaacaatgaggaacatatcgacttcaagatgggctggtgctaatgatgatgatgatgatggggcagctccagtgaagaagaaaagtctgtctcctgcagactcctctgtggcagggcagtggaaaagagcaagtccagaacctggtgaagtatctggaggaaggacaatgtctaggtcatctgactctgggaaaatgagtaatgatgagaaagaagactttgaagcaaatgaagatgactatatggatgtcgacaagggacatgctagtgacagtgatacagaaaaccgtatgtcagatactgactcagacaatgaaatacacagacctgaaacccctgaaagagagaaggcaccacacaggtgtatcaatatgcttcaagattgcagaagtgttgatgagtttgagaggctcaacaaaattaacgagggcacatatggtgttgtatacagagcaagggataagaagacaagtgagattgttgcattgaagaaggtaaagatggagaaggagcgagaaggtttcccattaacctctcttagggaaataaatatcctcttgtctttccacaatccttcaattgtggatgttaaggaagtagtagttggaagtagtctagatagtatttttatggttatggagtacatggaacatgatcttaaaggtgtcatggagaccatgaaacaaccatatacccaaagcgaggtaaagtgtttgatgcttcagctgctagaaggtgtaaaatatctacatgacaattgggtgcttcatagggatctgaagacctcaaatcttttgttgaataaccgtggtgagttaaaaatatgtgattttggactgtctcgtcaatatggaagcccattaaaaccttatactcaactggttgtgactttgtggtacagggccccagaattgttgttaggaacaaaggagtattctactgctattgatatgtggtctgtgggctgtataatggctgagcttcttgccaaagaaccgttattcaatggaaaaacagagtttgaacagctagataagatttttagaacactcggcacacctaatgagaagatttggcctggctatgctaaattaccaggtgtgaaagtaaattttgttaaacaaccgtataatagactaagggataagttcccagccgcttctttttctgggcgaccaatcctgtctgaagctggttttgatctattgaacagactgctgacttatgaccctgataagcgcatatcagcagacgatgctcttaagcacaaatggttctctgaagttcctctgcctaaatcaaaggacttcatgccaacattccctgctcttaatgaacttgacaggcgttccagaaggtatctgaagagtcctgatcctctggaagagcaacgtttgaaagaactgcaagggaacataggcaaccatgggctttttgggtgaactagaagcacttgattgggtctgcaagggaacataggcaaccgtgggctttttggctgaactagaagcacttgattgggtcctgtccgtcctaactgttatgcttcacactgaaatcctgagttcatgaggttagatatcttctgaggcttggtaccggtttaaatggataaggtttctccttgtggcccatcatagaaattttgttgcaggattaacgcttcatccagatcgatcataaaagcaaatataatctacctgcatcataaggtgtggcgtgttggcttttattggttacaccagtttcacctttggaacttctctatgtaaaatattccagattgaagcgcaggggaaggatgccttttgctttcatcaggaaatcaatggcattaatacaacttagaagctaagctgtggctgcttcaagataggaagcttgatggctgtcagcttattgtacctaagtgactaaattttgtggagggccttcaaaagtgttcatctcttactagtgaaccatggtgggattgccgagccgttcggctaaccgggctagccgataattggtggtggtcggctccaccttatcactgttttggattttgaatttggtaaagtttgtaaattttgaaaacttttgatgacattttttgtataaatactatatattatttgaagattttctgctgaaaccaaatttcaaaatacacaacgaatttcaaac

SEQ ID NO: 214156 - DNA, 3214 bp, Zea Mays
gaacagaaaaggcctggaggcgacccgtaacaacgcggagcgtcagcctatagccgtcgctcccgtgtcccgtccgccgtcccccttcctctcgtattcgcttcgccgcccaacccactgtgcaccgctgccttcccgaccgttctcgccgccgccgtctccgcgcctgccaccccgcgcgctcggccaccggcgcccacggtgcggctcgatcaaggccagatcagaacccgccccggtccgcgtcacgccgatattttctgttttttggtacggatctagggttttcctgctgcggattcgttcgattcgctcatggccgctgggcgccatgggggttacagggactacgaggcgagggagcgggagctcgacgcggaggcctccaggaggagcaaggagcagcaccaccatctcggcggccgccaccgcgacgtggaccgccaccgcgatggcgggcgcagcaggggtggcagagactttgccaacggctacggtcgccgacgctcgccgccaccccggagccggctggcgggaaggcttggtgaccgtgagcctggcgaggtgctgagcggtagtgcatctgatgactccggtgggaggccgcatagagggagggagaatggcgtgctcagttccggcagggagggtgatgtgatggcagtcactgatgactccggtgggaggtcgcataggaggagggagaatggcgtgctcagttccggcagggatggtgatgtgatggcagtcacagggatatcttcgccgagcaagaagaggaaattctcaccgataatttgggacagggatagcccaaagccaccacattctgatgcagccagggacaagaaagctgtagaacctgtgccttctgagctccctccgcccccgccgttgcctccacaagaccacatcacactgaggttggctgtggagaagtcacttatggatatagaacctactgttggtacagagagtgctgtgcagttgctggaacatgaggtgaataaggtgacagagcaggaagaggagtatgcaacaatgaggaacatatcgacttcaagatgggctggtgctaatgatgatgatgatgatggggcagctccagtgaagaagaaaagtctgtctcctgcagactcctctgtggcagggcagtggaaaagagcaagtccagaacctggtgaagtatctggaggaaggacaatgtctaggtcatctgactctgggaaaatgagtaatgatgagaaagaagactttgaagcaaatgaagatgactatatggatgtcgacaagggacatgctagtgacagtgatacagaaaaccgtatgtcagatactgactcagacaatgaaatacacagacctgaaacccctgaaagagagaaggcaccacacaggtgtatcaatatgcttcaagattgcagaagtgttgatgagtttgagaggctcaacaaaattaacgagggcacatatggtgttgtatacagagcaagggataagaagacaagtgagattgttgcattgaagaaggtaaagatggagaaggagcgagaaggtttcccattaacctctcttagggaaataaatatcctcttgtctttccacaatccttcaattgtggatgttaaggaagtagtagttggaagtagtctagatagtatttttatggttatggagtacatggaacatgatcttaaaggtgtcatggagaccatgaaacaaccatatacccaaagcgaggtaaagtgtttgatgcttcagctgctagaaggtgtaaaatatctacatgacaattgggtgcttcatagggatctgaagacctcaaatcttttgttgaataaccgtggtgagttaaaaatatgtgattttggactgtctcgtcaatatggaagcccattaaaaccttatactcaactggttgtgactttgtggtacagggccccagaattgttgttaggaacaaaggagtattctactgctattgatatgtggtctgtgggctgtataatggctgagcttcttgccaaagaaccgttattcaatggaaaaacagagtttgaacagctagataagatttttagaacactcggcacacctaatgagaagatttggcctggctatgctaaattaccaggtgtgaaagtaaattttgttaaacaaccgtataatagactaagggataagttcccagccgcttctttttctgggcgaccaatcctgtctgaagctggttttgatctattgaacagactgctgacttatgaccctgataagcgcatatcagcagacgatgctcttaagcacaaatggttctctgaagttcctctgcctaaatcaaaggacttcatgccaacattccctgctcttaatgaacttgacaggcgttccagaaggtatctgaagagtcctgatcctctggaagagcaacgtttgaaagaactgcaagggaacataggcaaccatgggctttttgggtgaactagaagcacttgattgggtctgcaagggaacataggcaaccgtgggctttttggctgaactagaagcacttgattgggtcctgtccgtcctaactgttatgcttcacactgaaatcctgagttcatgaggttagatatcttctgaggcttggtaccggtttaaatggataaggtttctccttgtggcccatcatagaaattttgttgcaggattaacgcttcatccagatcgatcataaaagcaaatataatctacctgcatcataaggtgtggcgtgttggcttttattggttacaccagtttcacctttggaacttctctatgtaaaatattccagattgagacaaaagaagcgcaggggaaggatgccttttgctttcatcaggaaatcaatggcattaatacaacttagaagctaagctgtggctgcttcaagataggaagcttgatggctgtcagcttattgtacctaagtgactaaattttgtggagggccttcaaaagtgttcatctcttactagtgaaccatggtgggattgccgagccgttcggctaaccgggctagccgataattggtggtggtcggctccaccttatcactgttttggattttgaatttggtaaagtttgtaaattttgaaaacttttgatgacattttttgtataaatactatatattatttgaagattttctgctgaaaccaaatttcaaaatacacaacgaatttcaaac

SEQ ID NO: 214157 - DNA, 3138 bp, Zea Mays
gaacagaaaaggcctggaggcgacccgtaacaacgcggagcgtcagcctatagccgtcgctcccgtgtcccgtccgccgtcccccttcctctcgtattcgcttcgccgcccaacccactgtgcaccgctgccttcccgaccgttctcgccgccgccgtctccgcgcctgccaccccgcgcgctcggccaccggcgcccacggtgcggctcgatcaaggccagatcagaacccgccccggtccgcgtcacgccgatattttctgttttttggtacggatctagggttttcctgctgcggattcgttcgattcgctcatggccgctgggcgccatgggggttacagggactacgaggcgagggagcgggagctcgacgcggaggcctccaggaggagcaaggagcagcaccaccatctcggcggccgccaccgcgacgtggaccgccaccgcgatggcgggcgcagcaggggtggcagagactttgccaacggctacggtcgccgacgctcgccgccaccccggagccggctggcgggaaggcttggtgaccgtgagcctggcgaggtgctgagcggtagtgcatctgatgactccggtgggaggccgcatagagggagggagaatggcgtgctcagttccggcagggagggtgatgtgatggcagtcactgatgactccggtgggaggtcgcataggaggagggagaatggcgtgctcagttccggcagggatggtgatgtgatggcagtcacagggatatcttcgccgagcaagaagaggaaattctcaccgataatttgggacagggatagcccaaagccaccacattctgatgcagccagggacaagaaagctgtagaacctgtgccttctgagctccctccgcccccgccgttgcctccacaagaccacatcacactgaggttggctgtggagaagtcacttatggatatagaacctactgttggtacagagagtgctgtgcagttgctggaacatgaggtgaataaggtgacagagcaggaagaggagtatgcaacaatgaggaacatatcgacttcaagatgggctggtgctaatgatgatgatgatgatggggcagctccagtgaagaagaaaagtctgtctcctgcagactcctctgtggcagggcagtggaaaagagcaagtccagaacctggtgaagtatctggaggaaggacaatgtctaggtcatctgactctgggaaaatgagtaatgatgagaaagaagactttgaagcaaatgaagatgactatatggatgtcgacaagggacatgctagtgacagtgatacagaaaaccgtatgtcagatactgactcagacaatgaaatacacagacctgaaacccctgaaagagagaaggcaccacacaggtgtatcaatatgcttcaagattgcagaagtgttgatgagtttgagaggctcaacaaaattaacgagggcacatatggtgttgtatacagagcaagggataagaagacaagtgagattgttgcattgaagaaggtaaagatggagaaggagcgagaaggtttcccattaacctctcttagggaaataaatatcctcttgtctttccacaatccttcaattgtggatgttaaggaagtagtagttggaagtagtctagatagtatttttatggttatggagtacatggaacatgatcttaaaggtgtcatggagaccatgaaacaaccatatacccaaagcgaggtaaagtgtttgatgcttcagctgctagaaggtgtaaaatatctacatgacaattgggtgcttcatagggatctgaagacctcaaatcttttgttgaataaccgtggtgagttaaaaatatgtgattttggactgtctcgtcaatatggaagcccattaaaaccttatactcaactggttgtgactttgtggtacagggccccagaattgttgttaggaacaaaggagtattctactgctattgatatgtggtctgtgggctgtataatggctgagcttcttgccaaagaaccgttattcaatggaaaaacagagtttgaacagctagataagatttttagaacactcggcacacctaatgagaagatttggcctggctatgctaaattaccaggtgtgaaagtaaattttgttaaacaaccgtataatagactaagggataagttcccagccgcttctttttctgggcgaccaatcctgtctgaagctggttttgatctattgaacagactgctgacttatgaccctgataagcgcatatcagcagacgatgctcttaagcacaaatggttctctgaagttcctctgcctaaatcaaaggacttcatgccaacattccctgctcttaatgaacttgacaggcgttccagaaggtatctgaagagtcctgatcctctggaagagcaacgtttgaaagaactgcaagggaacataggcaaccatgggctttttgggtgaactagaagcacttgattgggtctgcaagggaacataggcaaccgtgggctttttggctgaactagaagcacttgattgggtcctgtccgtcctaactgttatgcttcacactgaaatcctgagttcatgaggttagatatcttctgaggcttggtaccggtttaaatggataaggtttctccttgtggcccatcatagaaattttgttgcaggattaacgcttcatccagatcgatcataaaagcaaatataatctacctgcatcataagacaaaagaagcgcaggggaaggatgccttttgctttcatcaggaaatcaatggcattaatacaacttagaagctaagctgtggctgcttcaagataggaagcttgatggctgtcagcttattgtacctaagtgactaaattttgtggagggccttcaaaagtgttcatctcttactagtgaaccatggtgggattgccgagccgttcggctaaccgggctagccgataattggtggtggtcggctccaccttatcactgttttggattttgaatttggtaaagtttgtaaattttgaaaacttttgatgacattttttgtataaatactatatattatttgaagattttctgctgaaaccaaatttcaaaatacacaacgaatttcaaac

SEQ ID NO: 214158 - DNA, 3140 bp, Zea Mays
gaacagaaaaggcctggaggcgacccgtaacaacgcggagcgtcagcctatagccgtcgctcccgtgtcccgtccgccgtcccccttcctctcgtattcgcttcgccgcccaacccactgtgcaccgctgccttcccgaccgttctcgccgccgccgtctccgcgcctgccaccccgcgcgctcggccaccggcgcccacggtgcggctcgatcaaggccagatcagaacccgccccggtccgcgtcacgccgatattttctgttttttggtacggatctagggttttcctgctgcggattcgttcgattcgctcatggccgctgggcgccatgggggttacagggactacgaggcgagggagcgggagctcgacgcggaggcctccaggaggagcaaggagcagcaccaccatctcggcggccgccaccgcgacgtggaccgccaccgcgatggcgggcgcagcaggggtggcagagactttgccaacggctacggtcgccgacgctcgccgccaccccggagccggctggcgggaaggcttggtgaccgtgagcctggcgaggtgctgagcggtagtgcatctgatgactccggtgggaggccgcatagagggagggagaatggcgtgctcagttccggcagggagggtgatgtgatggcagtcactgatgactccggtgggaggtcgcataggaggagggagaatggcgtgctcagttccggcagggatggtgatgtgatggcagtcacagggatatcttcgccgagcaagaagaggaaattctcaccgataatttgggacagggatagcccaaagccaccacattctgatgcagccagggacaagaaagctgtagaacctgtgccttctgagctccctccgcccccgccgttgcctccacaagaccacatcacactgaggttggctgtggagaagtcacttatggatatagaacctactgttggtacagagagtgctgtgcagttgctggaacatgaggtgaataaggtgacagagcaggaagaggagtatgcaacaatgaggaacatatcgacttcaagatgggctggtgctaatgatgatgatgatgatggggcagctccagtgaagaagaaaagtctgtctcctgcagactcctctgtggcagggcagtggaaaagagcaagtccagaacctggtgaagtatctggaggaaggacaatgtctaggtcatctgactctgggaaaatgagtaatgatgagaaagaagactttgaagcaaatgaagatgactatatggatgtcgacaagggacatgctagtgacagtgatacagaaaaccgtatgtcagatactgactcagacaatgaaatacacagacctgaaacccctgaaagagagaaggcaccacacaggtgtatcaatatgcttcaagattgcagaagtgttgatgagtttgagaggctcaacaaaattaacgagggcacatatggtgttgtatacagagcaagggataagaagacaagtgagattgttgcattgaagaaggtaaagatggagaaggagcgagaaggtttcccattaacctctcttagggaaataaatatcctcttgtctttccacaatccttcaattgtggatgttaaggaagtagtagttggaagtagtctagatagtatttttatggttatggagtacatggaacatgatcttaaaggtgtcatggagaccatgaaacaaccatatacccaaagcgaggtaaagtgtttgatgcttcagctgctagaaggtgtaaaatatctacatgacaattgggtgcttcatagggatctgaagacctcaaatcttttgttgaataaccgtggtgagttaaaaatatgtgattttggactgtctcgtcaatatggaagcccattaaaaccttatactcaactggttgtgactttgtggtacagggccccagaattgttgttaggaacaaaggagtattctactgctattgatatgtggtctgtgggctgtataatggctgagcttcttgccaaagaaccgttattcaatggaaaaacagagtttgaacagctagataagatttttagaacactcggcacacctaatgagaagatttggcctggctatgctaaattaccaggtgtgaaagtaaattttgttaaacaaccgtataatagactaagggataagttcccagccgcttctttttctgggcgaccaatcctgtctgaagctggttttgatctattgaacagactgctgacttatgaccctgataagcgcatatcagcagacgatgctcttaagcacaaatggttctctgaagttcctctgcctaaatcaaaggacttcatgccaacattccctgctcttaatgaacttgacaggcgttccagaaggtatctgaagagtcctgatcctctggaagagcaacgtttgaaagaactgcaagggaacataggcaaccatgggctttttgggtgaactagaagcacttgattgggtctgcaagggaacataggcaaccgtgggctttttggctgaactagaagcacttgattgggtcctgtccgtcctaactgttatgcttcacactgaaatcctgagttcatgaggttagatatcttctgaggcttggtaccggtttaaatggataaggtttctccttgtggcccatcatagaaattttgttgcaggattaacgcttcatccagatcgatcataaaagcaaatataatctacctgcatcataagagacaaaagaagcgcaggggaaggatgccttttgctttcatcaggaaatcaatggcattaatacaacttagaagctaagctgtggctgcttcaagataggaagcttgatggctgtcagcttattgtacctaagtgactaaattttgtggagggccttcaaaagtgttcatctcttactagtgaaccatggtgggattgccgagccgttcggctaaccgggctagccgataattggtggtggtcggctccaccttatcactgttttggattttgaatttggtaaagtttgtaaattttgaaaacttttgatgacattttttgtataaatactatatattatttgaagattttctgctgaaaccaaatttcaaaatacacaacgaatttcaaac

SEQ ID NO: 214159 - DNA, 3326 bp, Zea Mays
cccgaacagaaaaggcctggaggcgacccgtaacaacgcggagcgtcagcctatagccgtcgctcccgtgtcccgtccgccgtcccccttcctctcgtattcgcttcgccgcccaacccactgtgcaccgctgccttcccgaccgttctcgccgccgccgtctccgcgcctgccaccccgcgcgctcggccaccggcgcccacggtgcggctcgatcaaggccagatcagaacccgccccggtccgcgtcacgccgatattttctgttttttggtacggatctagggttttcctgctgcggattcgttcgattcgctcatggccgctgggcgccatgggggttacagggactacgaggcgagggagcgggagctcgacgcggaggcctccaggaggagcaaggagcagcaccaccatctcggcggccgccaccgcgacgtggaccgccaccgcgatggcgggcgcagcaggggtggcagagactttgccaacggctacggtcgccgacgctcgccgccaccccggagccggctggcgggaaggcttggtgaccgtgagcctggcgaggtgctgagcggtagtgcatctgatgactccggtgggaggccgcatagagggagggagaatggcgtgctcagttccggcagggagggtgatgtgatggcagtcactgatgactccggtgggaggtcgcataggaggagggagaatggcgtgctcagttccggcagggatggtgatgtgatggcagtcacagggatatcttcgccgagcaagaagaggaaattctcaccgataatttgggacagggatagcccaaagccaccacattctgatgcagccagggacaagaaagctgtagaacctgtgccttctgagctccctccgcccccgccgttgcctccacaagaccacatcacactgaggttggctgtggagaagtcacttatggatatagaacctactgttggtacagagagtgctgtgcagttgctggaacatgaggtgaataaggtgacagagcaggaagaggagtatgcaacaatgaggaacatatcgacttcaagatgggctggtgctaatgatgatgatgatgatggggcagctccagtgaagaagaaaagtctgtctcctgcagactcctctgtggcagggcagtggaaaagagcaagtccagaacctggtgaagtatctggaggaaggacaatgtctaggtcatctgactctgggaaaatgagtaatgatgagaaagaagactttgaagcaaatgaagatgactatatggatgtcgacaagggacatgctagtgacagtgatacagaaaaccgtatgtcagatactgactcagacaatgaaatacacagacctgaaacccctgaaagagagaaggcaccacacaggtgtatcaatatgcttcaagattgcagaagtgttgatgagtttgagaggctcaacaaaattaacgagggcacatatggtgttgtatacagagcaagggataagaagacaagtgagattgttgcattgaagaaggtaaagatggagaaggagcgagaaggtttcccattaacctctcttagggaaataaatatcctcttgtctttccacaatccttcaattgtggatgttaaggaagtagtagttggaagtagtctagatagtatttttatggttatggagtacatggaacatgatcttaaaggtgtcatggagaccatgaaacaaccatatacccaaagcgaggtaaagtgtttgatgcttcagctgctagaaggtgtaaaatatctacatgacaattgggtgcttcatagggatctgaagacctcaaatcttttgttgaataaccgtggtgagttaaaaatatgtgattttggactgtctcgtcaatatggaagcccattaaaaccttatactcaactggttgtgactttgtggtacagggccccagaattgttgttaggaacaaaggagtattctactgctattgatatgtggtctgtgggctgtataatggctgagcttcttgccaaagaaccgttattcaatggaaaaacagagtttgaacagctagataagatttttagaacactcggcacacctaatgagaagatttggcctggctatgctaaattaccaggtgtgaaagtaaattttgttaaacaaccactaagggataagttcccagccgcttctttttctgggcgaccaatcctgtctgaagctggttttgatctattgaacagactgctgacttatgaccctgataagcgcatatcagcagacgatgctcttaagcacaaatggttctctgaagttcctctgcctaaatcaaaggacttcatgccaacattccctgctcttaatgaacttgacaggcgttccagaaggtatctgaagagtcctgatcctctggaagagcaacgtttgaaagaactgcaagggaacataggcaaccatgggctttttgggtgaactagaagcacttgattgggtctgcaagggaacataggcaaccgtgggctttttggctgaactagaagcacttgattgggtcctgtccgtcctaactgttatgcttcacactgaaatcctgagttcatgaggttagatatcttctgaggcttggtaccggtttaaatggataaggtttctccttgtggcccatcatagaaattttgttgcaggattaacgcttcatccagatcgatcataaaagcaaatataatctacctgcatcataaggtgtggcgtgttggcttttattggttacaccagtttcacctttggaacttctctatgtaaaatattccagattggtacgttgtaaacaatgtccagtgtgttggatttaaatttaaaacgaaacatcatcattattagttttctttatgctccttgtgccttttcttttgatctttgcgttttgtttgcaagagacaaaagaagcgcaggggaaggatgccttttgctttcatcaggaaatcaatggcattaatacaacttagaagctaagctgtggctgcttcaagataggaagcttgatggctgtcagcttattgtacctaagtgactaaattttgtggagggccttcaaaagtgttcatctcttactagtgaaccatggtgggattgccgagccgttcggctaaccgggctagccgataattggtggtggtcggctccaccttatcactgttttggattttgaatttggtaaagtttgtaaattttgaaaacttttgatgacattttttgtataaatactatatattatttgaagattttctgctgaaaccaaatttcaaaatacacaacgaatttcaaac

SEQ ID NO: 214160 - DNA, 3226 bp, Zea Mays
ccttaaataaatgaaccaaccgaaggtcaacagtccacacacaaggcccgaacagaaaaggcctggaggcgacccgtaacaacgcggagcgtcagcctatagccgtcgctcccgtgtcccgtccgccgtcccccttcctctcgtattcgcttcgccgcccaacccactgtgcaccgctgccttcccgaccgttctcgccgccgccgtctccgcgcctgccaccccgcgcgctcggccaccggcgcccacggtgcggctcgatcaaggccagatcagaacccgccccggtccgcgtcacgccgatattttctgttttttggtacggatctagggttttcctgctgcggattcgttcgattcgctcatggccgctgggcgccatgggggttacagggactacgaggcgagggagcgggagctcgacgcggaggcctccaggaggagcaaggagcagcaccaccatctcggcggccgccaccgcgacgtggaccgccaccgcgatggcgggcgcagcaggggtggcagagactttgccaacggctacggtcgccgacgctcgccgccaccccggagccggctggcgggaaggcttggtgaccgtgagcctggcgaggtgctgagcggtagtgcatctgatgactccggtgggaggccgcatagagggagggagaatggcgtgctcagttccggcagggagggtgatgtgatggcagtcactgatgactccggtgggaggtcgcataggaggagggagaatggcgtgctcagttccggcagggatggtgatgtgatggcagtcacagggatatcttcgccgagcaagaagaggaaattctcaccgataatttgggacagggatagcccaaagccaccacattctgatgcagccagggacaagaaagctgtagaacctgtgccttctgagctccctccgcccccgccgttgcctccacaagaccacatcacactgaggttggctgtggagaagtcacttatggatatagaacctactgttggtacagagagtgctgtgcagttgctggaacatgaggtgaataaggtgacagagcaggaagaggagtatgcaacaatgaggaacatatcgacttcaagatgggctggtgctaatgatgatgatgatgatggggcagctccagtgaagaagaaaagtctgtctcctgcagactcctctgtggcagggcagtggaaaagagcaagtccagaacctggtgaagtatctggaggaaggacaatgtctaggtcatctgactctgggaaaatgagtaatgatgagaaagaagactttgaagcaaatgaagatgactatatggatgtcgacaagggacatgctagtgacagtgatacagaaaaccgtatgtcagatactgactcagacaatgaaatacacagacctgaaacccctgaaagagagaaggcaccacacaggtgtatcaatatgcttcaagattgcagaagtgttgatgagtttgagaggctcaacaaaattaacgagggcacatatggtgttgtatacagagcaagggataagaagacaagtgagattgttgcattgaagaaggtaaagatggagaaggagcgagaaggtttcccattaacctctcttagggaaataaatatcctcttgtctttccacaatccttcaattgtggatgttaaggaagtagtagttggaagtagtctagatagtatttttatggttatggagtacatggaacatgatcttaaaggtgtcatggagaccatgaaacaaccatatacccaaagcgaggtaaagtgtttgatgcttcagctgctagaaggtgtaaaatatctacatgacaattgggtgcttcatagggatctgaagacctcaaatcttttgttgaataaccgtgggccccagaattgttgttaggaacaaaggagtattctactgctattgatatgtggtctgtgggctgtataatggctgagcttcttgccaaagaaccgttattcaatggaaaaacagagtttgaacagctagataagatttttagaacactcggcacacctaatgagaagatttggcctggctatgctaaattaccaggtgtgaaagtaaattttgttaaacaaccgtataatagactaagggataagttcccagccgcttctttttctgggcgaccaatcctgtctgaagctggttttgatctattgaacagactgctgacttatgaccctgataagcgcatatcagcagacgatgctcttaagcacaaatggttctctgaagttcctctgcctaaatcaaaggacttcatgccaacattccctgctcttaatgaacttgacaggcgttccagaaggtatctgaagagtcctgatcctctggaagagcaacgtttgaaagaactgcaagggaacataggcaaccatgggctttttgggtgaactagaagcacttgattgggtctgcaagggaacataggcaaccgtgggctttttggctgaactagaagcacttgattgggtcctgtccgtcctaactgttatgcttcacactgaaatcctgagttcatgaggttagatatcttctgaggattaacgcttcatccagatcgatcataaaagcaaatataatctacctgcatcataaggtgtggcgtgttggcttttattggttacaccagtttcacctttggaacttctctatgtaaaatattccagattggtacgttgtaaacaatgtccagtgtgttggatttaaatttaaaacgaaacatcatcattattagttttctttatgctccttgtgccttttcttttgatctttgcgttttgtttgcaagagacaaaagaagcgcaggggaaggatgccttttgctttcatcaggaaatcaatggcattaatacaacttagaagctaagctgtggctgcttcaagataggaagcttgatggctgtcagcttattgtacctaagtgactaaattttgtggagggccttcaaaagtgttcatctcttactagtgaaccatggtgggattgccgagccgttcggctaaccgggctagccgataattggtggtggtcggctccaccttatcactgttttggattttgaatttggtaaagtttgtaaattttgaaaacttttgatgacattttttgtataaatactatatattatttgaagattttctgctgaaaccaaatttcaaaatacacaacgaatttcaaac

SEQ ID NO: 214161 - DNA, 4005 bp, Zea Mays
cagaaaaggcctggaggcgacccgtaacaacgcggagcgtcagcctatagccgtcgctcccgtgtcccgtccgccgtcccccttcctctcgtattcgcttcgccgcccaacccactgtgcaccgctgccttcccgaccgttctcgccgccgccgtctccgcgcctgccaccccgcgcgctcggccaccggcgcccacggtgcggctcgatcaaggccagatcagaacccgccccggtccgcgtcacgccgatattttctgttttttggtacggatctagggttttcctgctgcggattcgttcgattcgctcatggccgctgggcgccatgggggttacagggactacgaggcgagggagcgggagctcgacgcggaggcctccaggaggagcaaggagcagcaccaccatctcggcggccgccaccgcgacgtggaccgccaccgcgatggcgggcgcagcaggggtggcagagactttgccaacggctacggtcgccgacgctcgccgccaccccggagccggctggcgggaaggcttggtgaccgtgagcctggcgaggtgctgagcggtagtgcatctgatgactccggtgggaggccgcatagagggagggagaatggcgtgctcagttccggcagggagggtgatgtgatggcagtcactgatgactccggtgggaggtcgcataggaggagggagaatggcgtgctcagttccggcagggatggtgatgtgatggcagtcacagggatatcttcgccgagcaagaagaggaaattctcaccgataatttgggacagggatagcccaaagccaccacattctgatgcagccagggacaagaaagctgtagaacctgtgccttctgagctccctccgcccccgccgttgcctccacaagaccacatcacactgaggttggctgtggagaagtcacttatggatatagaacctactgttggtacagagagtgctgtgcagttgctggaacatgaggtgaataaggtgacagagcaggaagaggagtatgcaacaatgaggaacatatcgacttcaagatgggctggtgctaatgatgatgatgatgatggggcagctccagtgaagaagaaaagtctgtctcctgcagactcctctgtggcagggcagtggaaaagagcaagtccagaacctggtgaagtatctggaggaaggacaatgtctaggtcatctgactctgggaaaatgagtaatgatgagaaagaagactttgaagcaaatgaagatgactatatggatgtcgacaagggacatgctagtgacagtgatacagaaaaccgtatgtcagatactgactcagacaatgaaatacacagacctgaaacccctgaaagagagaaggcaccacacaggtgtatcaatatgcttcaagattgcagaagtgttgatgagtttgagaggctcaacaaaattaacgagggcacatatggtgttgtatacagagcaagggataagaagacaagtgagattgttgcattgaagaaggtaaagatggagaaggagcgagaaggtttcccattaacctctcttagggaaataaatatcctcttgtctttccacaatccttcaattgtggatgttaaggaagtagtagttggaagtagtctagatagtatttttatggttatggagtacatggaacatgatcttaaaggtgtcatggagaccatgaaacaaccatatacccaaagcgaggtaaagtgtttgatgcttcagctgctagaaggtgtaaaatatctacatgacaattgggtgcttcatagggatctgaagacctcaaatcttttgttgaataaccgtggtgagttaaaaatatgtgattttggactgtctcgtcaatatggaagcccattaaaaccttatactcaactggttgtgactttgtggtacagggccccagaattgttgttaggaacaaaggagtattctactgctattgatatgtggtctgtgggctgtataatggctgagcttcttgccaaagaaccgttattcaatggaaaaacagagtttgaacagctagataagatttttagaacactcggcacacctaatgagaagatttggcctggctatgctaaattaccaggtgtgaaagtaaattttgttaaacaaccgtataatagactaagggataagttcccagccgcttctttttctgggcgaccaatcctgtctgaagctggttttgatctattgaacagactgctgacttatgaccctgataagcgcatatcagcagacgatgctcttaagcacaaatggttctctgaagttcctctgcctaaatcaaaggacttcatgccaacattccctgctcttaatgaacttgacaggcgttccagaaggtatctgaagagtcctgatcctctggaagagcaacgtttgaaagaactgcaagggaacataggcaaccatgggctttttgggtgaactagaagcacttgattgggtctgcaagggaacataggcaaccgtgggctttttggctgaactagaagcacttgattgggtcctgtccgtcctaactgttatgcttcacactgaaatcctgagttcatgaggttagatatcttctgaggcttggtaccggtttaaatggataaggtttctccttgtggcccatcatagaaattttgttgcaggattaacgcttcatccagatcgatcataaaagcaaatataatctacctgcatcataaggtgtggcgtgttggcttttattggttacaccagtttcacctttggaacttctctatgtaaaatattccagattggtacgttgtaaacaatgtccagtgtgttggatttaaatttaaaacgaaacatcatcattattagttttctttatgctccttgtgccttttcttttgatctttgcgttttgtttgcaagagacaaaagaagcgcaggggaaggatgccttttgctttcatcaggaaatcaatggcattaatacaacttagaagctaagctgtggctgcttcaagataggaagcttgatggctgtcagcttattgtacctaagtgactaaattttgtggagggccttcaaaagtgttcatctcttactagtgaaccatggtgaaaaacacaaagcgatttggttctcggaataaataaagtgaaagttagcatgtagagtatcgcaagatgtgctgtgccattcttctatttcaaactcaacttttatgaacagtttagtttgcaatgcaaaaatattgtgttttagctaatctgctgagcacaaccttacacaaaagacctttcgtagtttgttgtccacgcgttagattaatgcacaatcaacattaacctttatgcttaggcaccgtttagtttggggtgactaaagtttagttacttttattccctcagtaagcaaacatagtgactaaagtgaggtgactaaactttagttctttagttatcaaggacatggctaaaagggaataaagtaggatttttaccttatttgtcctcttcattttcttctccactaattaatagagataatataatcattattcacagcatttatgctctttagtccggtttagtcacttgaaccaaatgagatactttagtggctaaactttagtaattaaactttagtctatttactaaaggaaccaaacatggcctgccttagtatgttgttcctgcattagattaattaattaatgcacaagcaacattaacataggcccatttttggtttgtttatgaccgacaccaatagtcatcgttatgaggtctacgacattatgaatgctgtatatatgctaattgaacggattatcatgtagttaatacaaaatattaacctcattcttataactatattatcatgcacaatcaaagcattagctatcttttagctatcttttcgtgaatggtgctcatggtaatctcattctacttatcaatagtgtcatcctcttgcaactgtgtcatttccag

SEQ ID NO: 214162 - DNA, 3630 bp, Zea Mays
gaggcgacccgtaacaacgcggagcgtcagcctatagccgtcgctcccgtgtcccgtccgccgtcccccttcctctcgtattcgcttcgccgcccaacccactgtgcaccgctgccttcccgaccgttctcgccgccgccgtctccgcgcctgccaccccgcgcgctcggccaccggcgcccacggtgcggctcgatcaaggccagatcagaacccgccccggtccgcgtcacgccgatattttctgttttttggtacggatctagggttttcctgctgcggattcgttcgattcgctcatggccgctgggcgccatgggggttacagggactacgaggcgagggagcgggagctcgacgcggaggcctccaggaggagcaaggagcagcaccaccatctcggcggccgccaccgcgacgtggaccgccaccgcgatggcgggcgcagcaggggtggcagagactttgccaacggctacggtcgccgacgctcgccgccaccccggagccggctggcgggaaggcttggtgaccgtgagcctggcgaggtgctgagcggtagtgcatctgatgactccggtgggaggccgcatagagggagggagaatggcgtgctcagttccggcagggagggtgatgtgatggcagtcactgatgactccggtgggaggtcgcataggaggagggagaatggcgtgctcagttccggcagggatggtgatgtgatggcagtcacagggatatcttcgccgagcaagaagaggaaattctcaccgataatttgggacagggatagcccaaagccaccacattctgatgcagccagggacaagaaagctgtagaacctgtgccttctgagctccctccgcccccgccgttgcctccacaagaccacatcacactgaggttggctgtggagaagtcacttatggatatagaacctactgttggtacagagagtgctgtgcagttgctggaacatgaggtgaataaggtgacagagcaggaagaggagtatgcaacaatgaggaacatatcgacttcaagatgggctggtgctaatgatgatgatgatgatggggcagctccagtgaagaagaaaagtctgtctcctgcagactcctctgtggcagggcagtggaaaagagcaagtccagaacctggtgaagtatctggaggaaggacaatgtctaggtcatctgactctgggaaaatgagtaatgatgagaaagaagactttgaagcaaatgaagatgactatatggatgtcgacaagggacatgctagtgacagtgatacagaaaaccgtatgtcagatactgactcagacaatgaaatacacagacctgaaacccctgaaagagagaaggcaccacacaggtgtatcaatatgcttcaagattgcagaagtgttgatgagtttgagaggctcaacaaaattaacgagggcacatatggtgttgtatacagagcaagggataagaagacaagtgagattgttgcattgaagaaggtaaagatggagaaggagcgagaaggtttcccattaacctctcttagggaaataaatatcctcttgtctttccacaatccttcaattgtggatgttaaggaagtagtagttggaagtagtctagatagtatttttatggttatggagtacatggaacatgatcttaaaggtgtcatggagaccatgaaacaaccatatacccaaagcgaggtaaagtgtttgatgcttcagctgctagaaggtgtaaaatatctacatgacaattgggtgcttcatagggatctgaagacctcaaatcttttgttgaataaccgtgggccccagaattgttgttaggaacaaaggagtattctactgctattgatatgtggtctgtgggctgtataatggctgagcttcttgccaaagaaccgttattcaatggaaaaacagagtttgaacagctagataagatttttagaacactcggcacacctaatgagaagatttggcctggctatgctaaattaccaggtgtgaaagtaaattttgttaaacaaccgtataatagactaagggataagttcccagccgcttctttttctgggcgaccaatcctgtctgaagctggttttgatctattgaacagactgctgacttatgaccctgataagcgcatatcagcagacgatgctcttaagcacaaatggttctctgaagttcctctgcctaaatcaaaggacttcatgccaacattccctgctcttaatgaacttgacaggcgttccagaaggtatctgaagagtcctgatcctctggaagagcaacgtttgaaagaactgcaagggaacataggcaaccatgggctttttgggtgaactagaagcacttgattgggtctgcaagggaacataggcaaccgtgggctttttggctgaactagaagcacttgattgggtcctgtccgtcctaactgttatgcttcacactgaaatcctgagttcatgaggttagatatcttctgaggattaacgcttcatccagatcgatcataaaagcaaatataatctacctgcatcataaggtgtggcgtgttggcttttattggttacaccagtttcacctttggaacttctctatgtaaaatattccagattggtacgttgtaaacaatgtccagtgtgttggatttaaatttaaaacgaaacatcatcattattagttttctttatgctccttgtgccttttcttttgatctttgcgttttgtttgcaagagacaaaagaagcgcaggggaaggatgccttttgctttcatcaggaaatcaatggcattaatacaacttagaagagcacatagcatttacagagcagttgctcccatattagaaagctgaaaacgaaaatgatttcaagaaatgacctacgtgagatatttcttgaatggacgtattctcgttgccatttcaactacaagaaatcagtttgagttcatagctactaccattggagtgcttttctgaacttatgtgcactgccaatatatataggtgatttaactgtgacatgttcacaaaataaaattggatcttgaactaatgcgtgcatctaacatctatttggtatttaccttccatcttcatgtttttaattttgtaactgaggagagaaatcactttgaatttctggttattcattatgcggtgcatcttctgtcttatatgctctctgctcctctgttggttaacgcattgcttgagttagaagtaagtagtaggttcttgttcctcagcgccaaatggtttagtacttgttcaggaaacaatttttaagacgagtgtggaatagcaggaggataactgttatcaagataagtccagcactgtaatcatcgtatgttattgagcagttggtcatatatgtgaccaattgtttaagaacaataggtgacatgcatgatgatgacctgttgttgcttgtgcacctgcacgcagtttttctggtagccgtgactgggagattgcttttctgtttcttgttagcttatgattattccatcattatgtattcttcaattgggtatagttagctacttatttattccactcaagagctcagagtttgtgaaactcactacg

SEQ ID NO: 214163 - DNA, 734 bp, Zea Mays
ttcctgtttcgcctccattatacttatcatctggggtgttgatcctcctcttgcaacgacgagatctgtgaatgcttggcaagttgcgtcccttcctcctcttgcaacgactgggaggagtgtgatccggtcggaatcagaaagccaggcccagagcccttcttcttctactcgagccagcaggcacaccgacagtggcccttctgctacacccttttctgcaacgccaccgcgtacaataagcatccccagtgcttctccccccaacaacccagtgagcttgtctccactccagaacgtgaagaccataaagctctttggcgaaacaatctctgttgatggtggtggtggtggtggttctgaacaagtgaatcgagctcctccctcctcctaatggtggtggtgatgctacggatgatgacggtggtgttgaaaaaaaaatgtctaaaccaaaacgatgctcccgtacgtacttgaacgtatatatgccatgacacttcatccgttctcggtgtgttttttcttgtaaaacacacactgatctttgtggatgtcagctagcatgagagaagggactttagttgaacaccacctttttggccttttttcagtcgctatctgtccagactccaggctatataatgcttgcaaattacatttacctcttttagatgccaaacaagatcaatgctaagatgtatatgattgatccatatctgtcgtctccgctatta

SEQ ID NO: 214164 - DNA, 1329 bp, Zea Mays
atagaaaatgatattttatagtggtagtggggtatagggggagtatttagggggaaccgctgcgggagatggaaaaatatggggaaaaatagggggaaaagtgatatagggggaaaaatttaggggtaacggttgcggatagcctaactagcgattagcgaaaagaagaggacaagtcatcaagccccacgggccacggcgaacaaacagacatataggcagtacaaaagtgaggaaaaaaaacgaaaaaaaaacagggcgccctcacggcgaactcccacctcctatcgcccctcacctctcctttctctctctagccccgcacaaatctctcctcccctctcgccctcgccgcattgcccgccgacgaccccccggcccccgccggatagagaggaggaggagcggcgcggctgcgggagagccgggcggcggcggcggagcgggcttcatgtgcgacctagtggcccgcacgggccggcatcagcagcgatgcataccatttaggtatagagctaacaatgatgaaacctctggtgacaaaactaagaaactcgtggaagttctcatgataaattcccaaagcggacctggtcttttgtttccaaagggaggatgggagaatgatgaaactgttgaagaggcagcagctcgagaagctatagaagaagctggagttcgaggtgatatagtgcattttctggggctctatgacttcaaaagcaagacgcatcaagatgcgtgctgccctgagggtatgtgcagagctgcagtgtttgcgctgcatgtaaaggaagagctggcctcatggcctgagcagagcacccgacagaggacctggctcacggtccctgaagctgcatcaagttgccgataccagtggatgcaagaggccttgctgacaggcttctctgactggcacgacaagtggagcagaggcggcggcggcacaaactgtgacccggcctaactgctgacaggcccatctgcagtcgtccaatttgttcatctcctctctttccctaggcccccaaccttgcagaatgcaataatacagtgtacttgtcttgatgctgggttggtcattgacatgttatcttagttgtagtgggacgaggtacatctcatcaagacgagaattctcacaacttttaagtgtcaattctcgtgccctattatttctcggtttcatccgctgtcgtcgcggtgctgcagcctgcaggcacgcgccgcacgcattttgtaactccgctcctgattctggagatgcatatgctatatgtatgaactggtataactttgaaatcaaaagttgccactgttgactcg

SEQ ID NO: 214165 - DNA, 1466 bp, Zea Mays
gagtcgacgatctcccgttcagccgtcccagttccggatcactctctcggctgccactggtccgctccccgcgtctgcggcttccactctccgctcttcgctcctcctcccgccaagatatttccggagaatttgagagccccctcctggtcatgtcgctgctcgccgtcgcctcctccacccgcgccgcggcagtgcggccgctgtgcgcctcggcggcctcggacgaggcggtgccggcgcctgctgtggcggataccgcagggcggaggccggtgaaggtgatcctaccaaagaagaaaccgcagaagtggtcgacggggatggcaccgggtgagtacggcggtgggccggccaccatcaagccgcgcaagtactggtgggggaaggaggaccgcgaccccgtggggaacaccgacgacttcatctggaacaaggacttcctcccccacatggaacgcgtcatcgccaacggcggcgccgatgcagaacccaccatcacccgccttgcgccggtggatgaggagggggagtccgggtttctgagcatcaaccgcgcaatgagccttgacagcgtggaggttgatctgagccaggagcttcaggcgccgaccaggccaatcttgcaaacccaggttgaggctgcctggagaggacgggcaattggtgctgaggctgtgaatggagccagcgctcctagatggaggctagtccctactcgcagggagcaggcaaagtgggacagagcggccaaggcagccactggtggaagtgatgttatactaagggagtcaaagtcaagagtgcagcaaggagaccctaaggtattggcagctcggtccagagaagactacttacagctgaaacaaagattacagtggttcactttaggcattggtggcgttggtgtaatctctgcttatatttcatacactcctgaaattgctgtcagctttggtgcagggttgattggatcattggtgtatctccgcatgcttggaaccagtatagattccctagcaggtggaactggagaaactgtcaagagtgctgctgcacaaccaaggttgcttattccagtggtacttgtgatgatgtataacagatggaatcagatattagttccggattatggtttcatgcagcttgagttaataccaatgcttgttgggttttttacctataagattgctacattcgctcaagcaatccaggattctatacctccagtcggaaatcgtgaaggttgaaaagtgtcatgttgtatataaacgaaggtggtagccatggtccctggtcagtggtcacccagatagtaaggtatgtatagaagaatctggtctggtgtcatcgccaagtagatgagatgctcgttgaggacgccatttgaaaatctcgagtgcttaactatgttctgcacaaatattttgacgaaagatccaactcgttatctaggtccaccgatg

SEQ ID NO: 214166 - DNA, 365 bp, Zea Mays
gcattctcaaacgccgcagtggccatgacaaactaacatttcattaacatcctcagggcggcatgtcaaatgagatgtacagcaccattgccagagtgacagatggtatttatgaaggaattgcaattggaggggatgttttccctggatcaactctgtcagaccacattctgcgttttaataacataccacaggttaaaatgatggttgttcttggggagcttggtggaaaagatgagtattcactagtggaagcattgaaacaaggaaaggttgagaaaccagttgttgcatgggtcagtgggacatgtgcacgtctattcaaatcagaagtgcagtttggtcatgctatctttgtttcttgg

SEQ ID NO: 214167 - DNA, 2156 bp, Zea Mays
cttcctgaaccctgtgtcgctcacggaaccacggtcctagcgccgccgcgagagtcgtgacgacacatggcggccgcactcctgccggagacggcgccacggctgctgacgccggagacgctccgcacggcggcgaagcagtcccagggcatccacctcgtccccctctccctccgccgcgccatcaagcgctacctccgcgaccaggacagggcgcacatgaaccgcaaggtgctgctgctctcggcgtccttcgaccgcgccaagggcaccggagccgagctagccgcggccgccactcgcgccgcgctcctcgacgaccccaacgcgccgtcgggcgccgagcagcggtcggcgcgctggaaggtgcggtcggcctacggcgatattggcctccggtaccgcgaggacgagacagttgcctacgtcgcgtcacgcatgccagccatctacgccgcgtgccaccgcgtgctacgcgaggttagacgaaggttgccagagtttgcgcctgccaaggtgttggattttggcgccgggccaagttcagctctttgtgtggccaaaatcaatagagagggttaacctggtcgagccttccaaggaaatgcaaagagcagggcagagtcttctcgacaatctgaaggggttgccacttattcacagctatgacagcatccaagagttgaaccgcaaaatagaaaaacatgagcgaggccatgatcttgtagtatcatcttatgcacttggcgagattccttctttgagtgaccgaatcacaatagtgcgccagctttgggacctgacgagtgatgttttggttttgttagagcctgggacacctcaaggagcaaagatcataagtcaaatgcgctcttatattctttggatggaaaaaagaaagtgtcgcaaaattgaaaaatcctcaagccgtcctccaagtagcatgaagagtatcgtagcacaaaaagtctcattgaaaaatgggtcttttgtggttgcccctgtaagttgggatcataaatactgtatttatttctccaatactactaacttcaatttcacgaaagggcttgtagcctagtggttgtaatgccttagtagttattggcaccccagtggcttgggttcgactccagagcgaatttctggggctagattgagagaaacacccgtcacccctgctgttcgcctgttccagagatataagtggcctgcaagtgggtcttagttacctcctggacagatgctctgtggtaggcaggcattttgggtgttttcttggtcctgcagcgagaaagtttctgttatcaatacctgtggtcgtctttctcccagggctgagtttttaataattccaatctccatctcagtgtcctcatgatggtcgatgtcctttggagaattcagacaagtactgccactttgtccagagattggagaggacgtcatctcaacgtgccttcaagaggtcaaaaggtgtgcctttacgtggttttgaggacgaaaagttttgctatgttgctttaagaagaggcaaacgcccagaggaagcttggccgcttgatgacttgaactttgagacacttaaagaacgcaatgccaagagaaagccagaagatcttgtcatcgactatgacgaccaatttccaagcgaggaagacgaagaggttcatgtcgatggtggggacagtctggtaccatatgcttcagatgaacatgaattaagtcttttccatgacagtgaagaagcagaggcggaacaaacggttcgtgctgaccttggaggaggttggggccggattatatacagccccatgcgaagagggaggcaagtacaaatggatgtatgccgttccaccaaacgggacgcatccgaaggcacatttgagcgtgtagttgtcacccgaagcaagaaccctaccttgcattttcaggcccgtaagtcactttggggtgacctctggccattttaaatcagtatcctcaagtttggttaaagccatattgttagggaaaattggctgtgtaccctaaaccctaaaagattgcatctttggagatgaaccattaaaagaactcttctttgttatgtatcatggaaagattacatttatttgaatctcaccacatctgagaagtctcagttaaacaggaga

SEQ ID NO: 214168 - DNA, 2912 bp, Zea Mays
gaaggcgagaagctcgcaaagaaaaccaaaccagaacccaccctcgtcgtccgcctccagagaagcagaaaatcgtgtcccgagtccgccgccctacgcctactgctcctcccaccaccaccaaacaaacaccacaccgcgcgccacgcctccgtctgccggcggtgaccgagccagctcatcagcggccaaggagcgggatgccggggccaggagcgcacctgctgtacgctctgtcgggcggtgcggcgctgtctcggctcgccggcccggaccgccgcttcgggccgcaccactgcgccgtctacgcagcgaacgcgttcctcggcccggacctcggctccttcgccgagtggctctgctccttcctcccctcggcctccgccgcgggggacctcgccatggccgccgtgcaccaccccttctactacccgctcctcctcggcctcccgctcgcctgggcctacgcctggctctcccgccgtctgcttcgcgccggcgtcctcgactctccctccggggtaccattaagaaagaggcagtgtttcttgctgatctctgccggctcgctctcccactttttcttggatcacttgtttgaggagaatgggcattctacaatgtacacttggatactgagcactggttggtggaaaggtcgtgctcctatcaatccagatgcagtgctcgtcgtaggacttctttgcacttgcctcatggggggatatgtgtacatcaacagagtgaatcatggaaggtctgcagcagaaaaatcaaaaccaatctttctttctcattctgatgatagccaccctgtactgtatgtggtgtgccagtcagatatacctgcggcaaccccctcaacctgccataggtgaagaagctgatctcggagtgataatatttcttgcgatttatctttttctcccacatggcctgtgcgccctttcgatgaatcaaaaggattatacagatgcactgaatgaattgccacttcaataatgcgtgtcgttattattcatttttcttccagtctgtgcagaatatcagtttggtaacagtctggtttctgcattatgttgtaattagatttagttactacctgaatgattactagtgcacttatgtatagccctgtaattctggaagcatatattattgtggaacaaagctgtatggatggtgctgacttctggtgaaaaagaatttcatctttttcattggtcgcagaggtggatcatatggatttgtattcaaggcacacatgactatatttttcatttggcactagttggtatatgctataaagtgatgatgtctgtcaagctagttatcgtgccttgtacacttaccagcgtttcctttttatagtaagttgaaagatagcatattcacttggaccatcacagtgaattcaagtgctgcattaaactcattatactaagaggtatcatgcttgacacctttagggctagtttggtgacaaagcaattgaggaggattgggcgggattgaggaggaaatggactaatttcctcctcaatcccccacaattcccttgtcaccaaactagcccttataggtttttctctactgtagctatacttctctgtatagtgtgacagaaaaggtgctgaaatattcaagcctgtgctctaatagaagtctagatcgtagtactgtccctagatttggtctttcagtatctctggttataggtgtgaactaattctattggtttgtcttaacttttctgatgtaaatttctcatcactcgaatggtttttcgttcacttagcgcacaaaaatgcttaagcatggtcatgtaaacatcaagggtcttaaggattacacataatagctatgcaagggattcgacaatgctaatgttgttgtgttttgcatcatctctcatggatatctcaagagccttctcaagtcttgacacaacttgctccatggatggccgttgcttcttgtggccagtgcataacagagcaagcttcaaactgaggtcaaatgcctccgttgaatactctccattcaacctaggatcagcaaactctgatacattgccatcttggataagtgtagaagcctgggaacaaaagtgacattggcatagcagtattcatgatgttgattgctcgtcttcctgagaggagttggaggagcaccatgccgaagctgtacacatcccctgcagcattcaccctgtggttgtggcggtattctggatcaacatagccaaatgttcctctgacttcagagcttacgtgcgacacacctaagtcgatgactctagagagtccaaaatctgacagcttgggttccatatcaaccccaagaagtatattggttggctgtcatagaaagtccttcagggtatatgtgcaggaaccaaaggccacaagcacttccaagtgctatctgaagcctctgaatccatggaaggttaccgttgatgcacagctcatacacaagaaaacactcctcctgcccgtcacagtaacctcttaatgacacaaggccagccatttgtcagcactcctctgtataccttgcctggaaccacaagatgaaccagttgcacaccataaaggacaacatatacttgaacagtagtctcctcatactcaagggatgccaacgcgacctctgcaagaaaaaaaaacatgtgcaacttcgtattgctattaaaaacagctatggccccaattatcaccccagcacagaggcatcctagcaacgcttcgtatcctgttgataaattttgaggagctcaaagcttgaaagatcaagtagaaaggcacactttgtcttcaactgtctgttggtttttactgctgttcagcctgtccttatgttgattgttttgttggatatgtggatgttaagttgttataatcgac

SEQ ID NO: 214169 - DNA, 2755 bp, Zea Mays
ctcacaatcacagccttgcaaatgcgacgtgtttcgttattcctactgtgatttatctgtgatccctaggtttaaatggtataagtccatagatcttctgtacagcatgtgggttctcaacaagtggaaatacagctcaacgccagtgtatggcgtttacttggaagaacatgcactgagtatgcagcacaaattttcagactagactagaagagggaaatgtcgaacctgatatgctcttgcaaggaaaacaaaacgtactaaaatgcacctcattgttcacaccactacagctggttgcactaaagctgccagtggtttacatgcttttattactccagcaaaccccagcaatgttaataactaagttgctaaagcatatatgcaacctgaaacaccacagagatcatgatttggcaaagaagcacaattcagctatctgggtgacgtatgacatgacaatggtatctcaaatgctagaagttgaataagacagccttcctcaactccagtataaatagttcatgctcagactgcagcttcctcagtcccatagggaggaagttgagagttctaataagagcaacggccaataccattagcgagttatttttctgcaatatatgtcagcaaccgatcatttggttatggctcgtgtcatacaggatgtattggatccctttacaccaaccattccactaagaataacgtacaacaataggctacttctgccaagtgctgagctaaagccatccgcggttgtaagtaaaccacgagtcgatatcggtggcagtgacatgagggctttctacaccctggtactgattgacccggatgccccaagtccaagccatccatcactaagggagtacttgcactggtaaaaaaagcgcaatatgttccacttcctagatttggttctttttcgctttgccttattatgatattggtccactattgtgtaggatggtgacagatattccagaaacaactagtgtcaactttggtaagaatgcatatagttatctgtcattccattgtgtttctgctgaatatagtatctgtggagcttaggttgtagtctcttcttgcttctcagacctattggctaccattgaactgatgcagataaggatgcaattaatacatgaaatcagcaaccataggctgaatgctagaccaacttgttaggtgaatgcaatatggcagcttaccgcttacatgcatagtaatatcatgaaatccactaacttagtaccataactaaagaagcaatctggtagaactcactttcaatccagcccattactagagactggattatcgatattaaacacaaacaagtatttaacagtgtaataaactggtatacgtatgattcacagtgcccctgtttgttctttaattggttggtaaccttgaggtgtcaatttcagcagaactaaggttcatttacagttgccatactaaagttactcaagtacactttttagtttacatagttttttcatactcgattttacctgagactttgaaaccgatattggaaacaaagcagccattaattttgtcaaacaagaggagctatatttaaaggcttctctttgtctaaattgaaagaattaaaaacaataaatgacgacgcttccacatacttcagtgctccttgaactattcagtatataatgtcaggatgctctcgcaggccaagagctaatattttatgagaggccggacccaagatctggcatccacaggctggtatttgtgctgttccgtcaacttggcagggggacagtttttgcaccagaaatgcgccacaacttcaactgcagaagctttgcacggcaatatcacctcagcattgccaccgctacatatttcaactgtcaaagggaaggtggatccggcggaagaaggtttagggaagagtagaaaccataggccactgcatggtcacactatagaaatatcatcaataatgtgcactatattgaatcaatgcaccacctctatatgctgaatgttatgtatctcaaactatgattgtactgacttgaaaggttgagagcttagtctcttagcagaatatagcacaatattactagtatgttccatgattaatcagacaaagtattctccttggagaagcaagtacagtctcaggatcttactagagtacctgcttgtttcaacaggtattaaacaaactcagcagtctgaattatccaaagtatatttcatggaaaacaatcacagcatcacatagtgtatattattccttgctccaatcagaagagcacattataccttattcacattcaaagtattgtgccccagttgcttagaaagtagtcaacaagacgctataaagcattacaaattctcagaattaacttacagcagaatcaccttggagaggaaactaatcacttcttctcaagatggcacacctccaccaattcccatgactccaagcttatatctatggcatccttctataaagcacaagctcagtgatatcaaactctattccacagatatccttgatcagctcatctatcttcttctttgcctcctcatcaattcatcatcatcatctgtaaagtctccatataagagtctgacgtgcggcaaccaagtgtcagtactaagtagtcaatagcatgtgatttttcactcaggaacagaattcagctggtacactcacgagtttttctcctataaccgaagtcggcacagcagtgatcgctcg

SEQ ID NO: 214170 - DNA, 1190 bp, Zea Mays
gtacggtactcgcgtaccctgcacggtggacctgctgagcaggatggactcgccgtacctggtggggctgctgggctactgcgccgaccagagccaccggctgctggtgttcgagtacatggccaacggcagcctcaagagccgcctccaccacccggcgcccgccgcagccgcagccgcgggcccgccgccgccgccgccgctggactggcagacgcggctgggcatcgcgctggactgcgcgcgcgcgctcgagttcctgcacgagcacagcagccccgccgtgatccaccgcgacttcaactgcagcaacgtcctgctggaccataactaccgcgcccgcgtgtccgacttcggcatggccaaggtcggctccaacaggacagacggccaggtcgtcacccgcgtgctcggcaccacaggctacctcgcgccagagtacgcgtcgactgggaagctgacgaccaagtcggacgtgtacagctacggggtcgtgctactggagctgctcaccggccgggtaccggtggacacgcagcggccgcccggagagcatgtcctggtttcctgggcccttccgcgacttacgaaccgccagaaactcgtgcagatggttgaccctgccctgaaaggccagtttgccctcaaggatctgatccaggtggccgccatcgcggcgatgtgcgtgcagacgaaggcggagtacaggccgctgatgacggacgtggtgcagtcgctgatccccatcgccaagaccaccccggcgatgtcctgctcctccacgccgctcagaccggccctgcagcacgtcatcttcatgggcccgcagtgcggcgacgacaaggcatcctcctagccctagtcctgccatggaggtaccctacccaccactgcctggatcggagcgtggtggagtcggtggccatcgactatagcgcgcgctaagaattctcgttccttgatgtatagagctcctcccctcttctccaggatctgcagacgcaacgcatcgttgcagtagtgcatcgtgattgtattcgggcacaagcgtacggcgtgtcatttattggtacggactgttttaaagataacatggaaatacaaataaatattctttgttcatcatcttcttttttacaaataagtagagtgagaggacacttcttattgtagaaaggatttaattgaac

SEQ ID NO: 214171 - DNA, 2185 bp, Zea Mays
gggttagcgtatcgaaatcaatcgtgttcctcgcctgcacgacgagagcccgagaccaatccagccgccgcctccgccttcgcctcgcctagtattccctccgattcagaggccgatggagtgcatcgccgagatgccccgcgcgccgctggacagcaggctgcgcaagcgtcagcgtctcggctgggacgtcggccctgccgagatgtataaggccgtgcggccgcggcacgggtgggacgtcggccccgccgagatgtatcagttagaactttgtggacaagaagttgtgaatgccatcagtgctgcagccttgggcctttcgtcgggctgtgtttcttctcaagtcaaacaagagcagcctcatgatggttcccctcctctgagagaagatgacagggatgggcattatgtttttgctgttggagataacctcacatctcgctataagatcaatgcaaaaatgggagaaggttatgtttgtaacgaatgtgtctggaatacattaggtacctttggtcaggtgttggagtgttgggacaaggaaaggaaagaaatggtggctatcaaaatcattaggggcattaaaaagtacagggatgctgcaatgatcgaaattggcatgctcgagcagcttggtaaatatgatgaaagtagatctaggtgagtttgctggttcggttaacacccttctgtatgctttacattcataagattgcttgtatatataagctggtctattttgcagttgtgttcaaattcggaactggtttgactatcgtaaccatatctgtattgtaagtacattgttagattgtggcaattatgaactgacccaaaaagataaccatgtggtgcttaaacattggtgaatttggatcaatggtgagcaggtctttgagaggcttggaccaagcttatatgattttctgcgggaaaacagttaccgctcattcccaattgccctagttcgggagattgccaaacaactgttggaatgtatagcatgtgtgtgcacagttcttcctattatcgctcctgcactataatgcatatacattagtttttttttgcaatatatgtgcagcattgtagcctatcattaatccatattactactcatgcttaaggaatatctaacatcatgggatgtttatgtatttaccctctctctgtaatgtgttgcagttatgcacgaattgtgtctcatacacactgatttaaagcctgagaacattctccttgtttctccggagtacattaaagtgcctgattacaaagtttcatcccgatccccaaaggagggatcctattacaagcgggtgcccaagtctagtgctatcaaggtgattgattttggtagcactacctatgatcaacaggatcagagttatgttgtgtcgacgaggcattatcgggctccagaagttatactgggacttggatggagttacccatgtgatatctggagtgttggttgtattcttgttgagctttgcacgggtgaggcgatattccagactcacgaaaacttggaacatctggctatgatggagagggttcttggacctttgccataccatatgttcaagagggcagatcggcactctgacaaatacatcagaaaaggacgcctgaattggcctgagggttgcacttcgcgtgaaagcatgaaagctgtgatgaaattgtccaggcttcagaacctggtgatgcaaaatgtggatcaagctgcaggagatttcattgaccttttgcaagggctgctgaagtatgatccatcaagccgtttaacagcacgagaggccctgaggcatcccttctttacccaagggttttggcgaagatgatgatactccttgcattctaccttgtttgtctgacttgatgtcttgcatttgacagtctgtacttttcagtggtgtatgtaggcggtagatcaatctgtataaagccgttgtagagttgtttcagtcttgtttggaacgtcgtgcagattaagttgtagcataatggaagtcaaatggatgcatttgactttaaatcctgacttgtttgaatttggaatgtcaatggaaatctggtttgaggagaaagtgaacatcatatattaaggccctgtttgatttacttccaggattatataatccagcttatggattatataagtacctattgacgtcac

SEQ ID NO: 214172 - DNA, 1657 bp, Zea Mays
ccaatacccgccataaagggcggcgggccgctagggttagcgtatcgaaatcaatcgtgttcctcgcctgcacgacgagagcccgagaccaatccagccgccgcctccgccttcgcctcgcctagtattccctccgattcagaggccgatggagtgcatcgccgagatgccccgcgcgccgctggacagcaggctgcgcaagcgtcagcgtctcggctgggacgtcggccctgccgagatgtataaggccgtgcggccgcggcacgggtgggacgtcggccccgccgagatgtatcagttagaactttgtggacaagaagttgtgaatgccatcagtgctgcagccttgggcctttcgtcgggctgtgtttcttctcaagtcaaacaagagcagcctcatgatggttcccctcctctgagagaagatgacagggatgggcattatgtttttgctgttggagataacctcacatctcgctataagatcaatgcaaaaatgggagaaggtacctttggtcaggtgttggagtgttgggacaaggaaaggaaagaaatggtggctatcaaaatcattaggggcattaaaaagtacagggatgctgcaatgatcgaaattggcatgctcgagcagcttggtaaatatgatgaaagtagatctagttatgcacgaattgtgtctcatacacactgatttaaagcctgagaacattctccttgtttctccggagtacattaaagtgcctgattacaaagtttcatcccgatccccaaaggagggatcctattacaagcgggtgcccaagtctagtgctatcaaggtgattgattttggtagcactacctatgatcaacaggatcagagttatgttgtgtcgacgaggcattatcgggctccagaagttatactgggacttggatggagttacccatgtgatatctggagtgttggttgtattcttgttgagctttgcacgggtgaggcgatattccagactcacgaaaacttggaacatctggctatgatggagagggttcttggacctttgccataccatatgttcaagagggcagatcggcactctgacaaatacatcagaaaaggacgcctgaattggcctgagggttgcacttcgcgtgaaagcatgaaagctgtgatgaaattgtccaggcttcagaacctggtgatgcaaaatgtggatcaagctgcaggagatttcattgaccttttgcaagggctgctgaagtatgatccatcaagccgtttaacagcacgagaggccctgaggcatcccttctttacccaagggttttggcgaagatgatgatactccttgcattctaccttgtttgtctgacttgatgtcttgcatttgacagtctgtacttttcagtggtgtatgtaggcggtagatcaatctgtataaagccgttgtagagttgtttcagtcttgtttggaacgtcgtgcagattaagttgtagcataatggaagtcaaatggatgcatttgactttaaatcctgacttgtttgaatttggaatgtcaatggaaatctggtttgaggagaaagtgaacatcatatattaaggccctgtttgatttacttccaggattatataatccagcttatggattatataagtacctattgacgtcac

SEQ ID NO: 214173 - DNA, 1598 bp, Zea Mays
gttgcgtgtgcccgtgtccgatccacccaccacccaatacccgccataaagggcggcgggccgctagggttagcgtatcgaaatcaatcgtgttcctcgcctgcacgacgagagcccgagaccaatccagccgccgcctccgccttcgcctcgcctagtattccctccgattcagaggccgatggagtgcatcgccgagatgccccgcgcgccgctggacagcaggctgcgcaagcgtcagcgtctcggctgggacgtcggccctgccgagatgtataaggccgtgcggccgcggcacgggtgggacgtcggccccgccgagatgtatcagttagaactttgtggacaagaagttgtgaatgccatcagtgctgcagccttgggcctttcgtcgggctgtgtttcttctcaagtcaaacaagagcagcctcatgatggttcccctcctctgagagaagatgacagggatgggcattatgtttttgctgttggagataacctcacatctcgctataagatcaatgcaaaaatgggagaaggtacctttggtcaggtgttggagtgttgggacaaggaaaggaaagaaatggtggctatcaaaatcattaggggcattaaaaagtacagggatgctgcaatgatcgaaattggcatgctcgagcagcttggtaaatatgatgaaagtagatctaggtttcatcccgatccccaaaggagggatcctattacaagcgggtgcccaagtctagtgctatcaaggtgattgattttggtagcactacctatgatcaacaggatcagagttatgttgtgtcgacgaggcattatcgggctccagaagttatactgggacttggatggagttacccatgtgatatctggagtgttggttgtattcttgttgagctttgcacgggtgaggcgatattccagactcacgaaaacttggaacatctggctatgatggagagggttcttggacctttgccataccatatgttcaagagggcagatcggcactctgacaaatacatcagaaaaggacgcctgaattggcctgagggttgcacttcgcgtgaaagcatgaaagctgtgatgaaattgtccaggcttcagaacctggtgatgcaaaatgtggatcaagctgcaggagatttcattgaccttttgcaagggctgctgaagtatgatccatcaagccgtttaacagcacgagaggccctgaggcatcccttctttacccaagggttttggcgaagatgatgatactccttgcattctaccttgtttgtctgacttgatgtcttgcatttgacagtctgtacttttcagtggtgtatgtaggcggtagatcaatctgtataaagccgttgtagagttgtttcagtcttgtttggaacgtcgtgcagattaagttgtagcataatggaagtcaaatggatgcatttgactttaaatcctgacttgtttgaatttggaatgtcaatggaaatctggtttgaggagaaagtgaacatcatatattaaggccctgtttgatttacttccaggattatataatccagcttatggattatataagtacctattgacgtcac

SEQ ID NO: 214174 - DNA, 1321 bp, Zea Mays
ccgagagcccgactccaccagccaaccctagagcctctccagtctccactgctcggccgccgcctgccgcagcccgccgtccactggtcccgcctcccggcgtccgctccacgcctccactgctcccggcgtccgctccattgctaccatcgtccggcgttctgctcctgcgccctccctttgattcgttgccagttgtagtgtccgggcagatttgagctgtggcagcaagcaaggattgacgaagcgtgcgttcccatcgcaccaccatgggctacacagagatcgacatccgcccctctgggagcggcaaggtaccgaccccctgcccttacaactcctagagctctacccctcacgctgaccttagggagacaggatggtttgctcgcctactagaggacatgctctgatggtgttccctctgctaccatttttagttcttgcttgtaaagtgtatgttctacattttgaaatagaactggattgtgcatattttgttctacatgtaaagtgtatgttctacatgtaccttttagatcgcttgcaatatgatttattttaacacatatttgaaatagaactggattgtgcatattttgtaaagtgtatgttctacattttgtaattcgtattattcatttttcctttagtttttctctttctacaactcctgtctctttacaatcaaatttcagatgtgatagatattagtatgaaagataaaaactagaatgctatgcctgtcagaggagctttcttcagtttcaggtactgctctgctttattagtcatccagccgatggataatttctatacgtgtatcacccctgcactttcaaacacttatgttcattgtttccaatcacataattttttttcttctcttagatttactatgtggttgtggtctcagtttggtttgtaggttaatttgtatactcatgtgattttagtttttccgtgtattttatgttcatttagtatgtcttaatttagttactttcaattcttgatgctaataatatggatagattgcgacactactttctggcttgagcagaaatgagtttgttgtatatagcagaatatagttgtcgtagctggcaacaatgaccgctctttggatgatctgaaaactattctgtagtcaggtagttaaatatagctgaatatacattattatgttttattaatcttatttgttttttctatcaaaagaacacacctctccatctttcggtgcttggtggatcaccgtctaaacgatccaccaccagaaccgcccaaccccaagatagtctcctccatccaacctttc

SEQ ID NO: 214175 - DNA, 3553 bp, Zea Mays
ccacctacctggtcgcccaacctactgcctatacgaggggagggggatagggagtagcagtagccagtaggcagcgtagcactgcggctcctactaccaagtaccaaccacacctccaacccccgccgtataccaatccgccggaggtctctattcagtccacttgcctttttccctcaccggtcactgcatcgagctatcggagtggtagatctgccggtgcggtccccagtttggatcttgatgatttggtgacttgagtggccgattttcttcgagcaaactggtttttgggaagtgcggtttcctcaatgtctatttgaatcacagcatactgaactgaatcaagtgataattgtgttctggtcatacactaagatatacctgaaacttctgcttcatatgttcacacatcataaatattccaacaaaggtcagatgaacagcgaaaggaatgtgaagatcatatcaggtcgtgatgggcaaaagaagggaaattcacagtatggccaaattgtacacatgccaaaggacatggtcacaacagtcaatggaaacgtagatgcaaaatttgaagatgaagttagagttgtgaagaatgataggttccaaaggcaacgagagtcttggggtggggaatgcaagaagggctcaaaaccatggcctggtcgaaaggcagctactgttgatgaacttgttaaacatatgtcaaatgttccttcatatttacagcgtaaagaaacttctgaccatcttcaagacaaggcactgaatgttggagttcttgagtgggggcttcttgctaactggtctcagcaagaaaagcataagctcactagaagctatggaccatctccacccaatactagcaggtctgtactattcccatctccatcacattcttctccaagccccagcagcagatctcttgagagtaatcaatctaccccaatgagtggccatcatcattcatccatcagagcacagcagaataggctcacagataaacaccatgagagggccagatgtccacctagcccaaattctgcagtactgagcttattgtcaggtcatggcacacatccctgtccagagaacggtcataattatgttgggttgggtctcagcaatgtttctttagcctcagactctctaggttcttcctctagaagttgtggaagacatgaaatggttggagatgaagagactagacggaagactgaagacgttgtccatcattgttctcgtaggctttttgcagacagcgataacattgggaaacatttcttcgcatcaaataccaatgactccatgtgtaatgatcctgaacagagtattggcttgaatggggaaaattttgagtcactaacgtctgatgctgtaatggacacagctagaaatgacagtaagtcgtctgactatttactggaggatattgagccatcccttgaatttcctcgaatcccatattcatgtccacttcccatcatagattcagcagccaaagagattggcatcactagcactgaggctggagatgcaaaagtgagtaaaaattctaaccggaaccaatctgccatgaatgtcactgagaatcctccccaatactcagcaaagtttagtgataagatgccttattgtcatctaggttctgggatgaatcgagggagctgcagctctagcctcaaggagtcaccacatattcgacaacccaatatagttcctcctgtcgataagacaggagacaggtcatcacccaacagcaaaggtaggcgaagcccattgaggaggatgttagatccaatattaaagccaagacattctagtccagtacgtccttcatttgttcctaagtgtcaacttccagtcaataccaccaagcagtctctggacttggggaaatcagtgccacataatgttcagcgaaggtcggttgatttggtagtcaattcgaattatctgatcgaagaaaatagaaatcagcctcctccccgtgtgctattgaacagtgcaagatacatacaaaaaggaaatgattcagcaacaacaaggcaagcacttctgcagctagcatggaagaacggcttgcctttattcatactctcttatggtgattctgacatcctggcagccactgttagaaggaagggcatccctgaaaaggatggtctggaaagcacatatgctgtattcactgttgaagaaccgaagaaaaaaagtggagcttggatcaagacagggggcaagaacaaaaaacatcaccttttatctagcatagttggggaaataaaggttgcgcgtcgaaaatcaagatgccaccatacaaccgatgttcatgtacacagggaatttgtgttggttggttccaaatttctaccatcgtctgaagaatcaggtgattcaaatgttagtggagagcttgcagcttttatcagcacacttcctcagcaagaagcagaaacctcgaagcaatcatcttcacagaataccaggcaaagaaattcaatgccaattggctgtggttgccccccactgggaaatttccatcctagcacgagaagtgctaattctgcttcagccaatgttgttgcagtacttcctgatggcttccatggcacaataacatctggacagccattgcctttgattgagaggtggaggtcaggaggagcttgtgactgtggcggatgggatgaaggttgtatgctaagcgtcctcactgatgcgtccgaagaaaatgatgccattcaggctaaccaggcaaaggatggcagccagagatttgagcttctagatcagggtcgatcacgagaagagaggcatgccttcagtatgacttccttcaaagaggggctttatacagtggaattcagatcatccattgcattacttcaggcttttgcaatgtgtatagtgatgctccatggaaggtacccaagaagaacgcaagttggctcgcaagcagagcaggagcatgatctccttgctggtcatgagctcaaggcaatggcagccagtcaaggaagaaggcctccgacaagctatgtgccccaccggccacctctttctcctgtaggccgagcctagcttatcacgatttagtgtatgttctttctgtgtctgtcctctttcttcagctgcgtagtgccggtgggattgatataccatggtccaatggtccatatgtaatacgcatgtccaaagtgacaatctctgcgcaagtctttagagatagctccctgtacatgctgtgatgttgttgatggtgtatgactgtaccagtaccgtgatgtggctgcaaggtccatctcagtgcttagttacccttttatatgtccgcttatctgttgcttctgtatatgctgaaatgcgcctgcaatctgttgcaacccttgtttaaattgtgcgttgcatcgcagcagcatttgtgcagctgctgaagttatgttttctggatgtctgaagcctctcgtttctgaatgcgtccagattaagggcctgtttggttcgtggctagctatgtcacactttgcctaaggttagtcgttcgaat

SEQ ID NO: 214176 - DNA, 3388 bp, Zea Mays
ctacctggtcgcccaacctactgcctatacgaggggagggggatagggagtagcagtagccagtaggcagcgtagcactgcggctcctactaccaagtaccaaccacacctccaacccccgccgtataccaatccgccggaggtctctattcagtccacttgcctttttccctcaccggtcactgcatcgagctatcggttcgtctctccctttccctcaggagtggtagatctgccggtgcggtccccagtttggatcttgatgatttggtgacttgagtggccgattttcttcgagcaaactggtttttgggaagtgcggtttcctcaatgtctatttgaatcacagcatactgaactgaatcaagtgataattgtgttctggtcatacactaagatatacctgaaacttctgcttcatatgttcacacatcataaatattccaacaaaggtcagatgaacagcgaaaggaatgtgaagatcatatcaggtcgtgatgggcaaaagaagggaaattcacagtatggccaaattgtacacatgccaaaggacatggtcacaacagtcaatggaaacgtagatgcaaaatttgaagatgaagttagagttgtgaagaatgataggttccaaaggcaacgagagtcttggggtggggaatgcaagaagggctcaaaaccatggcctggtcgaaaggcagctactgttgatgaacttgttaaacatatgtcaaatgttccttcatatttacagcgtaaagaaacttctgaccatcttcaagacaaggcactgaatgttggagttcttgagtgggggcttcttgctaactggtctcagcaagaaaagcataagctcactagaagctatggaccatctccacccaatactagcaggtctgtactattcccatctccatcacattcttctccaagccccagcagcagatctcttgagagtaatcaatctaccccaatgagtggccatcatcattcatccatcagagcacagcagaataggctcacagataaacaccatgagagggccagatgtccacctagcccaaattctgcagtactgagcttattgtcaggtcatggcacacatccctgtccagagaacggtcataattatgttgggttgggtctcagcaatgtttctttagcctcagactctctaggttcttcctctagaagttgtggaagacatgaaatggttggagatgaagagactagacggaagactgaagacgttgtccatcattgttctcgtaggctttttgcagacagcgataacattgggaaacatttcttcgcatcaaataccaatgactccatgtgtaatgatcctgaacagagtattggcttgaatggggaaaattttgagtcactaacgtctgatgctgtaatggacacagctagaaatgacagtaagtcgtctgactatttactggaggatattgagccatcccttgaatttcctcgaatcccatattcatgtccacttcccatcatagattcagcagccaaagagattggcatcactagcactgaggctggagatgcaaaagttctgggatgaatcgagggagctgcagctctagcctcaaggagtcaccacatattcgacaacccaatatagttcctcctgtcgataagacaggagacaggtcatcacccaacagcaaaggtaggcgaagcccattgaggaggatgttagatccaatattaaagccaagacattctagtccagtacgtccttcatttgttcctaagtgtcaacttccagtcaataccaccaagcagtctctggacttggggaaatcagtgccacataatgttcagcgaagtgcaagatacatacaaaaaggaaatgattcagcaacaacaaggcaagcacttctgcagctagcatggaagaacggcttgcctttattcatactctcttatggtgattctgacatcctggcagccactgttagaaggaagggcatccctgaaaaggatggtctggaaagcacatatgctgtattcactgttgaagaaccgaagaaaaaaagtggagcttggatcaagacagggggcaagaacaaaaaacatcaccttttatctagcatagttggggaaataaaggttgcgcgtcgaaaatcaagatgccaccatacaaccgatgttcatgtacacagggaatttgtgttggttggttccaaatttctaccatcgtctgaagaatcaggtgattcaaatgttagtggagagcttgcagcttttatcagcacacttcctcagcaagaagcagaaacctcgaagcaatcatcttcacagaataccaggcaaagaaattcaatgccaattggctgtggttgccccccactgggaaatttccatcctagcacgagaagtgctaattctgcttcagccaatgttgttgcagtacttcctgatggcttccatggcacaataacatctggacagccattgcctttgattgagaggtggaggtcaggaggagcttgtgactgtggcggatgggatgaaggttgtatgctaagcgtcctcactgatgcgtccgaagaaaatgatgccattcaggctaaccaggcaaaggatggcagccagagatttgagcttctagatcagggtcgatcacgagaagagaggcatgccttcagtatgacttccttcaaagaggggctttatacagtggaattcagatcatccattgcattacttcaggcttttgcaatgtgtatagtgatgctccatggaaggtacccaagaagaacgcaagttggctcgcaagcagagcaggagcatgatctccttgctggtcatgagctcaaggcaatggcagccagtcaaggaagaaggcctccgacaagctatgtgccccaccggccacctctttctcctgtaggccgagcctagcttatcacgatttagtgtatgttctttctgtgtctgtcctctttcttcagctgcgtagtgccggtgggattgatataccatggtccaatggtccatatgtaatacgcatgtccaaagtgacaatctctgcgcaagtctttagagatagctccctgtacatgctgtgatgttgttgatggtgtatgactgtaccagtaccgtgatgtggctgcaaggtccatctcagtgcttagttacccttttatatgtccgcttatctgttgcttctgtatatgctgaaatgcgcctgcaatctgttgcaacccttgtttaaattgtgcgttgcatcgcagcagcatttgtgcagctgctgaagttatgttttctggatgtctgaagcctctcgtttctgaatgcgtccagattaagggcctgtttggttcgtggctagctatgtcacactttgcctaaggttagtcgttcgaat

SEQ ID NO: 214177 - DNA, 4174 bp, Zea Mays
gcgagggggagaaaaggaaaggagagtaggagacaacacgaggcgccgaatcgaaacagggaaagccaaggcccctcccccgcgtacgcgtcactgtgcggcgcctcccccttcctcgctccgctttctgctctgttcgtgtgtgagtcgttgacgaaaccccaagtccatgtgggaggttttgacttgatccaaccaagaacgcgcatttcagccgtaaaatactcgtaccggtttccaggggagatttgtgtctcaatatcgttagaatcatctggagcatcacgatcatggtctgaggaccttggagatgaaattactgatatacagagagactattcactgtcaagccaaaacacggctccatctatttcatttgcttatcgagaaactgaaatttgtgaagaagacgatgagtattctgttacatctgaaattcatgcagaggatagaagtagtgaagttactgatagaaatcaagctgctgcagaggacaagccaaatgggaattctagtgcagatttgaatggaactgaaacttctagtggtgaaacagataagtctgataagctatcatttgttgatcgtgtctaccaaatatttgctaagaaaaatggcgatacaatgccaacctcctctggaagctctgaggctttagaagaagttcaagaggaagcaagtggatgtgagcttctggtcagtcaaattgataatgtgtgcccagagactccattcagtgaactactgagatctcttgaattgcgacatgaaggagtcgatatgcctgtaaatctacaaggaattcttgttaatcagtcgtatcttgcctcacctagtgatctgaataaccttctcttctcaccagattcagattttaaacaaacaatggttgagcttcaaggctgtactgatttcaaaactgaaccctggaggcttgataatggtggggagtccttaaagagagttgtaacatacacaaccgcaccatcaaaattggttaaagctgttcacgcaacagaggagcagtcttatttgaaggctgatggaaaagagtatgcagttttactgagtgtgagcactcctgatgttccatgtggtacttattttcggacagaaattcttttccgtatcatgccaggtcctgaacttgattcacagcaacagacatcacatctggtaatatcttggcgcatgaattttcttcagagtactatgataaaaagtatgatagaaaatggagcaaggcagggcttggagcaaaactatgcacagttttcggatttactatcacaaaagatcaagcctattgatgtagaaggttctgggtctgacaaggaacaggtcttggcctctttgcaaggaggcgaggaatctgattggaagatagcatttctgtacttctgcaactttggagtcttatcctccttttttgtgtctctttacattattctgcatgttctacgagtgaatccaagtgctgttcaaggccttgagtttccaggattagatctgccagattcgctcagtgaaattatcatgggtgggctgttgtttcttcaagtacagcgcatacttaagaatattacatgttttcttcaagcaagagaacaaaaagggggtgatcatggcatgaaagcaaaaggtgatggatggttgttaacagttgctttaatcgacggaatcaaattggctccagtcgatgctactggtttatctgatccttatgtggtatttacttgcaatggcaaaacaagaacaagttcaattaagttccaaacactagagcctcagtggaacgaaatctttgaatttgacgcaatggatgatccaccgtcggtgatgagtgtacatgtatatgattttgatggaccattcgatgaagttacatcccttggacatgcggaaattaactttgtaaaatcaaacttgtcagagttagctgatgtatggattcctcttaaaggtaacctcgctcagtcttggcagtccaagttgcatctgaggattttcttgaacaactcaaaagggaccggcatggtcactgagtatctgagcaaaatggagaaagaggttggtaagaagatgacactgaggtctcctcggaccaatactgcattccaggaactcttctctttgccagcagaagaatttctcatcagcagttttacctgctacttgaagaggaaattgcctacacagggtcaagttttcttatctccaagaacaattgggttttattcaagcatgtttgggaggaaaacaaaattttactttctatgggaggatattgaagacatacagggaatacctcaatcaatatcatcatggagtccatccattataataactcttcacaaaggtagaggcatggatacaaagcatggtgcaaagagcatggacaatggaaagcttaagttctgcttgcagtcttttgcatcatttagtgtggccaataggacaataatggcattatggaaggcaagatctctgagcacagagcttaaagtacagcttgctgaagaacaatcccaaattaacacccttcagagtgaggacagtggggtctttgttggtattgaggatgccaagagccttcagatgactgaagttttctcctcgaccatttcgaccaatatggcctcgcttatggaggtgtttgcaggaggatccttggaaatgaaggtaatggataaagttggatgccagaagtactcggctacacagtgggaatcagataaacccaatgagtatcaacgacaaatccattacaagttcagcaagaagctgtctcccgttggcggagaagtgacaggaacccagcagaaatctcttatgcctaataagaaaggatgggttatcgaagaggtgatggagctccaaggagtccttcttggcgacttctttacgctccacatcaagtaccaggtcgaggacctcgctcccaagcaaagagcaagcaatgtgcaggtctccctgggaatcgagtggtcgaagagtaccaggcaccagaagcggatcgagaagaacgtcctttccagttcgtccgcccgcctaaaggagatgttcaaccttgcgtcgagggagctctcgcacgccagataggcggcggagcgtaatggcctttcgacgtctcacccaccgtccctgtgcataacaacaacaggaccgatcattgagtgaacatttaacacccactaactgtatatggaaagcttggctgaagactgacagacagcaacgccaagaagaagaggaggaggtactgtaggatagctcgatagacaacgatatagctgtatgttctgcttgcaagttgttctctctgcttgtagcagtatgggttgccctcaggtaggctctgaatgattctttggtcacaacacacaacacatgttggaattatacacagtacacgtccgaggctcaagagatggaacaaagctatgaagtttacaacattcattatagtcactattccaggcaggggacaggcttgcgtctgttgcccgttcattcatggcggcggttcagttgaacgccgactcgccgagcaggaagaagatcactgttttccggcggaaggagacgtgacagtgtgacaccgaaccgaaaccaccgttcccgcctccggaagccttgctgctgctgctgaagcatgaaccatgaagaaaggaaggatccagaccggcggcagcaaagcccaggtcgtcttgttgtcacgcccatgcccggagacgtcgctggcgcggtgcctgccaatgctgccagtgatccggagtacgtacttggctggcctccgatccaagaaaagaaaccgacttgctgtgacgggcgccgcgcgacgtgctccccatccatccatccaatcatctctcgatgagatcatgggaaggaacgtcgcgatcgttggcgtggattccgctggccccgtgcctgcctgtttcgtccctgcaccgccgccagccgcttctaccgccggtgaggtcgccttgaccgatcacccaggatgcgggccggtgcagtcgagcaggcgcgcgcgcacgccatgatgtgacctgcgataggctaggggatggcttccagcggcggcttgtatgctgtccgccaggaagatgatacagcaacttcactactctggtagcccaccgatttccccctccttttcacacagaaa

SEQ ID NO: 214178 - DNA, 3642 bp, Zea Mays
gcgagggggagaaaaggaaaggagagtaggagacaacacgaggcgccgaatcgaaacagggaaagccaaggcccctcccccgcgtacgcgtcactgtgcggcgcctcccccttcctcgctccgctttctgctctgttcgtgtgtgagtcgttgacgaaaccccaagtccatgtgggaggttttgacttgatccaaccaagaacgcgcatttcagccgtaaaatactcgtaccggtttccaggtccggtcgcgtcttgctctcttccgtccctcatttgccttcccgtccctgctattcgcgtgtgggcctttgcttacccattcttgcttccgctgtctttgctgcgtgtaaatctgatccagtacttgtgtgtccgcgtcactggggattctttactttaagttggatttggcaatgtcaatggaaggagcgatatctgatctgaattggtgacatttcttgctgctgctttggtcctggggtgggcggattggagagcgaccactgtcttgccggttgcttttggggtagctactgttcttgtgaatttctgatgcggagtttcgctcaggatagggaaaggagtgatctatagatttctaggcttctgtagggaaagaagtgatctttgatagatttctacgcttctgttggcgattcctcttcatctcaacttggggatttctgccgaggagactttcctgactggtttgggttcagctgaggagcagagatgaggttgtctgttcgtgtgatcgaggcccgcaacctgcgggccatggactccaacggcttcagcgacccgtacgtgaagctgcagctcgggaagcagcgattcaagaccaaggtgatcaagatgaacctcaacccgacttgggatcaggagttcagcttccttgtcggtgatatcaaagatgtgctcaagcttgatgtctatgacgaggacatcctccagatggatgacttcctgggccatttgagggtgccattagaggatgtgctgtctgccgatgacttgtcgcttggtacccggtggtaccagcttcttcccaaaggcaaaaccaacaagaccgtcgactgtgggggtgatcatggcatgaaagcaaaaggtgatggatggttgttaacagttgctttaatcgacggaatcaaattggctccagtcgatgctactggtttatctgatccttatgtggtatttacttgcaatggcaaaacaagaacaagttcaattaagttccaaacactagagcctcagtggaacgaaatctttgaatttgacgcaatggatgatccaccgtcggtgatgagtgtacatgtatatgattttgatggaccattcgatgaagttacatcccttggacatgcggaaattaactttgtaaaatcaaacttgtcagagttagctgatgtatggattcctcttaaaggtaacctcgctcagtcttggcagtccaagttgcatctgaggattttcttgaacaactcaaaagggaccggcatggtcactgagtatctgagcaaaatggagaaagaggttggtaagaagatgacactgaggtctcctcggaccaatactgcattccaggaactcttctctttgccagcagaagaatttctcatcagcagttttacctgctacttgaagaggaaattgcctacacagggtcaagttttcttatctccaagaacaattgggttttattcaagcatgtttgggaggaaaacaaaattttactttctatgggaggatattgaagacatacagggaatacctcaatcaatatcatcatggagtccatccattataataactcttcacaaaggtagaggcatggatacaaagcatggtgcaaagagcatggacaatggaaagcttaagttctgcttgcagtcttttgcatcatttagtgtggccaataggacaataatggcattatggaaggcaagatctctgagcacagagcttaaagtacagcttgctgaagaacaatcccaaattaacacccttcagagtgaggacagtggggtctttgttggtattgaggatgccaagagccttcagatgactgaagttttctcctcgaccatttcgaccaatatggcctcgcttatggaggtgtttgcaggaggatccttggaaatgaaggtaatggataaagttggatgccagaagtactcggctacacagtgggaatcagataaacccaatgagtatcaacgacaaatccattacaagttcagcaagaagctgtctcccgttggcggagaagtgacaggaacccagcagaaatctcttatgcctaataagaaaggatgggttatcgaagaggtgatggagctccaaggagtccttcttggcgacttctttacgctccacatcaagtaccaggtcgaggacctcgctcccaagcaaagagcaagcaatgtgcaggtctccctgggaatcgagtggtcgaagagtaccaggcaccagaagcggatcgagaagaacgtcctttccagttcgtccgcccgcctaaaggagatgttcaaccttgcgtcgagggagctctcgcacgccagataggcggcggagcgtaatggcctttcgacgtctcacccaccgtccctgtgcataacaacaacaggaccgatcattgagtgaacatttaacacccactaactgtatatggaaagcttggctgaagactgacagacagcaacgccaagaagaagaggaggaggtactgtaggatagctcgatagacaacgatatagctgtatgttctgcttgcaagttgttctctctgcttgtagcagtatgggttgccctcaggtaggctctgaatgattctttggtcacaacacacaacacatgttggaattatacacagtacacgtccgaggctcaagagatggaacaaagctatgaagtttacaacattcattatagtcactattccaggcaggggacaggcttgcgtctgttgcccgttcattcatggcggcggttcagttgaacgccgactcgccgagcaggaagaagatcactgttttccggcggaaggagacgtgacagtgtgacaccgaaccgaaaccaccgttcccgcctccggaagccttgctgctgctgctgaagcatgaaccatgaagaaaggaaggatccagaccggcggcagcaaagcccaggtcgtcttgttgtcacgcccatgcccggagacgtcgctggcgcggtgcctgccaatgctgccagtgatccggagtacgtacttggctggcctccgatccaagaaaagaaaccgacttgctgtgacgggcgccgcgcgacgtgctccccatccatccatccaatcatctctcgatgagatcatgggaaggaacgtcgcgatcgttggcgtggattccgctggccccgtgcctgcctgtttcgtccctgcaccgccgccagccgcttctaccgccggtgaggtcgccttgaccgatcacccaggatgcgggccggtgcagtcgagcaggcgcgcgcgcacgccatgatgtgacctgcgataggctaggggatggcttccagcggcggcttgtatgctgtccgccaggaagatgatacagcaacttcactactctggtagcccaccgatttccccctccttttcacacagaaa

SEQ ID NO: 214179 - DNA, 1786 bp, Zea Mays
tcgactagcagattctaccatttaaaaatcccacaaaatccccaacccctcctatctcctagtgcattccaccgctcaccatggccgccgccgccatcgaagcagctggtcgccggaagggtagctgcttcttggaagtcggccgccgcgagatcggctcttcattcccccgcgtctcttcccgccgaatcagcggctccgaggtacgagtaggacgactaaaggagggcggtgaagtcacaactaaactagttggggagcacgattcacgggtgcataagatggctattgaaccaggaaacccttacatattttacagttgtggagaggatggcttggtacaacattttgacttaagaagcgattcagcaacaaagcttttcacctgctgttctttcttgaatgacagacgccgtgtaaaactgaatagcattgtcattgacccacagaatccttactatttttcaattggtggttccgacgagtatgcacgtttgtatgacatgaggaaattccagttggatggttcaagaaacacaaaccagcctgtagataccttctgccctaagcaccttattaagggtgcgagtgcgagggtccacatcaccagtattgcatattcctatgcaagggagatacttgtatcctacaatgatgagcttatctatttgttccaacacaatataggtcttggtccaaatcctgtgtcggcagagccagagtttttcaacatgcttgatcagccacaagcatacagagggcacaggaattttcgaactgttaagggagtcagtttctttggacaacatgatgaatatgttgtgagtggatcagattgcgggaatgtattcatatggaggaagaagggaggtgaattgatcaggatgatgaatggtgacaaaagtgtagttaactgcattgaaccccacccgcatttcccatttatggctactagtgggattgataacactgttaagctttggactcctgcagctaaaaaattgattatgccgctgcctaaaaatgcaaagcaaataatagccgctaatgaacttgagaggacagttcatatttctcaagcaacagcgacactttcatctgatgtcatgatgcatgtgttgaggttgttacgtaggagagattctgaaatgaatatcgagaatgagccggctagtgcagatttggccagtgatgacgatgaggctttcgactttggatttgacgatgcggaaaggaacgaaagggaaaactctgatcccagagaatgcaacatgacatagctaaaacaactggggattttttttttgcagcctgggcctggccctgcctctatgttggagtaaactgaataggtcttagatttcagttctacatagtaaggtgtgctgaatgggcctgaccgcctgatacacatgggaggactatacaggtcgtgattattaatggagaaactaaacgggtagagccacatcctaccactcggttattctgctctagttttaacgcatgttcaatcttctcgattgccgtatacctagcctagtaaaataagttgtgcaccccagcctgtgtgattatgaactgtaaacctgaatttttagttatcatcaggcaatatgtacataggttttccgtagtgtggaaatgttgagaagtttgttgtttcatctgtctggcaatgtgttctcatacgtaatctggaagtacggtgtcttggtatttccgtctgcttccgagccaacgtcctcgactcctgtttgccaattttgcctatagaactagatca

SEQ ID NO: 214180 - DNA, 1378 bp, Zea Mays
atatattgcagattattctttttgcagagagagaatcaaaatcactttgcgtgcagcatcgattgggtcggaaatcgagggtttggtaagcgagatcgccgccggtgacagactgacagggacgagatggacgccggcggaggcggcgtcttggccgccgtgctctgcatgctgctggtcttcgccatcttccttctcctcctctggcgccgccgctccgatgccgccaccgccgataaccaccgcgtcccgccccagcccctccaggaggatcaggtgctgcacggtcgcgcggcggcgcgacggatgcgtcggaggcctggggctgccggagcaggctcctctactgcgtcaactagccgcaatgctgtagaggacgacgcggagagtgacgatgaggaggtccccgaaggtcgcaacgtacccagatcctccaaaaaggagaagaaaaggcaagagcgagagatgcagcgtcaggccgaagaacctgcacgggattcatggaggagtaaacaagaccgatacgacgaaatgaggaggaagaaggatgaggagcgtgaggcacaagagaggcaattggaagaagaagctagggcacgaaaagcaaaggaggaggctgctgctgctttagagtttgagaaatggaaaggggccttctctgttgatgctgaaggtacaacagagagtgagacacaagacgatggtcagggtttgctccacaactttgtggaatacatcaagaagcagaagtgtgttcccctagaggacctagctgcagagttcaggatgcgaacccaggactgtatcaatcggattgttactctggaaagcatggataggttatctggggtgatggatgaccgtgggaagttcatctacatctccactgaagagatgaaggcagttgcagagtacattaggaagcaagggagagtgagcatatcacatctggccaacaactcaaaccagttcatcgatctggagccgaaggcccagtacgaggtggagagccagcaggatgacagtgcagaagcaggcacagaagcatgagaattccttgtgacctggcaccatgtcgtgctcaatgatgttttgtagtgtgatgacttaacatggtttgagttgggcactggccatataatatatgcagtagtcggtataaacatacttgttctgacatgctagataccattaccccatgcagagaactcaggcttttgttctatcatcatgattgaaaatcatcggttgaccttggtggtgttggggaggagggaggtggtgtttgagtctagcagcaagagatttggcaatgattctgtagatgacaaagactttgctcggagacaaggcagacttgtagtcagacgagcaagcc

SEQ ID NO: 214181 - DNA, 2217 bp, Zea Mays
atcaactcatccacgcgtcacagccacgaccatctcttcctccttaaccctgtagccgcccaagattcctctgccgaggaggccatggccacgatggaagcagccacggacgcaggggatcccgcaaggctcgaccaccctcgtcgtccccttccctacttgtcgtggggaacttgctgtcgccctccctcgcggtgctgcagctacaagctgtggtggtggacaagcagtaccgcgccgcgatgggtccaccgcctcctcttcccgaagtcgacgagttgtaccgcaacgaggcaagtcctccgcctcccatccacgacgacgctgtgggggtgatgtccttgggctcgagcgtgttcaaggtgctcgatcaaatggccgagagcacgagagccaacggtctggtggtgaacacgttcgaggagatggaaagcgactcgacgacgcttctcgcggaggcgacagacaaaaaggtgatcgccgtcaggtccatctcgctctgccgctcaccaagtctcgaccctcagtccatgtcgtgtgacgcgaggcaatgcatggcatggatggacgccaaggctcctaagtctgtggtgtacgtgagcttcggcagtgctaggcgcatgccacccattcagctcggcatggcgtttgcctcatgccccgcgcttgtgctctggctcatcaaggacgctgactccctgcccgacaacgtcaaggattggctacgcgagaacaccgatgcacacgacatcgcaggaagcaagtgtctggtggtgcgcggttgggcgctagaggtggccatcctggcccatccagtcagtggcagcttcatggcgctctatggatggggctccactctggaggttgttgcagccggtctgcccatggctacctggccctttttcattgagcaatttatcgacgagcagctcatcgtggacgtgcttggtattggattatccgtcggtgtgatgaagccaactgaaaatgttttgactgccagtaacacgggtgttgttgttgtgatgatatatgctcctgctttttggtcctgcctgacaagcttcacacttggaatctatggtctgatagttggggttatatgttggccatttctgatgaaacaagctagtctatcttttgtctcaagacaagatggctggtgattatcctttccttgctgctactccaatgggacaagccaaaccttcggggtctttacaaacccaagtgcattcagtgtggcttctatgctatgtacatgcttgtccaagcaggtggtctgactggctcccgtcggccgagttttgcaacatcttttgcgcgccaagcaatggatgaagtctatggctgataagcaccacactgagtgtcaatttgctgttggagatctgaaggttgtgggtgctaacgtccaggtatctctgttgctgcctgccactgactctgcttggcacattcctgaacagatattggagcggcgtctggtattccatggcacacgtgctgtccaacaggagttgatcacatggtcgtcccaaccttgctcgttggcgacatgggaagacttgtaatcactcaagcacacctttccttaggccccagcttgggggcaagctggttctcatggaggggggaatgtcagtatcccttcatcagtcattcactggaggtcaggtagggcacgttcaaggagatgcagcagacaatgaagctacaagactcgcaggccaagcaccagggtttatgggccagaatgggctaaatagttgctaggccggcctgcgtgccgtgagaataatatataagccaaacatgacgtagagaagcggtatgaatgaacaagactcgaatactactatctactatcatctccctattcttcgcctctattcctcttctctgtgttgtctgtctgtatctctccactcctgttgttctactattcctctatttctcttttctctgtgttgtctgtctgtatctctccactcccactattctattagtgatctattaggatcgctaacatgctgtctgtgtggtatagaaatagttagatatatatatatagttgtagcctaagtggagcacataattgtagacaatatccctgaattgatctttgtcaatacgcctttaaaatagaccggaataagtgacatatgtagttattctacatcaagaagccttgtattggtgtaataactaagcaag

SEQ ID NO: 214182 - DNA, 2359 bp, Zea Mays
cgaaaatcaccgttgccatccctgtccggaagggttgtcgttggtgtgctgttcgcctgttcccctattcagctattcgtgcacggagaagaagggaggcgaagagagggggcaccgtcggacggcggctcatcacgccatcggtctatgagaggtcaatgaagatggaagtggagcttcgggcagtacatgaaatgagagctgagcttgcacaagttcgtatggacattcaaaaccttggtgcaatgaggcaggaactcatgggccaagttcagggattaacacaggatttggctcagtcggcagaagatttgcataaggtgtctgcattacaagctgaaacccaggagatcaaacatgaaacacaacatttgagatctggtattgagcttgagaagaaaggatatgcacagagttatgagcagggacaggacatgcagatttttttatttatttcagtggcttctttttatcgaacgcgcaggagaactgcgcatcttatatattaagaaaaaggagaaagaggtctaaaatagacccagtacaagctgccaaaaaaaatatatcaagacagaaaaaagaaaaggggggggggggtatccaaacaacccccagccacaccagcacctaaggccacaatctcctaagatctcttgcccctgccaagccccaccgaacagcatcctcatgaatatgctgcatgatgatgctgatgttgggggatgcaccatcaaacacacattcatttctatgcttccatagccaccaagccaccagaatcactaaggaattaaatcctcttttctggttttttggcacctggcactcagcttctctccaccagtcttggaaggtcgttgttgccaatcctggagtcaggcgatgcagccctaccttatgcaaagtctgccaccaagtgtctctggcaaacacacaagccactaagatatgctgaactgtttcctcctgctggtcacaaagggggcacctaacaggatgctcaagacctcgtctgcttaatctatccgctgtccagcaacgatttagagaagccaaccaaatgaagaatttacaccttgggggggcccaacttttccaaattctagtagctggctcaaaagagactgaaccagccataaaacgatcatatgccgatttagtggaataatctccagatgcagacggggaccatctatgcacatcaggaatccccggatgtaactgaaaaccttgcactaggtcccaaattactaagaagtcgaagataatctgagctgacaggctgccagatatgtcattaacccatctattgtttaccaaggcttcttgcacagatctgcttttcttgattctcactgtaatatggctgaccaaagtgggggcaaggacagatattgattgcccatgaatccagcgatcagtccagaacagggttcgagagccatcacctacagtagtgtggaccgaggcagagaaaagagctttgacattggaatgaaccttgaacaagaaatctgcccagggcctttccggttgagtttttttgagccaaagccatcttagatttaaagcccaaccaagaacttcaaggttatggatacccaggccacccatgctaagtggtctgcaaactcttgcccaaccaatagagcagtgaccacctctgatatcttttctgcctttccacaagaaacccctccgaattttgtcaatagccttgatcacccatttagggcattgaagcactataaggtgatggataggaatggctgtgagcactgatttaaccaaggtcagccggcctgctgtgtgaatgagggcagatttccatccggtgtggagaaacttcgagctgaggttggtaacgcgtagaagaggtcacgggccattgtgtcttcaggcaatcaaggttatattggaagctatgggaaccctaaggccaattatgctgcaaacccttttaactctgggcaagtgctgccactgattatggttcccagtatggaactggtgcagcgcatggttcttgggtgcctacgacttgcaaagggcacccggacgtagataagtactgccaatttgccaggcctttcaccaaagtgtacacatagctttggcaatgactgtatgaatgttgtggtggatcagatgtttaacggataggaatcaggtagatgaattgtacacatgtttacttcagtttagcttctatcggtctgtgcaaaggaacatatatttattgaatcaagcgtgaatatattgaagtaatgtgcaattgtgaatgtgatgtctatcagtctataggcttgttcgattcagctttttttagttttttttacgagcttttctaagaatctat

SEQ ID NO: 214183 - DNA, 990 bp, Zea Mays
aacccggaggtgggactgggaggcaccgtgtcgtcgtcgtcccctttcccttctctactccgccgccgctcgctcgccggtgaagagcaaatgctgctgctgttacggcagcggctctgttggcgccgcgtatctccgacttacctcgcgcctttgtaggatctgtggagactcgtgagtacgtgacccccacggtggatgaggataggcgggcctcgtccggcagcctgtgctctctgggacgggaggcagagctggcaccagagagagcacgaattgaggccggcccaggtgaacgctgctgaagctgctgctcaattaaaactaggggaacagatggggatgaagcgcgagcaagaaagaaagaaaggctgcacaactggcactgttcaacagccactttctgaagggcctggagaacttgtgccaaaagtaacaatggaagtttgttcatgggattgagttgacacagggcttagggagcccactgactggagacacttagcttggaggcctgttcatgaagaaagatatcgagaaagacgtcgaacatgaaatggaggacagcgtgtcaacctaccagaatgctgatgtcggggaaggagagatcagctgctgtcaatagtgtacctctctctattccaactgtgaacctgggattctatgatcatgtgcgtgctatgtaacctatgctgccactgtgcaacgtcacaagtcagcacatgctgcacgcctgcactaggatgtctagcgtatgctggacagctggagtacaatagttgggcgttgctgtctgtttttgtggttgtcatgtacagatgtgctagtgctaatgtatgttgtaggtgttccaggtctatgtaaactggacattctgtaaagaaggtaaaaaaaacaaagaatagtgagatatccatctatactatagttattatgtatcaatgtatgtgtttagagaaagatgtttgccattcatgttgctcttttttt

SEQ ID NO: 214184 - DNA, 1049 bp, Zea Mays
aacccggaggtgggactgggaggcaccgtgtcgtcgtcgtcccctttcccttctctactccgccgccgctcgctcgccggtgaagagcaaatgctgctgctgttacggcagcggctctgttggcgccgcgtatctccgacttacctcgcgcctttgtaggatctgtggagactcgtgagtacgtgacccccacggtggatgaggataggcgggcctcgtccggcagcctgtgctctctgggacgggaggcagagctggcaccagggttatgtccactgtccaccttcgaatgttgacattacattacatgtctacactttcaaatttaagagagagcacgaattgaggccggcccaggtgaacgctgctgaagctgctgctcaattaaaactaggggaacagatggggatgaagcgcgagcaagaaagaaagaaaggctgcacaactggcactgtccactttctgaagggcctggagaacttgtgccaaaagtaacaatggaagtttgttcatgggattgagttgacacagggcttagggagcccactgactggagacacttagcttggaggcctgttcatgaagaaagatatcgagaaagacgtcgaacatgaaatggaggacagcgtgtcaacctaccagaatgctgatgtcggggaaggagagatcagctgctgtcaatagtgtacctctctctattccaactgtgaacctgggattctatgatcatgtgcgtgctatgtaacctatgctgccactgtgcaacgtcacaagtcagcacatgctgcacgcctgcactaggatgtctagcgtatgctggacagctggagtacaatagttgggcgttgctgtctgtttttgtggttgtcatgtacagatgtgctagtgctaatgtatgttgtaggtgttccaggtctatgtaaactggacattctgtaaagaaggtaaaaaaaacaaagaatagtgagatatccatctatactatagttattatgtatcaatgtatgtgtttagagaaagatgtttgccattcatgttgctcttttttt

SEQ ID NO: 214185 - DNA, 2816 bp, Zea Mays
taatgtcaacattcgaaggtggacagtggacataacccttgccaaaattgttacagagaagagaagtaagtaagtaactagcatagcaacagcgtaaatagttaatagataaacacaggagtgagaaaaaaccagaaatggctctatgcatatatgtgtagcatattccaataaaccccttaacacaaggtgcagctgcttcgctgagtttggagaggcacaaactatatgctttgctatgcggctatgcccgggacttttggggacggaaaacaactagctggagctactgaaggaatagcaaggataaaaacatgctgatctacactcagattcatgtagcagcatagcaagcatccagaccaaatataaggtgagctaatacttctagggatcaggagtcatgttaatcacaatcagcacatcaactatgaacacgctgatctacacccagattcatgtaacgttaacctagctcgagaagcccaattatgcctaacctgttcgctgtggcacatcccaccttatacaaggaccaagctccaattatgcctaactgaatatcgcccaattaattaacaaatcgaatagacgcaaccatactgagggccagcagcagctagaagcaaagcaactagcagcttcgatgccagggtcaatcgactcaacgacagcgcctatggtccagttacgaacaggggcaagaagagaagaaccaacctggtgccagctctgcctcccgtcccagagagcacaggctgccggacgaggcccgcctatcctcatccaccgtgggggtcacgtactcacgagtctccacagatcctacaaaggcgcgaggtaagtcggagatacgcggcgccaacagagccgctgccgtaacagcagcagcatttgctcttcaccggcgagcgagcggcggcggagtagagaagggaaaggggacgacgacgacacggtgcctcccagtcccacctccgggttggactggtcactggacccgatccttcacctaatcaccttcactcgatcagtcgggctcgagcggcttcatttcactgacatgtgggtccctatccgcagctaggattctgggcccctgtggcagccagtggaagagttcctctcacttaacagcatctcttctctctcccacggttgcttccaggtcccaccacgtagggaggggattggagacgccgagctccaccggaggcgaaggcggaggcgcgtggcgcgccctcggactcctcgctggacaaaatggaccttgcacctcagggtttgataacacagcaacaaaaggcaaatgagcgaaggccagttggtagctcacaaatttggacagcctggatttatgagtatcttcctattactcaaccacaacagaagaaccagagcacattgctgccccgggcttgccggtggaactttggaggagcaacacgtggacagagaaaaaaagtcatggactggagaaaagtttttgagcaacttcaattttccgaggtcaactggaacccttacaaggacatgaatccagcaattgttccggaatattgcattgcagcagataacatctgctactctcgtacttggctaatcagctttaacataaaggaggcgtatgtgcctgacaggtttgctaggcagttcgggagggaacaaggacgcctccatggtgtgccaatgtggacaagaagaacttggagtaagtggaaagactggaggactgagtatgctcgtgagattgaggagttccatcaattggttggctgccatttcacccctcctgcggaaaccaatatcaactcctttccactacatgagtctagtgctggacagaatgatgcaggatgcagtctgaatatctctcataatttttctgcaatggttgaagatttgaaaaatgatctcccagtaattggtcgatatcttgagggaaacttgcttccttcagatgttgcaagcttcctagagagggtgagcacgatgatcaagagttataccccaccacagggcagccgaaggaaagatcgagtaagtcatggccccgctgacccagtcaggtcaaagaacccaagaaaaaggggaagacattcactctttcaagattcttttcctcatcggtatctaggcaccccggtaaacatagtgtttgatggcaccattcctctactaaatgggggtgaggcattgaaggaacaagtggccatggatccctggcgggtctcccagtcccatttgacgatgaccacatcttcttcatctctagactcaagctcaccagaatcaatgaagcggaggcgggaaggtggggatgaaattccaatcacaagggacactgattgcctccaaagtggaaggctctgtgtgcagctgaaaatgttcaagcacagagatggagtgaatgccgaggcagctaatccgattttccgctgacgaagacaaaacttcgcttggtcttcatattgtacaaagtagcaaagaaacatgacttgtttgctgcactgctgacagttagctggccaccaacaccgctctgcggtattgctgtctgcaatttgcgaggattttcctgtgtttatatcgttgtgaaacagttgcctctgtgaaatagatgccttttcagaagcgatagagttgtaactgtttatgacaattaacatggctattaaaggggcaagtcttttggcacagatagtgggaatggttgttctatcttttagggttagtttgggaactacgtttttccaagggatttctattttttcaagggaaaatgaactaattttccttggaaaaatgaaaatccc

SEQ ID NO: 214186 - DNA, 3998 bp, Zea Mays
ccggcctcaattcgtgctctctcttaaatttgaaagtgtagacatgtaatgtaatgtcaacattcgaaggtggacagtggacataacccttgccaaaattgttacagagaagagaagtaagtaagtaactagcatagcaacagcgtaaatagttaatagataaacacaggagtgagaaaaaaccagaaatggctctatgcatatatgtgtagcatattccaataaaccccttaacacaaggtgcagctgcttcgctgagtttggagaggcacaaactatatgctttgctatgcggctatgcccgggacttttggggacggaaaacaactagctggagctactgaaggaatagcaaggataaaaacatgctgatctacactcagattcatgtagcagcatagcaagcatccagaccaaatataaggtgagctaatacttctagggatcaggagtcatgttaatcacaatcagcacatcaactatgaacacgctgatctacacccagattcatgtaacgttaacctagctcgagaagcccaattatgcctaacctgttcgctgtggcacatcccaccttatacaaggaccaagctccaattatgcctaactgaatatcgcccaattaattaacaaatcgaatagacgcaaccatactgagggccagcagcagctagaagcaaagcaactagcagcttcgatgccagggtcaatcgactcaacgacagcgcctatggtccagttacgaacaggggcaagaagagaagaaccaacctggtgccagctctgcctcccgtcccagagagcacaggctgccggacgaggcccgcctatcctcatccaccgtgggggtcacgtactcacgagtctccacagatcctacaaaggcgcgaggtaagtcggagatacgcggcgccaacagagccgctgccgtaacagcagcagcatttgctcttcaccggcgagcgagcggcggcggagtagagaagggaaaggggacgacgacgacacggtgcctcccagtcccacctccgggttggactggtcactggacccgatccttcacctaatcaccttcactcgatcagtcgggctcgagcggcttcatttcactgacatgtgggtccctatccgcagctaggattctgggcccctgtggcagccagtggaagagttcctctcacttaacagcatctcttctctctcccacggttgcttccaggtcccaccacgtagggaggggattggagacgccgagctccaccggaggcgaaggcggaggcgcgtggcgcgccctcggactcctcgctgggggtaaactgcaaaaaaaatataggagtggactctggcgcattgctggaagagacacctccggctctggttgtacgagttggtggtcgtctctccagatccgatgctcttcctggtcgatggcgcgaaaccgtggtggctaaatcctttcttcccgcttgagtagacaacatcgcctttccctcgcaatgccaccgaaaagaggtgctgctggcacccgctgcaccacctctgctgcccatggcgccaccgagtttgccaccggcagccgatccgtcgcgggccaatccgccgcccagttcgtcgttgaagctgccacccagttggccgcccaagccaccaccccaaccatcgccctcgttcttagatatgcttcaaagtcttgtttttcaggacaaaatggaccttgcacctcagggtttgataacacagcaacaaaaggcaaatgagcgaaggccagttggtagctcacaaatttggacagtatgtaactttctcattccttgtttctcttattacttgggcatcttaaacaaaatacaacctgagataatgaaaattttgtagcggtatggtgttctgcttccaagccagcagactcgaaagctaaaagaatggattctgactgatgagcagcaacagcttgttaatgctagtggtcttggacatctggcacttaccactgggtttaccattgaccgttctttgctgacatctttttgtgaaagatggaataatgaaacaaatactgcacatttcatgggatttgagattgcgccttcacttcgtgatgtttcatatattcttggcattccagtgactggtcatgtggtgaccgcagagccaattggtgatgaagctgtgaagcggatgtgcttgcattatttaggagagagccctggaaatggagagcaactgtgtggcttaattaggctgacttggttgtataggaattttcatcaactacctgaacatccaaccatcaataagattgcatatagcacccgagcttaccttctataccttgttggttccaccttgtttcctgacaccatgaggggatttgtatccccaagatatctaccactgttggcagattttgggaagatccgtgagtatgcttggggggctgcagcccttgctcatttgtataggggattgtctgttgcagtaacacctaatgccacaacacagtttctcggcagtgcaactttgctcatggcctggatttatgagtatcttcctattactcaaccacaacagaagaaccagagcacattgctgccccgggcttgccggtggaactttggaggagcaacacgtggacagagaaaaaaagtcatggactggagaaaagtttttgagcaacttcaattttccgaggtcaactggaacccttacaaggacatgaatccagcaattgttccggaatattgcattgcagcagataacatctgctactctcgtacttggctaatcagctttaacataaaggaggcgtatgtgcctgacaggtttgctaggcagttcgggagggaacaaggacgcctccatggtgtgccaatgtggacaagaagaacttggagtaagtggaaagactggaggactgagtatgctcgtgagattgaggagttccatcaattggttggctgccatttcacccctcctgcggaaaccaatatcaactcctttccactacatgagtctagtgctggacagaatgatgcaggatgcagtctgaatatctctcataatttttctgcaatggttgaagatttgaaaaatgatctcccagtaattggtcgatatcttgagggaaacttgcttccttcagatgttgcaagcttcctagagagggtgagcacgatgatcaagagttataccccaccacagggcagccgaaggaaagatcgagtaagtcatggccccgctgacccagtcaggtcaaagaacccaagaaaaaggggaagacattcactctttcaagattcttttcctcatcggtatctaggcaccccggtaaacatagtgtttgatggcaccattcctctactaaatgggggtgaggcattgaaggaacaagtggccatggatccctggcgggtctcccagtcccatttgacgatgaccacatcttcttcatctctagactcaagctcaccagaatcaatgaagcggaggcgggaaggtggggatgaaattccaatcacaagggacactgattgcctccaaagtggaaggctctgtgtgcagctgaaaatgttcaagcacagagatggagtgaatgccgaggcagctaatccgattttccgctgacgaagacaaaacttcgcttggtcttcatattgtacaaagtagcaaagaaacatgacttgtttgctgcactgctgacagttagctggccaccaacaccgctctgcggtattgctgtctgcaatttgcgaggattttcctgtgtttatatcgttgtgaaacagttgcctctgtgaaatagatgccttttcagaagcgatagagttgtaactgtttatgacaattaacatggctattaaaggggcaagtcttttggcacagatagtgggaatggttgttctatcttttagggttagtttgggaactacgtttttccaagggatttctattttttcaagggaaaatgaactaattttccttggaaaaatgaaaatccc

SEQ ID NO: 214187 - DNA, 1328 bp, Zea Mays
ctaaccccgcagaggatggcaggcaggcaggctaccgaacaggctattttacctgtcgatcccgccaaacatattcgtggatgtggttagatccgctagccgcaccgcgtcgtcttcaagcgggtggacaagatttatagtggagaagccattcggccgtgactcggagtcctccggcgagctcactcggtccttgaagaagtacttggtcgaggagcaaatattcaggatcgaccattacctgggcaaggaactggttgagaatctctccgtcctccgcttctccaacctcgtcttcgagccgctgtggtcgaggaactacatccggaacgtgcagctcatattctctgaagatttcggcaccgagggtcgaggcggctacttcgacaactacggcatcatccgggacatcatgcagaaccacctgctgcagatcctggccctgttcgccatggagaccccggtgagcctggacgccgaggacatccgcaacgagaaggtgaaggtgctgaggtccatgaggcagctgaagctcgaggacgtggtggtgggccagtacaagggccactccaagggcggcaagtcgtacccgggctacgccgacgaccccaccgtgcccaagggcagcgtcacgcccaccttcgccgccgccgcgctcttcatcgacaacgcgcgctgggacggtgtgccgttcctgatgaaggcaggcaaggcgctgcacacacgacgcgcggagatccgggtgcagttccggcgcgtgccgggaaacctgtaccggcggaacatcggcgcggacctggacaaggcgaccaacgagctggtgctccgggtgcagcccgacgaggccatctacctcaaggtcaacaacaaggtgcccgggctgggcatgcgcctcgaccgcagcaacctcaacctgctctactccgagcgctaccgccgcgagatccccgacgcgtacgagcgccttctgctggacgccatggagggcgagcgccgcctcttcatccggagcgacgagctcgacgccgcctgggccatcttcacgcccgcgctcagggagctggaggacaggaaagtggcgccggagctctacccgtacggcagcaggggccccgtcggcgcgcactacctcgccgccaactacaacgtcaggtggggagacatcaccagcgatgacgacggcgccttctagctctagacagagacatgcatccatcgattcgtgacgctacgccttattgtggaagggacacgcagttgtatccaatccaatcaaatttaacaaaaatggcaagggggcttggcacagaataagaactagagattca

SEQ ID NO: 214188 - DNA, 1973 bp, Zea Mays
cgccaacccaaaatcaacacgcgatagaggcgccgccgccggagaaaaatacagtaaaggcaaagtgaagcgaagtgccgaactactacgagcaaagagagagagagagggggttggggggtgagggagagagagaaaaaaacagcgtccccgcacgacgctaacacgtcccagatctaacaggaaaaaaaaaccaccccaccacgtcgccaccaactaacccatcatccatcaacgcaggtcctccccggtcacgcggcagtcacccccactctgctttgctctgccgccccgccccgcccgcactgcatcgcgtcctccggcgccctcgctgtcggcgccattggcgggctcgccttcaactgccccgtccgctggaaccaaccaggtctaaacatgcttcatcgttcaaatagccggaaccaaaggaacaggggatcaagaatcaaaacactactccaagctaccttgcttataggtgttattttttggctcctatatcaggggaggaaagaaaaggcagatcaccattcagatacttttaattataatgagaagactggagaaactgtgttcgataaagacagtactaacttgaatgaagatgacaagagaaacactgagaggtcagaagcggaaggacaagtcaacagtgcagatggtaatacagaagttaataataataacaatgaagatgaaactaccggtcatgcagaagaaggcaagcatgatactgaatccaactctgctgctgagagtaaaagtgaagtcaattcaactggagatgatatgtcccgaaacaattatgcacaagaggaaaacactggggaggcaagtggaacgtctcatgaagtggtgcaaggtgaacaatcgaccagtgcaagtggaagcgggaatggatcggatggagatggtgagaaaaatgaggcagttgatattaaaagtggttctgaatcccttcctgatgatgccaaggctgaagcaactgatgaccgtgctactgtcagtcttcctgatgaaaccgggaatataccatcagttcatactgataattcgcaaaatgatgccagtgaaaaccaaggtgatgcaacttacactacctcggattcgtctgagcatggcattgttgaggctgtccatattgaaactggattggaagatgaaagtgcaacagcatcatctgggactggatctggtgatgacaacggtaactcatctgatagcgcctctgcagaagaaaatactgagactgtatctggtgatgatgagaagggcatgggaacaggtacaaccactgaagcgtcatattccatacaacagaactctgagaacagcagtgtctcagctgaggcagagaactcccaaggggattcttccagcggagtgaatggttcttcagaagagacatctaacaagggtgatggagctacagaaacgtataacaagggtgagcaggtggatcccaagattgaaactagcacatccaccaatgccgagcataatgaatctcaaggggctgatggcagctctggatcaaatggtaacggccctgaacaaaccggtaaatctgaaagccagtgatttccaccatcgagagttcgagacacgaatttagtatacaggtttgttttctggagattgaagaggggatagtgcacatagaaaaactgttcactgtggtttatcgagattttagtcgatactgccgaagtataattgtgcagatcgcaagattggttgtctgctatgcttattgcttatggcatgatttctcgtcaagttgtacttgagtcaatatttctgtacggttattaatctcgacatggtactctgttcattgttggatattatgacagtcttacaatattctgcagtgtggccgaaatgccctttgcccgttttgatcactgcgggtacctgtgggtttatacgctcatgtttctcatttacggtcattttttttagagccttga

SEQ ID NO: 214189 - DNA, 1772 bp, Zea Mays
cttttttccgcgcgtgccagtatgtgtctaaacatgcttcatcgttcaaatagccggaaccaaaggaacaggggatcaagaatcaaaacactactccaagctaccttgcttataggtgttattttttggctcctatatcaggtgaagcattcctatgataagaaaaatgagtacttggatgatgctgaggatcagcttgcccataatgatataagcatgttccaggggaggaaagaaaaggcaggtagttacagtgatagcaatatccaaatggttgacgacaattctgatgtaacgactaaaccagaagaacgtgatgcagatcaccattcagatacttttaattataatgagaagactggagaaactgtgttcgataaagacagtactaacttgaatgaagatgacaagagaaacactgagaggtcagaagcggaaggacaagtcaacagtgcagatggtaatacagaagttaataataataacaatgaagatgaaactaccggtcatgcagaagaaggcaagcatgatactgaatccaactctgctgctgagagtaaaagtgaagtcaattcaactggagatgatatgtcccgaaacaattatgcacaagaggaaaacactggggaggcaagtggaacgtctcatgaagtggtgcaaggtgaacaatcgaccagtgcaagtggaagcgggaatggatcggatggagatggtgagaaaaatgaggcagttgatattaaaagtggttctgaatcccttcctgatgatgccaaggctgaagcaactgatgaccgtgctactgtcagtcttcctgatgaaaccgggaatataccatcagttcatactgataattcgcaaaatgatgccagtgaaaaccaaggtgatgcaacttacactacctcggattcgtctgagcatggcattgttgaggctgtccatattgaaactggattggaagatgaaagtgcaacagcatcatctgggactggatctggtgatgacaacggtaactcatctgatagcgcctctgcagaagaaaatactgagactgtatctggtgatgatgagaagggcatgggaacaggtacaaccactgaagcgtcatattccatacaacagaactctgagaacagcagtgtctcagctgaggcagagaactcccaaggggattcttccagcggagtgaatggttcttcagaagagacatctaacaagggtgatggagctacagaaacgtataacaagggtgagcaggtggatcccaagattgaaactagcacatccaccaatgccgagcataatgaatctcaaggggctgatggcagctctggatcaaatggtaacggccctgaacaaaccggtaaatctgaaagccagtgatttccaccatcgagagttcgagacacgaatttagtatacaggtttgttttctggagattgaagaggggatagtgcacatagaaaaactgttcactgtggtttatcgagattttagtcgatactgccgaagtataattgtgcagatcgcaagattggttgtctgctatgcttattgcttatggcatgatttctcgtcaagttgtacttgagtcaatatttctgtacggttattaatctcgacatggtactctgttcattgttggatattatgacagtcttacaatattctgcagtgtggccgaaatgccctttgcccgttttgatcactgcgggtacctgtgggtttatacgctcatgtttctcatttacggtcattttttttagagccttga

SEQ ID NO: 214190 - DNA, 2000 bp, Zea Mays
tcgacctgcctttaattcggggaccgcgcccgccgcacgctctcccgtcccgtccgtctctccgactccctccgcgcgtcggtacggtggctctgctgatccgccccgtgcctgccatatagctgcacccgccgccacgtctagacccttcttctcgctccctcactagcccgtccctgcacctataagcggcctctccttgcctgccccctctcgcttgctgcttgctgcctttcacgcggagtgaggcagccgacggggttgctaaaggtagaacgaagcttccgcagcacagcgtcgtcgtcgaggagataaggtccagacagaggtctctagccgtgcagcggtgctgtcgttggtggcggccggcgacttggagctgtcgaggtaagcaagctggtgtggcggcgattggagctgtcgactggagcgcgcccgatccaccagagaccgtgaagctggcggccggcaagtggtgggagcggccagatgacacgggcatgcccggaatggacccaggcgggggcggcagctcgcgctacttccaccagctgctgcggccgcagcagcagcagccctcgccgctgtcgcccaattcccacgtcaagatggagcaccacaggatgtctccagacaagagccccgtcgtcggcgaggccgacgctggcgggagcggggccggcggcgaccagccgtcctcgtcggccatggtcccagtcgagggtgggggcagcggaacgggcacgcccacgcggcggccgcgcggccgcccggcgggctccaagaacaagcccaagccgcccatcatcgtgacgcgcgacagccccaacgcgctgcactcgcacgtgctggaggtggcggcgggcgccgacgtcgtggactgcgtcgcggagttcgcgcggcgccggggccgcggcgtgtgcgtgctcagcggcgggggcgccgtcgccaacgtggcgctcaggcagcccggcgcgtcgccccccgggagcatggtggccacgctgaggggccggctggagatcctctccctcaccggcacggtgctgccgccgcccgctccccccggcgccagcggcctcacggtgttcctctccggcgggcagggccaggtcgtcggcgggagcgtggtgggcccgctggtcgccgcgggccccgtcgtcctgatggccgcgtcgttcgccaacgccgtgtacgagcggctcccgctggagggggaggaggaggaggatgagacggcggcgggcgccgccggagccgaaccacaagatcaggtggcacagtcgtcggctggaccaccgggtcagcagccgacggcgtcccagtcctctggtgtgaccggaggcgatgccggcatgtcactctacaacctcgccgggaatgtaggggcataccagctaccgggagacagcttgggaggctggagtggcggcggagtccggccaccgttttagtccaaagtccatgccttgagagatatccgattcgcatcatccacaccatccgagaaccgggagttgaagctaccctgagacatcatgtatatgcaattattgtatgcatgctggatcattgttgataggagagaaggatctttcatctgggcgccatacaatataatgcatatgcgtttacacacgtggaggatgcattgcaaatcatgatgtgttttaaagacgatttatcaaatgcaagaggggaagaagctagagattggatgcatgcaagagctagctcaataaactaaaggtcagtagtagtgagatccgatgtttcgtgtttccaacttttcctctctttttccctttttttttcatgttcatttgtatttgtgttaattatattctgattgtgtgtctctcgcagtcaatcgctgtagaatggtgttttctgttataaacaatttggtcatcgcctcctctacgatcgctttaattaacccatgcatgttacagcaactctttcatgcatggtcgctctcacatacatttccttttttt

SEQ ID NO: 214191 - DNA, 191 bp, Zea Mays
aattcgtgaaccctatagcctgggcagttcctacaaaacatgagggcgatgctagtgaagaagcttctctcgccgatgagacacttgcatcagaagtagtgctaacccggaagaggaaaataggaagctctttgtcagtagagccaaaccatctctttgatgaatttgaaccaaagttcgaggatgcttaa

SEQ ID NO: 214192 - DNA, 901 bp, Zea Mays
ttcggttacacccagctaagacagatcacagcccaaaccagatcacatgaagcggcccaaattcgaggaagcaaacaggtgggctgggcacctgtactgcgagcagccggtcacagcgcgcagcgccgtctcctgcgattcccggctgcctccacctcttctcccacagcgccggcgtgctcctctcctttcacgctacgttccctccggccccggcgtcgacggctaagaaacccttaacctaggaacgagttcgcaccctcgggacctgtggcgatgcatctcactctcgaattcgggggcgggctggagctgctcctggagaactccaccaaggtgcacaaggtggaggtcaccacgcccaaggacggccaaggcaaggtgacgatgaagttcttgctctcttgggtcaaggagaatctgatcaaggagcgaccggagatgttcctcaaggctgattccggaggcctggggttcttgtccttataaatgactgtgactgggagctgtgtggtggtcttgatgcagagttggaagagaaggatgttgtggttttcatctccactttgcatggtggttagtttgattacatcaggatgatagcatcctatgattttcctgaaaatcgcaccttgtatcaagtctttggaagggatggattggtctgagttgtgtggctttctggagatactaattgcaaactgtggaactgcacttgttggtgccaatatcatcaaactatagttccattttcttactgggacgcaggcacataatattgtgcacaaccgatcctgtatttttccagtactgctgtggctctcccccgtttgctgtatatacataaatgaaaggtcaagtgaagtacgtatttctaaacactgttcatgcttgtcaattg

SEQ ID NO: 214193 - DNA, 4339 bp, Zea Mays
acaatcacaggcctcccggcctcccgtgcgctattctctatcagcttacccagcacacagtacacactctaatctccacacgacccaatagatatacggggctgaaggatgaagcttagagcaaaagggatcggcctcctgcttctccttgtcttgcttgctctttgctccaccattgaagtcggcgaggcaagaagaggcaagcattggaggtcgtcgaggagctcaccgggctcatcccagctcaagaaaggcaagggaaagaagagcagctcccaccggcagtacggcgccaaccggccaggtccgaagccaccggtcagctcgacaccaagctctggcgctggcaagggaaatcatcagaatccgtaccaaccaagcccaagtccaagcccgaatgcccctgacatccctcctatgccaagccctgccaatggcagcaggcattccactcccgagccgccggctccaagctgtgggaagggtcagcagcagccatcacagccgccgccagcgacctcgcagggtgcagtattcaatgtggttgattttggagccaagggtgacggagttacagacgatactaaggcttttgaaggagcgtgggctgctgcctgcaaaaagggggcatgtacagttctcgtaccaccagaactagagttcctagttgggccaatctcgttctctgggccttactgcaaatcgaatattgtctttcagctggaaggaacaatcctagctccaaccagtgctaaatcctggggttcaggcttgctccagtggctcgagttcaccaaactaaatggaatggttattcaagggaacggcattataaatggcagagggcaacaatggtggacctactcagacacagaagacgaggatgatgatgacacgtacgatgtggagtttgaaagaatgccacagattaaacctacagcattgaggttttatggtagtttcaacgttgtagtggctggtatcactattgtcaacagctcacagtgtcatcttaagtttgacaactgtcaaggagtgatggtccatgacttgactatatcctcccctgagaacagtctcaacactgacggaatacacctgcagaactccaaagatgtcagcattcatcatacaaacctggcttgtggtaattccttaatccttactgtatgtctaagggggtgtttgaatgcactagagctaatatttagtggctaaaattagttgagacatccaaacatcatagctaataattcaactattagctatttttggtaaattggttaatagttgggtagttaattgttagctagataattccactaacaatttttaaccaactaactattatttctagtgcattcaaacactaactattagctcaaaagtttgtttcgcaaagctttacaacaaagacccatttccataaagaacaccaaataaataagacattatccacacaaaaaattacaaataaatatgtagggtcaaccaaaagcctgcatctcagttctgttacgcatgtatactctgcacttcaaaggacatgtttcagagttaagactacactgaaaaactgctgtggagtatcataacatcgttttgtcctattcgatgcaggtgacgattgcatctccatccagacaggatgcagcaacataaatatacataacgtgaattgtggaccaggccatggaatcagcataggtggactaggccgagacaacacaaaagcatgcgtatcaaatgttacagtaagagatgtcaacatgttcagaaccatgaatggtgtcagaatcaagacctggcaggtaagcttgagaacataagtacaaataaaattctaattctaattcaacatccggcattagtacataatagttaataatgtcacaaaagaaaatctgaaaaaggaaagaaaacgtacatgtcatcgtttgctatctatacaagcaataaccttgaaaagttcaaagaagaaaaatgatgtcacccaaaacaattcctagtgtctaaacaaagtgaactctcatttctcgcagggtggtgtaggattggttcaagacataaggttctcaaatatacaagtctcagaggttcaaacacccatcatcatagatcagttttattgtgacagaagcacttgcagaaatcaaacatcagcagtggcagtatcaggggttcaatatgagaatatcagaggaacatttacaatcaaacctgtccattttgcatgcagtgacagcttaccttgttcaggaatctctcttaccggtgtgcaactcagaccagtgcaagtaccccactaccacctgaataacccattctgctggcaagcttttggggagctctacactccaactgtccctcctatagcttgcttgcagattggaaaacctgctggcaataacttacagtcatatgatgacatatgctgaaacactcaaagtgcctttgtttgttgattggtgcttatccatgagtggtcgttgtgatagatgcgaccccatttgcaccattgcttgctgatgagcacatatacagttattttgaggtcatcttattacaacattgtagcttttttcatcaaagtaaacataaatatattcatttgaaatggtcatacagcaacagtatgtacttgagttctccaaaaatgagtaaacataatgacaattgtttatttaaataagtgtaaacagggctatggcaaagggtccaactataaattgataaacaacatgggcgtacatttacaactataatgatagctaatcctgaagaatgagattaataattagaagtcaatgtctaagggtaagatctcttggatcaaatacggaaagaaaatgattgctcggaaaaactagacaatgtttagaaaaatgagtaagcataatagtcagtttctagttaacaaatatgacatattgcactgcacgaatatgattaccatagagataacacttaggaaaggggctattgatgtgtttagctgaaataattatgaaaaatggcaataaaaatgttctgtaaatatgcagaaagaggaaataactaatcaaaagaacatgatatttagaaatcaattccaatgtaaacaacatccatatgcatattttttttttgctttgttttctagaacctcagctaaataataaaacaaagcagcataaaaatagtaaatatgtaaggtcctgcaatcggttactaacttcatattcgttaacacattatgaggaagaaggaaactgaaagcaagatttagaattgtgaaagatattgtaccagttagaaaaagataaaacatagcatatctttttttctgtgcctttcttaattttttcaactaaacatagtatacctatgtgtcgccagctgtctattatcaagaaaaagtatgaattggtcaagaattttccctctaccattcatcttattgtctccactcacactggttgccaaaattcttgaagctctaatccatcaatcaatatttaaaacttacataatcgtaggtagaagggtagacctggtaggctggtacagtggtgagagatatctcactaagtcagcagtttgcggtttcaaagcagcctctctgcattagcgaagggaaagcttgcctcggtttatcccttccccagatccgacttatgtggggggcctttggcactcggtctgccatgcccttagataatcgtaggtctagtgccatggaactggaagtcttcctaacttcctattgattaatctaaggtcacatatgttacatacttacacggaagttcaatataacttaaacactgatggccataattcgaaagttttgggaagatggtgatgtccaattgttagtggactacgtcatctgcagtccatactgccattgcacgcttgtccaacagtcgaccagccaacaaaatcgatgtggcatatgaaggttatatcatacaaacaaaaaactgatcaagtacaaaaatgcaagctctcaccatgaattggaacatgaaaataaaccacatccattaactctgatttggggatactagcaatgccaatttgacaaagaacatcacccactgtttgcgtcccataaatcaaacaggtgataaatctttatattttgatcccagggagggggtgatttacccaataaaagatgcagcctaactaatcctgtcactgaaacatgatgcatttgcatgttgtaagggccagctacagatttatctcattgttactttgttagaaattttgtgtctcagtggtacgtttattaagactgagacaaagaacacacaaaattttttgaaaaggagaaaacaggcagtacaat

SEQ ID NO: 214194 - DNA, 1011 bp, Zea Mays
aaatcctttttacgcagcgacaacgagccaggcacctccacctcatccgctgacagacaagagcgcaatcacccgcgggccttgggcttgggccttggaatagggtaccaccaaccaatcaatcgaagaagaggcccgccggccgccgcggtttgctcgctatcgctcccttgctggctgcggtgcgggtgcgccgccgtcgacgagggagtccctggctccctccctccgggttcgaattcgggttgcttccttagggttcagtggcagtacatagcatggccctaaagctcggctggaggagaggaggaggaggctggcttgcgcttccattggggaatcggaccaccgcgtcttcctccgcatgcagcagctccaacttgttcgtcggcggtctttcctacgacactaacgagacagctctcaaggatgttttctctcaatgtggtgatgttattgcgcgaaggttatatgccatcccacaagcggcaagtcgaaaggatttggttttgtcaagttttcttcgcaaaaccaagctgacgcagcattgcaaaagatgaacggtcaggtgcttgatggaaggaaaattcgggtgcactatgcaaacgggactggatgacttgtgatttagaaacagatagaaaatgagatgagcaggtgatgattgatgagcatccagcggctggatcttaaaaatccgcattcgccattgaagttttgttgagatctcgaagctgtaaaaactcggacgaactcaagcgagacaaagatttctcttggtgacacggactgttataagatgttttctgtgaggaaaaagttagtctatcatatttttacttgccactatttttatttggtttgtaaaataaaatgagttgatccactcatagttagttaatactaaggttatcttcagtaacatcctctaaattttattccctaaaagaatattttttgtcctttacaaatcactctaaaagattccgtcctctatattttcactctctc

SEQ ID NO: 214195 - DNA, 1006 bp, Zea Mays
aaatcctttttacgcagcgacaacgagccaggcacctccacctcatccgctgacagacaagagcgcaatcacccgcgggccttgggcttgggccttggaatagggtaccaccaaccaatcaatcgaagaagaggcccgccggccgccgcggtttgctcgctatcgctcccttgctggctgcggtgcgggtgcgccgccgtcgacgagggagtccctggctccctccctccgggttcgaattcgggttgcttccttagggttcagtggcagtacatagcatggccctaaagctcggctggaggagaggaggaggaggctggcttgcgcttccattggggaatcggaccaccgcgtcttcctccgcatgcagcagctccaacttgttcgtcggcggtctttcctacgacactaacgagacagctctcaaggatgttttctctcaatgtggtgatgttattgcgcgaaggttatatgccatcccacaagcggcaagtcgaaaggatttggttttgtcaagttttcttcgcaaaaccaagctgacgcagcattgcaaaagatgaacggtgcttgatggaaggaaaattcgggtgcactatgcaaacgggactggatgacttgtgatttagaaacagatagaaaatgagatgagcaggtgatgattgatgagcatccagcggctggatcttaaaaatccgcattcgccattgaagttttgttgagatctcgaagctgtaaaaactcggacgaactcaagcgagacaaagatttctcttggtgacacggactgttataagatgttttctgtgaggaaaaagttagtctatcatatttttacttgccactatttttatttggtttgtaaaataaaatgagttgatccactcatagttagttaatactaaggttatcttcagtaacatcctctaaattttattccctaaaagaatattttttgtcctttacaaatcactctaaaagattccgtcctctatattttcactctctc

SEQ ID NO: 214196 - DNA, 1043 bp, Zea Mays
acgagaatgttacgaagtcaaataactccccttccccacagcacaaggaacaaatcctttttacgcagcgacaacgagccaggcacctccacctcatccgctgacagacaagagcgcaatcacccgcgggccttgggcttgggccttggaatagggtaccaccaaccaatcaatcgaagaagaggcccgccggccgccgcggtttgctcgctatcgctcccttgctggctgcggtgcgggtgcgccgccgtcgacgagggagtccctggctccctccctccgggttcgaattcgggttgcttccttagggttcagtggcagtacatagcatggccctaaagctcggctggaggagaggaggaggaggctggcttgcgcttccattggggaatcggaccaccgcgtcttcctccgcatgcagcagctccaacttgttcgtcggcggtctttcctacgacactaacgagacagctctcaaggatgttttctctcaatgtgcgaaggttatatgccatcccacaagcggcaagtcgaaaggatttggttttgtcaagttttcttcgcaaaaccaagctgacgcagcattgcaaaagatgaacggtgcttgatggaaggaaaattcgggtgcactatgcaaacgggactggatgacttgtgatttagaaacagatagaaaatgagatgagcaggtgatgattgatgagcatccagcggctggatcttaaaaatccgcattcgccattgaagttttgttgagatctcgaagctgtaaaaactcggacgaactcaagcgagacaaagatttctcttggtgacacggactgttataagatgttttctgtgaggaaaaagttagtctatcatatttttacttgccactatttttatttggtttgtaaaataaaatgagttgatccactcatagttagttaatactaaggttatcttcagtaacatcctctaaattttattccctaaaagaatattttttgtcctttacaaatcactctaaaagattccgtcctctatattttcactctctc

SEQ ID NO: 214197 - DNA, 1399 bp, Zea Mays
gacagtttggttgtgagagagagggcgcgatggacgtcccggccgtggcggaccctggaacggagcgaggcgaaggcgcgctgatccagtgcccgtactgcgactcggaggcgatgcacaagctggcgcagatcctcctcccgggcctcgccgccgtctgcgtggacggcaccacgggggacccgttccgcagcccgtccgcggtggccgtggacctccgcaaggagatggtggactacatcacgcagcggagcgacagcttcatcgcggacgcgctgatcgagtcggaggcgaaccaggacgcgcccggggccgaggtgcccgacgaccccttcgagaccgtgtccgtcttcatggacgacttcgccagcaccaagcgcaacatcatcggccacgtctcagggtggctgctcaccgacagccgcgacgacaagatcgacgacttcgtgcaggagatggaggccaccaagttctggccgctggagcgccgggaggccgtcgccgagctcctgctcaagaacgtcgacctcaagaccaggttccactgccccgagaagtacgagaacgaggagcgcctcgaggaccacaaggcgcagtgcagcttccgccccgtcgcctgcgccaacgacggctgccgcgccaaggtctccgtccgctgcgtcaaggaccacgacgccgcctgcgtgtacaagctgctccagtgcgagcagggctgcgacaagcgcctgctcaggcgcgacatggaccgccactgcgtcaccgtctgccccatgaggcccatgaagtgccccttcggctgtgattcctcattccctgaccgtgacctcgagaggcactgcgccgagttccttcagccgcatctgctcatggtccttaaggccatccataagaaaggccggtcggaacaagacctcaaggaccttgctcaaaagctggaaaagtttgatggagatggtaaactggctaaggctctagatgcaagacctcttactaatgttgtcaaggacctcgaagccaagatgaaaggtggacagtcaagttaaaagggctgggtctttcatgcagacagacttcacagaatggataatggcattgtttagtcccacgcgcagcatacatacagagaagaatatgagttttgttttattcttatctcctttacgattttttttcacatttctccctgtctgtcagagttttgttttattcttatctcctttacgatttttttttcttcacatttctccctgtctgtcacaaacaaaccaattgtcagtcagtatgcatagtcgtccgctattgctctgtatcttcagcttttgtatgaggatattatatcatttgttttggtatataaatcaaagaacgggccatgtttccagcaggcttgttctgtacc

SEQ ID NO: 214198 - DNA, 1562 bp, Zea Mays
gaagtaagcgtggaggttgcccacgtgtcccccggttcctccagaagtagccatacggattcagatcgcggccgcggcgactccccgagcagaagaacccgatcgaacgcggccgcggcggcgactccccgatctcagatccctgctgcgagcgaagcagggttccattcgagcagagatggcggcggcatgggaggtgctggctgtgttgctcgtcgcggcgcaggtggcgtcagcggcgcaggtcacggcgccagcgttcctgtgggcgcccaaaaactacggctctgatgatgctaaggaggtagtccattaccaaacaatctcaccaaagagcttagctaaatctgttctcgaggaaggtggctggtcaaacttcatgtgctcaagggaggatactcagaataatgttgatgttgccattgtttttattggctcaaagctgcaatcgtcagacatatctaaagataagcaagttgatccagctttagcagacacactgaagctctccttcacacgctcagagttttccatggcattcccctacgtttccacgacagtcgacgagagactagaggactcgttgctatccagctttgccgagaactgcaacaatggtttcggaagaaaccgcatcacctacacagacacgtgtaccggtcaagatctgaagaaataccacaacatggatgccatcaatgacctggtagtgtcaggggtagcgtcaaggagagccaaccacccaagtggacagaccgatgtaatcgtcttctgtagcggcgggttcgagaatccaggcactgcgaaatcagaaggagagctgctttcccagcttgtggactcgctggacttgtcgggagccaaatacacggtcctctatgcgtcccaaccgtctggtttgctggagagcccttccggcctgccgctgggtaggcatctcgcggagaagaagactaacggcacgaaagctgtccagggcgaaaaatgcgatggcgagtgcctcgtcaagtcgagtctcctcgaaggaactttcgttgggatagtgcttctcatcatcctgatatcaggactcatgtgcatgatgggcatcgatactccctcgaggtttgaagctccccaggagtcttgatctctcccttggactgcagaatccgcgggggggttgtgacgagggcacgcggcggcgttgaggggggccggtgttctgttggtgtgcactgtggatatatattgtttagcttcccatttggaagggagtacgccttgtgtattttttttaccgagccaactgtcactcacgatgtgctagaattttttggtgtaatatttgcgtttcgcgcctatggacaactaataagctgaggcattgcagcagataaattcatgtgctgcgtgaggcaggcttgtgttgtgtaccagacgcacagcattgttgcctccagctagtgctttctgtgtgaaataaacctgaaacccagtcccaggccaccgcaccaataaagatgggtactatgcatcaatcaattagaatgaggtcttgcttttgtttgatcagaatcaga

SEQ ID NO: 214199 - DNA, 851 bp, Zea Mays
tagcaagtttgtttggaattccacagtaggcctcattggtgatgtccctgtaatgcttgccaagccacagacttttatgaatgcaagtggtgagtctgtaagtgaaactactccactgcagcttcaaaatcaattgttctccctagtccttctctttactgctgtttatgtaggtcggacagctggtttcatacttcaagataccactcaatcaattagttgtgatctacgatgatcttgatctaccctttgcgaaattgcgtctgctaccaaaggggggacatggtggccacaatgggatgaggagtattgttgaccatttgaatcagagccgtgattttggacgcctaaggattggcattggacggccacctgaggagctgggtgctatcaattttgttctgcggtcattcaccaagcaggaaaaggaagagcttgaagtcacgttccaaaggagcttgcaagctgtaagaattatggtacgggaaggattcaacaaaagtgcacagtttgtgaatactccacagccaccagaaatgctgaatagatgagagcccaacgacacatatacaatattaggttccataatcaaaaaatataatattaggttcgtctagttgctggccgccaacatgtatgtgccctaattgattagtagaggttttcatttgatcacacatcaagtcatgtaaattggattcacatattgttttcagattattatggggattatttggatttatgttttgtgtttttttttcggcgacaacccattgtatgtactgctccaacgttcatggatctcactaccaaaccacaaaatgtttagaatgacagacatgttttgaagt

SEQ ID NO: 214200 - DNA, 839 bp, Zea Mays
ttcaggtatgcttggattcattcggatagctacccaaatgctgttttaagtaccgaatttattaaatttaagatgttgctctccctgcatcatacatgttcactgaaggccaaaactgtatgtttatttaaggtcgtaagttttgttgtcattaaggttatgactttgtactatctacctcttcctctatagtgcctctccaaaaatcactggtattcaaatatctgactcagatcttttcccttttgattttaggattagaacaatgaaactggaatcatatataagatgaaattttgtgctgttatcttttcccttttgacagcttgcttttgcagcttgcgatgtcactcgcctcatgcatatacttcctcaatgagaagatgaagaatcttgtcagggcgtccaccacagggttcggaatctttgtgggtggctggatcttgggttctcttcttgttccagtgatcccagctttcgtcatcccgcctacatggtcccttgagctccttacttcgctgacagcttatgctttcatgttcgtgggttgcactttcctcaagtgaaacttagcagcagttcaccaagtggaaattcctgcggtcatcacgaaggaaattgctcttgctaacatctccacagcagatcccaacttactgataagcggcctgcttcacaatttttttttgtccgagagagtatgatgatctttacgttattgttgttgttgttacatgtataatataacattttagcaaccagacaatttcgatggatattgaaaagggatacacgttggattcttccacatctgccgtacggaatccttgtttgtggcc

SEQ ID NO: 214201 - DNA, 1681 bp, Zea Mays
gcacttgcttcaatactagctcgctcaccactcaccagtcaccagtctagcaagcaacaacaaaggcgtaggaggaagcttgttttggaccgagcaagcgagccagccgagcgtgggagagagagaaagaggaattaattgatgggcgaggaggccagctgcgacgccgtcagcctgacggaggccggcaccaacgccaagccggtgggcaaggaggtcggccgcgagccggctgcagcccccgccgccgcggccgacccccggctgcagggcatttccgacgccatccgcgtcgtgccgcacttccccaagcaaggcatcatgttcaacgacatcaccacgctgctgctgcgccccagggtgttcaaggacgccgtcgacctgttcgtcgagcggtaccgcgggatgggcatcgacgccgtcgccgggattgaggccaggggcttcgtgttcggcccggcgatcgcgctggctattggcgctaagttcatacctctgcgcaagccaaggaagctcccaggtgagagattccatgaccatgcatgttctgtttttcttcttcttcttaacccatctccacactctgcactgtacccagctgttgcttttgtcgatctagtgcccagcctgtggcgacaccctgatcaagtatatgtttagcgaggagggttcttgcttagcccataatctctgacaccgccagagttgtttgtctggcctgcatgcagttgcagtcccgtgaatgggatattaaaagaaaaatgcaacagacggtttatacgagaccgatcattcattcattccccacttctgtccacaatgttgtagaatcatgtgctgacaccggctctcggaaacaattattattattattattggaaggtgaggtgatctccgagaagtacgttctcgagtacgggactgattgcctggagatgcgtgtcggggccatcgagcgatccggcgagcgggtgctggtcatcgacgacctggttgcgaccggagggacactctgtgctgcgatcaggcttctagaacgtgctggagccgatgtggtcgagtgcgcgtgtgtcattgggctcccgaaattcaagctgggcatccgtagacatgatgactatacatgagattccggtcggcgtcgtttgttattgcctaaataattaaaactatagaaggatttgtacaagttgaatggaaaacctgtatacgtgctggttgagtctcgtgaataatcggagaaatgacaacttattctcaggtgtcagagtgatcagggatattggctgtttactccttgctactgcgattgaacagtggagggacgacatggacaaggacaagtatattcggtgcatcactaagtcttggtgaggggagagattgtagtgttttaggctgagtagtgaagagcctgtagttctgcacggaacatgatggttattagttgatgcaacagcgttgctgttctattattgtttgttgaattttgtggctttggtttgaagcctagcctgggctcaaacagggatatgcatggcgcttgagtgaacaacttcgacagcaacacacacatgcttaatgtcagggaagtagctaggaacctgctacttgttacccgtacgtagtgtcatggaactcataaggtttagtggcaaaattcataaaaatgacacgggaa

SEQ ID NO: 214202 - DNA, 1319 bp, Zea Mays
gcacttgcttcaatactagctcgctcaccactcaccagtcaccagtctagcaagcaacaacaaaggcgtaggaggaagcttgttttggaccgagcaagcgagccagccgagcgtgggagagagagaaagaggaattaattgatgggcgaggaggccagctgcgacgccgtcagcctgacggaggccggcaccaacgccaagccggtgggcaaggaggtcggccgcgagccggctgcagcccccgccgccgcggccgacccccggctgcagggcatttccgacgccatccgcgtcgtgccgcacttccccaagcaaggcatcatgttcaacgacatcaccacgctgctgctgcgccccagggtgttcaaggacgccgtcgacctgttcgtcgagcggtaccgcgggatgggcatcgacgccgtcgccgggattgaggccaggggcttcgtgttcggcccggcgatcgcgctggctattggcgctaagttcatacctctgcgcaagccaaggaagctcccaggtgaggtgatctccgagaagtacgttctcgagtacgggactgattgcctggagatgcgtgtcggggccatcgagcgatccggcgagcgggtgctggtcatcgacgacctggttgcgaccggagggacactctgtgctgcgatcaggcttctagaacgtgctggagccgatgtggtcgagtgcgcgtgtgtcattgggctcccgaaattcaagctgggcatccgtagacatgatgactatacatgagattccggtcggcgtcgtttgttattgcctaaataattaaaactatagaaggatttgtacaagttgaatggaaaacctgtatacgtgctggttgagtctcgtgaataatcggagaaatgacaacttattctcaggtgtcagagtgatcagggatattggctgtttactccttgctactgcgattgaacagtggagggacgacatggacaaggacaagtatattcggtgcatcactaagtcttggtgaggggagagattgtagtgttttaggctgagtagtgaagagcctgtagttctgcacggaacatgatggttattagttgatgcaacagcgttgctgttctattattgtttgttgaattttgtggctttggtttgaagcctagcctgggctcaaacagggatatgcatggcgcttgagtgaacaacttcgacagcaacacacacatgcttaatgtcagggaagtagctaggaacctgctacttgttacccgtacgtagtgtcatggaactcataaggtttagtggcaaaattcataaaaatgacacgggaa

SEQ ID NO: 214203 - DNA, 1460 bp, Zea Mays
cttcccgctctcctccttcatcagtcatcacacacgcctgcggcctgcctgcctgcctgcctgagtcctgacaccatactatacctccacctccccggccctgtcctactagccgtcagaggtttgccgcctcctcgctcctcgtcttcatcaccccctctctctctcttccttcgtcctcgacctgtggccacctgtggcgtcacgctttataagagcacgcggccggcaaccatctcccttgccacccacaagtagagaagaatcttttgttgctgacgcctgagacgctggcactgccgccgcgccgtctggagagaaagagcagagggacactgaagcagaggagccgaggggtagcgacgagagacgagcgagagcggccgacggagatggaagcaggaggagcaggagcggagggggtgatgagggtgctgctggtggacgactcccccgtcgaccgccgcgtggcgcagctgctcctcagcagcaactcctgcgccggctcattccacgtcatcgccgtcgacagcgccaagaaggcgatggagttcctcggcctcaaggacggcggcaaggagcaggccatcgacatggtgctcacggactactgcatgccagagatgaccggctacgacctgctcaaggccatcaaggcgctgaacccgctgaagccgatccctgtcatcgtcatgtcgtcagaagacgagccccagaggatcagccgatgcctgaacgccggcgccgaggacttcatcgtgaagcccctgcagagcaaggacgtgcagcgcctccggaactgctccacggtcgggaggcccagcaacaagggcggcgccacgttgccgtgcgaggagaacgccgtggccaagtggagtaacaacaagctgccgccctccgccggcgccggcgccggcgccagcgccacgtcgccgtcggggcggcgggcgaacctcgccggagtcgccatggtgctgcactcgtcgagagtggagatctcgcagtacctgccgctcctgctcaagctcgtcgtgctggcgtacgccgcgctgtgcctgggcgagctcctgcacagatggtcgtcgggtggcagctgctcgctctccccgtggtgcgcctgatcaggaaggagcaagcagcgcaaaaggccagcaacggtgcaagagcccccctgggcaccgacgacaggagactgctgatgcaccaagcattatttcagaggctccaatagccctagtcttttaatttaggtagatgagattgtctgctctgagatcctaaccggggtttcgaccgatgatgagtccccccgtggcttttgttcgttgatttgaggggccggggccgtagacgtaggaaggagaggaacggaacgaaccccttgtatcctctgctctgtatagaatgaatgaatgaacgaatgaatcagaatgcaacgcgtcatccgagcacacgaacgt

SEQ ID NO: 214204 - DNA, 884 bp, Zea Mays
aggccatcgacatggtgctcacggactactgcatgccagagatgaccggctacgacctgctcaaggccatcaaggcgctgaacccgctgaagccgatccctgtcatcgtcatgtcgtcagaagacgagccccagaggatcagccgatgcctgaacgccggcgccgaggacttcatcgtgaagcccctgcagagcaaggacgtgcagcgcctccggaactgctccacggtcgggaggcccagcaacaagggcggcgccacgttgccgtgcgaggagaacgccgtggccaagtggagtaacaacaagctgccgccctccgccggcgccggcgccggcgccagcgccacgtcgccgtcggggcggcgggcgaacctcgccggagtcgccatgcgccaggtgctgcactcgtcgagagtggagatctcgcagtacctgccgctcctgctcaagctcgtcgtgctggcgtacgccgcgctgtgcctgggcgagctcctgcacagatggtcgtcgggtggcagctgctcgctctccccgtggtgcgcctgatcaggaaggagcaagcagcgcaaaaggccagcaacggtgcaagagcccccctgggcaccgacgacaggagactgctgatgcaccaagcattatttcagaggctccaatagccctagtcttttaatttaggtagatgagattgtctgctctgagatcctaaccggggtttcgaccgatgatgagtccccccgtggcttttgttcgttgatttgaggggccggggccgtagacgtaggaaggagaggaacggaacgaaccccttgtatcctctgctctgtatagaatgaatgaatgaacgaatgaatcagaatgcaacgcgtcatccgagcacacgaacgt

SEQ ID NO: 214205 - DNA, 1572 bp, Zea Mays
catttctattacttgtagtctctttctgttcttatatgagtggtaacttggttcatgctagtatgcttttcaggttttcatcaaggtagaaaaagaaacttttctgtccggtcatggctttcccaactgcagcagctgttttgcttaatgagaacatgcagattcataaaggaaacagggttgatgcaccaagtgccaaaccactgaaatcatcagccaaacctgagagaaaggctcttcaggatgtgtctaacattcctaaaggcactgctttaaagaacagatccacagtcaaagaggggtccgccttgaaagaaaggcctgcactccacaatgtgtctaacaacctcaaagagaggtccatcctgaaagagaggcctcctcttcaggatgtgtctaacacccgcaatgagaggtccatcctgaaagagaaatctgccctgtgtagccatgaagctattaagaacccagtgaatatttttgctgatgacgaagagaccaaagggtgccatgaatgggctaaggatgggatggagggcactcacttcactggaaatgattctcagaagttggataaagatgtgcaacacaaacgtatcaagaagaaagtggcaaaagttacgtcagcattgtatggctggtcacatgaggtatatggtcatgtgatgtttatggctatggttcccaagttttctgaagaatcgaaagagctggagctggaaccagagattcttccagacatcactaggtgtatgtctacctcaggcaagagggatgatgcaccaagcgccaaacggctgaagcctaagcttcaagaaccgaaggctcttcaggttcaggatttgtctaacactgtcaaagggagcccttctctgtgcagccatgaagctgtgaagaacccagtgaaaatattcactgttgaagagaccaaaaagtgtcatgaatcggctaatgatgtgtcggagggcactcacttcacaggaaatgatcgtcagaagctggataaggatgtgcaaggtgacaaaacacagctggttgaagattctcctactgatgatgagcttgacgactacccatttttggacaacagtcctgttaagtttgagctgaaagatgagtcagtgattccagatattggagcaatctgaagtgatagtgtttgtgcgattgttctgtagcaatctatgtagtacgatgtttagtacatgttgtttgttctgtagcaaactatgtagtttgagctgaaagatgagtcagtgcctcatcgggtacttttgagtaccgtagcggttgtcaagtttcatgctctcctgaaacatccttcgcaactcgcaagtgaaactctggtttatgccctgaatcagctgctgaataagctaatgattgcatgagtatccgttgatgcatagtagtgaaaggaatggctaagagggagtgaattagtttttttttaattttgctcaaatctatgttttcagttttcagctaatgattgcatgagtatccgttgtacatgtgctctaattgttcacatgtacaactatgtttataactaagtgttgctatctcgtt

SEQ ID NO: 214206 - DNA, 1722 bp, Zea Mays
aaaagccttgatgtgtccgtctccgtcatgaagacaaacattcaccgagccgaccgttgccttccccccaactcccagccccagcgtcaactgactacactcgctgactcgctcccccggttccccttctctgctcgccatcttttgctctccgcttggctcgtcaatcacctcctacgctccacacgccgccggcgactacaactgcttctgccgtggtcaggttttcatcaaggtagaaaaagaaacttttctgtccggtcatggctttcccaactgcagcagctgttttgcttaatgagaacatgcagattcataaaggaaacagggttgatgcaccaagtgccaaaccactgaaatcatcagccaaacctgagagaaaggctcttcaggatgtgtctaacattcctaaaggcactgctttaaagaacagatccacagtcaaagaggggtccgccttgaaagaaaggcctgcactccacaatgtgtctaacaacctcaaagagaggtccatcctgaaagagaggcctcctcttcaggatgtgtctaacacccgcaatgagaggtccatcctgaaagagaaatctgccctgtgtagccatgaagctattaagaacccagtgaatatttttgctgatgacgaagagaccaaagggtgccatgaatgggctaaggatgggatggagggcactcacttcactggaaatgattctcagaagttggataaagatgtgcaacacaaacgtatcaagaagaaagtggcaaaagttacgtcagcattgtatggctggtcacatgaggtatatggtcatgtgatgtttatggctatggttcccaagttttctgaagaatcgaaagagctggagctggaaccagagattcttccagacatcactaggtgtatgtctacctcaggcaagagggatgatgcaccaagcgccaaacggctgaagcctaagcttcaagaaccgaaggctcttcaggttcaggatttgtctaacactgtcaaagggagcccttctctgtgcagccatgaagctgtgaagaacccagtgaaaatattcactgttgaagagaccaaaaagtgtcatgaatcggctaatgatgtgtcggagggcactcacttcacaggaaatgatcgtcagaagctggataaggatgtgcaaggtgacaaaacacagctggttgaagattctcctactgatgatgagcttgacgactacccatttttggacaacagtcctgttaagtttgagctgaaagatgagtcagtgattccagatattggagcaatctgaagtgatagtgtttgtgcgattgttctgtagcaatctatgtagtacgatgtttagtacatgttgtttgttctgtagcaaactatgtagtttgagctgaaagatgagtcagtgcctcatcgggtacttttgagtaccgtagcggttgtcaagtttcatgctctcctgaaacatccttcgcaactcgcaagtgaaactctggtttatgccctgaatcagctgctgaataagctaatgattgcatgagtatccgttgatgcatagtagtgaaaggaatggctaagagggagtgaattagtttttttttaattttgctcaaatctatgttttcagttttcagctaatgattgcatgagtatccgttgtacatgtgctctaattgttcacatgtacaactatgtttataactaagtgttgctatctcgtt

SEQ ID NO: 214207 - DNA, 4510 bp, Zea Mays
ccgcggccatctcaccccgatggcctcggcccccttcccgccagtcgcggcgtcggcggcctccgcgccgccgcgcctggccccgcgccaccccttcgctgctgccgcagccgcgcgccgctcctcgctctcgttccgccccgccgcgcgccggcccgttctcccgctccgctcctccgcggtcgcggctaacaccctccgctgcacgcaccgccgcgccgtctcatccaggtcgaggagacgcgcgcaagaactcggcgcggcgcccgcgttggctgcgtcgacctggggcgtcggcgaggagaagggcggttgcctctcgtgcttccccaagagtaggcggggcaggtcggggctcgcgaggttcgcgccgtgcgcgctcccgcacgcgtcgggactatcgtttcgcagccggttgagcgggtccaaggtcaagcctagccatatattgcacgccgctggacctgatgaaccacatgttgcaagtccaacatggtctgatacttcccttgatacacgtgacatggatcatgctattagtaaggaggagcttgaagatgttctcaacactccgcttcctgagcatccgaagctaattcgtggtcaattgaagaatggacttcggtatcttatcttaccaaataaagttccagcaaacaggtttgaggctcacatggaagttcatgttggatcaattgatgaggaggaggatgagcaaggaattgcccatatgattgaacatgtcgcgtttcttggcagtaaaaaacgtgaaaaacttttggggacaggtgcgaggtctaatgcgtatacagacttccaccatacggtgttccatatccactctccaactaaaacaaaggaatatggtgaagacttactcccttctgtgctggatgcattgaatgagatagcttttcatccaaagttttcttcatctcgtgttgagaaggagagaagagcaattctttctgagctccagatgatgaacacgatagagtatcgtgttgattgccagttgttgcaacatctgcactcagaaaacaaactgagcaacagatttcctattggacttgaagagcaaatacagaaatgggatccggagaagatccgtagatttcacgaacgttggtactaccctgctaatgccactttatatctggtgggggaaattgatgatattcctagagctgtgcgggaaatagaggctgtatttgaacacactctttcagaaaatgaaggaaaccctgtaccgagcactagtccatttggtgctatggcaagcctttttgcaccaaaactcccaagtggctttactacaaacctaactggtgaaaaatcacctgccacagataaaataaagcctgtaaaaagggaaagacaagcagttagaccacctgtagagcataagtggtcccttcctgaagttgctcaggacgccaaacccccagcaatttttcagcatgagttgattcagagtttctctatcaacatgttctgtaagatacctgttagcaaagttcagacctacaaggacctgcgtagtgtactcatgaaaaggatatttttgtctgccctacattttcgaatcaatacaagatacaagagctcaaatcctccttttacttcagttgagctggaccacagtgactctggaagggaagggtgcactgtcactactcttactgtaacggctgaaccccaaaattggagaagtgccatcaaagttgctgttcatgaggtgcgaaggctgaaagaatttggtgttacaatgggagaaatgacccgttacatggatgcactgataaaagatagtgaacagcttgctatgatgattgacagtgttccctcagttgacaacttggacttcatcatggagagtgatgcacttggccacactgtcatggatcagttgcagggacatgaaagtttgcttgcagtagctgaaactgtcacccttgaagaggtcaatactgttggtgcggaagtattggaattcatttcagattttggaaaacccaatgctccccttcctgctgctattgtggcatgtgtacccaaaaaggtacatgttgatgacataggtgaaactgaatttgagatatatccagaagaaatcactgaggctatcaaggcaggtcttgaggaacctatttacccagagcctgagcttgaggtgccaaaggaattgatcactcaatcaaagctcgatgaactgaaattgcaacacaatccatcatttgttcctttaaccaaagaggagaatgcggtgaaagtgtttgacagtgaaactggtatatcacaacgccgtctttctaacggaatttccatcaactacaagattacacaaaatgaagctagggttggtgtcatgcggctcatagtagggggagggagagcgacagaagattctgaatcaaagggatctgtcattgttggtgttcgttccctgagtgaaggtggctgtgttggtaacttttctagggaacaggttgaacttttctgcgtcaataaccttatcaactgctcactggaatcaaatgaggaattcatatttatggaatttagatttgctttaagagacaatggcatgcgtgctgctttccaactccttcatatggtccttgagcataatgtatggctagaagatgcatttgatagagcaatccagttatatttgtcttactatcgctctatccccaaaagtttggaacgttctacagctcataagcttatgttagccatgctaaaccatgatgaaaggtttgtagagccatcgccacattcactgcagaagttgactcttcagtcagttaaagatgctgtcatgaaccagtttgtgggtagcaacatggaggtcagcattgttggtgatttcactgaagaagaagtagaatcttgtgttcttgattatcttgggactgtgagggcttcaagttctccaaccatagaggagcgtattgaaaagatttcctttcgaccatttccatcagatgttcatttccagcaagtatacataaaggacacagacgagagagcctgtgcatatattgcaggccctgctcctaaccgttgggggttcgctactgaaggaaatgacctatttaatgtcattcagagatctgacgctgatgcagaaatatctgaaccagtaagcttggatctaacagggaagagacacatcaatgttcgcagccaccctcttttctttggcatcactttgagtctgcttgctgaaattatcaattctaggctatttacaacagttcgagattccatgggattaacatatgatgtttcttttgaattgaacctttttgacaaattggatcttggttggtatgtgatcgcagtcacttcaactccaagcaaggtccataaagctgttgatgcctgcaaaggtgttctgagaggattgcatagtagccgaattgtggaaagggagctcgatcgggcaaagaggacactgttgatgaaacatgaagctgagacgaagacaaacgcctactggcttggtttgcttgcccatctacaatcttcatctgtaccaagaaaggatgtatcatgcatcaaggaattgacgacattatatgaaaatgcaacgattgaggatctgtatattgcatatgagcacctgaaagttgacgattcttctttgtttgcttgcattgggattgctggcgctgaatctggtgaagatacaaacgatgacgagcctgatgtggatcttcatggcatgggtcccatgggaggccggggtctttcaacaatgaccagaccaaccacatgatcaccattgggatggccaacccttccaagggattaaccttgctccccaagacagggagtcacatggccctaggagactgcatgttgactgtcgtttcccagcaaaactgtttaaagataattcaagcatttgatctggatctggaagactattatatcctgagccacaaccaaaagcttggtggctgcattttttccccgaggagcgttgagttaatgactcagcaaggtcgtgaaaaagaatttattgtttgaggtcatgtagcttcacatgtacagtaaaagcaggttggttcttgcatacagttgttgtaactagtgcgttcagggcattgaagataggatgacagtagatcacagacgttgctgggctgcgaatagcgtaaggcatctgctgtaactgtaacgaaataatgaagcgcagtgtcaggaccctggatagatggcaagtgggtggcatgtgtgcctataaaaagggagaacgtatagaccaagggatatgaaagaaccatttgaacaaactaaatcctctctacctttccattactgttatctcttcataatctctcctctcatgtatcctgtttctctaccttctagaacaatttggctatcagatatcaaattagatcgtcttcctcgctgctatctccttcttcaacccttcttctacctgaacatctctcttctctccgatattcccttctgtggcgctaacacgcag

SEQ ID NO: 214208 - DNA, 4484 bp, Zea Mays
cgcggccatctcaccccgatggcctcggcccccttcccgccagtcgcggcgtcggcggcctccgcgccgccgcgcctggccccgcgccaccccttcgctgctgccgcagccgcgcgccgctcctcgctctcgttccgccccgccgcgcgccggcccgttctcccgctccgctcctccgcggtcgcggctaacaccctccgctgcacgcaccgccgcgccgtctcatccaggtcgaggagacgcgcgcaagaactcggcgcggcgcccgcgttggctgcgtcgacctggggcgtcggcgaggagaagggcggttgcctctcgtgcttccccaagagtaggcggggcaggtcggggctcgcgaggttcgcgccgtgcgcgctcccgcacgcgtcgggactatcgtttcgcagccggttgagcgggtccaaggtcaagcctagccatatattgcacgccgctggacctgatgaaccacatgttgcaagtccaacatggtctgatacttcccttgatacacgtgacatggatcatgctattagtaaggaggagcttgaagatgttctcaacactccgcttcctgagcatccgaagctaattcgtggtcaattgaagaatggacttcggtatcttatcttaccaaataaagttccagcaaacaggtttgaggctcacatggaagttcatgttggatcaattgatgaggaggaggatgagcaaggaattgcccatatgattgaacatgtcgcgtttcttggcagtaaaaaacgtgaaaaacttttggggacaggtgcgaggtctaatgcgtatacagacttccaccatacggtgttccatatccactctccaactaaaacaaaggaatatggtgaagacttactcccttctgtgctggatgcattgaatgagatagcttttcatccaaagttttcttcatctcgtgttgagaaggagagaagagcaattctttctgagctccagatgatgaacacgatagagtatcgtgttgattgccagttgttgcaacatctgcactcagaaaacaaactgagcaacagatttcctattggacttgaagagcaaatacagaaatgggatccggagaagatccgtagatttcacgaacgttggtactaccctgctaatgccactttatatctggtgggggaaattgatgatattcctagagctgtgcgggaaatagaggctgtatttgaacacactctttcagaaaatgaaggaaaccctgtaccgagcactagtccatttggtgctatggcaagcctttttgcaccaaaactcccaagtggctttactacaaacctaactggtgaaaaatcacctgccacagataaaataaagcctgtaaaaagggaaagacaagcagttagaccacctgtagagcataagtggtcccttcctgaagttgctcaggacgccaaacccccagcaatttttcagcatgagttgattcagagtttctctatcaacatgttctgtaagatacctgttagcaaagttcagacctacaaggacctgcgtagtgtactcatgaaaaggatatttttgtctgccctacattttcgaatcaatacaagatacaagagctcaaatcctccttttacttcagttgagctggaccacagtgactctggaagggaagggtgcactgtcactactcttactgtaacggctgaaccccaaaattggagaagtgccatcaaagttgctgttcatgaggtgcgaaggctgaaagaatttggtgttacaatgggagaaatgacccgttacatggatgcactgataaaagatagtgaacagcttgctatgatgattgacagtgttccctcagttgacaacttggacttcatcatggagagtgatgcacttggccacactgtcatggatcagttgcagggacatgaaagtttgcttgcagtagctgaaactgtcacccttgaagaggtcaatactgttggtgcggaagtattggaattcatttcagattttggaaaacccaatgctccccttcctgctgctattgtggcatgtgtacccaaaaaggtacatgttgatgacataggtgaaactgaatttgagatatatccagaagaaatcactgaggctatcaaggcaggtcttgaggaacctatttacccagagcctgagcttgaggtgccaaaggaattgatcactcaatcaaagctcgatgaactgaaattgcaacacaatccatcatttgttcctttaaccaaagaggagaatgcggtgaaagtgtttgacagtgaaactggtatatcacaacgccgtctttctaacggaatttccatcaactacaagattacacaaaatgaagctagggttggtgtcatgcggctcatagtagggggagggagagcgacagaagattctgaatcaaagggatctgtcattgttggtgttcgttccctgagtgaaggtggctgtgttggtaacttttctagggaacaggttgaacttttctgcgtcaataaccttatcaactgctcactggaatcaaatgaggaattcatatttatggaatttagatttgctttaagagacaatggcatgcgtgctgctttccaactccttcatatggtccttgagcataatgtatggctagaagatgcatttgatagagcaatccagttatatttgtcttactatcgctctatccccaaaagtttggaacgttctacagctcataagcttatgttagccatgctaaaccatgatgaaaggtttgtagagccatcgccacattcactgcagaagttgactcttcagtcagttaaagatgctgtcatgaaccagtttgtgggtagcaacatggaggtcagcattgttggtgatttcactgaagaagaagtagaatcttgtgttcttgattatcttgggactgtgagggcttcaagttctccaaccatagaggagcgtattgaaaagatttcctttcgaccatttccatcagatgttcatttccagcaagtatacataaaggacacagacgagagagcctgtgcatatattgcaggccctgctcctaaccgttgggggttcgctactgaaggaaatgacctatttaatgtcattcagagatctgacgctgatgcagaaatatctgaaccagtaagcttggatctaacagggaagagacacatcaatgttcgcagccaccctcttttctttggcatcactttgagtctgcttgctgaaattatcaattctaggctatttacaacagttcgagattccatgggattaacatatgatgtttcttttgaattgaacctttttgacaaattggatcttggttggtatgtgatcgcagtcacttcaactccaagcaaggtccataaagctgttgatgcctgcaaaggtgttctgagaggattgcatagtagccgaattgtggaaagggagctcgatcgggcaaagaggacactgttgatgaaacatgaagctgagacgaagacaaacgcctactggcttggtttgcttgcccatctacaatcttcatctgtaccaagaaaggatgtatcatgcatcaaggaattgacgacattatatgaaaatgcaacgattgaggatctgtatattgcatatgagcacctgaaagttgacgattcttctttgtttgcttgcattgggattgctggcgctgaatctggtgaagatacaaacgatgacgagcctgatgtggatcttcatggcatgggtcccatgggaggccggggtctttcaacaatgaccagaccaaccacatgatcaccattgggatggccaacccttccaagggagtcacatggccctaggagactgcatgttgactgtcgtttcccagcaaaactgtttaaagataattcaagcatttgatctggatctggaagactattatatcctgagccacaaccaaaagcttggtggctgcattttttccccgaggagcgttgagttaatgactcagcaaggtcgtgaaaaagaatttattgtttgaggtcatgtagcttcacatgtacagtaaaagcaggttggttcttgcatacagttgttgtaactagtgcgttcagggcattgaagataggatgacagtagatcacagacgttgctgggctgcgaatagcgtaaggcatctgctgtaactgtaacgaaataatgaagcgcagtgtcaggaccctggatagatggcaagtgggtggcatgtgtgcctataaaaagggagaacgtatagaccaagggatatgaaagaaccatttgaacaaactaaatcctctctacctttccattactgttatctcttcataatctctcctctcatgtatcctgtttctctaccttctagaacaatttggctatcagatatcaaattagatcgtcttcctcgctgctatctccttcttcaacccttcttctacctgaacatctctcttctctccgatattcccttctgtggcgctaacacgcag

SEQ ID NO: 214209 - DNA, 4420 bp, Zea Mays
atggcctcggcccccttcccgccagtcgcggcgtcggcggcctccgcgccgccgcgcctggccccgcgccaccccttcgctgctgccgcagccgcgcgccgctcctcgctctcgttccgccccgccgcgcgccggcccgttctcccgctccgctcctccgcggtcgcggctaacaccctccgctgcacgcaccgccgcgccgtctcatccaggtcgaggagacgcgcgcaagaactcggcgcggcgcccgcgttggctgcgtcgacctggggcgtcggcgaggagaagggcggttgcctctcgtgcttccccaagagtaggcggggcaggtcggggctcgcgaggttcgcgccgtgcgcgctcccgcacgcgtcgggactatcgtttcgcagccggttgagcgggtccaaggtcaagcctagccatatattgcacgccgctggacctgatgaaccacatgttgcaagtccaacatggtctgatacttcccttgatacacgtgacatggatcatgctattagtaaggaggagcttgaagatgttctcaacactccgcttcctgagcatccgaagctaattcgtggtcaattgaagaatggacttcggtatcttatcttaccaaataaagttccagcaaacaggtttgaggctcacatggaagttcatgttggatcaattgatgaggaggaggatgagcaaggaattgcccatatgattgaacatgtcgcgtttcttggcagtaaaaaacgtgaaaaacttttggggacaggaatatggtgaagacttactcccttctgtgctggatgcattgaatgagatagcttttcatccaaagttttcttcatctcgtgttgagaaggagagaagagcaattctttctgagctccagatgatgaacacgatagagtatcgtgttgattgccagttgttgcaacatctgcactcagaaaacaaactgagcaacagatttcctattggacttgaagagcaaatacagaaatgggatccggagaagatccgtagatttcacgaacgttggtactaccctgctaatgccactttatatctggtgggggaaattgatgatattcctagagctgtgcgggaaatagaggctgtatttgaacacactctttcagaaaatgaaggaaaccctgtaccgagcactagtccatttggtgctatggcaagcctttttgcaccaaaactcccaagtggctttactacaaacctaactggtgaaaaatcacctgccacagataaaataaagcctgtaaaaagggaaagacaagcagttagaccacctgtagagcataagtggtcccttcctgaagttgctcaggacgccaaacccccagcaatttttcagcatgagttgattcagagtttctctatcaacatgttctgtaagatacctgttagcaaagttcagacctacaaggacctgcgtagtgtactcatgaaaaggatatttttgtctgccctacattttcgaatcaatacaagatacaagagctcaaatcctccttttacttcagttgagctggaccacagtgactctggaagggaagggtgcactgtcactactcttactgtaacggctgaaccccaaaattggagaagtgccatcaaagttgctgttcatgaggtgcgaaggctgaaagaatttggtgttacaatgggagaaatgacccgttacatggatgcactgataaaagatagtgaacagcttgctatgatgattgacagtgttccctcagttgacaacttggacttcatcatggagagtgatgcacttggccacactgtcatggatcagttgcagggacatgaaagtttgcttgcagtagctgaaactgtcacccttgaagaggtcaatactgttggtgcggaagtattggaattcatttcagattttggaaaacccaatgctccccttcctgctgctattgtggcatgtgtacccaaaaaggtacatgttgatgacataggtgaaactgaatttgagatatatccagaagaaatcactgaggctatcaaggcaggtcttgaggaacctatttacccagagcctgagcttgaggtgccaaaggaattgatcactcaatcaaagctcgatgaactgaaattgcaacacaatccatcatttgttcctttaaccaaagaggagaatgcggtgaaagtgtttgacagtgaaactggtatatcacaacgccgtctttctaacggaatttccatcaactacaagattacacaaaatgaagctagggttggtgtcatgcggctcatagtagggggagggagagcgacagaagattctgaatcaaagggatctgtcattgttggtgttcgttccctgagtgaaggtggctgtgttggtaacttttctagggaacaggttgaacttttctgcgtcaataaccttatcaactgctcactggaatcaaatgaggaattcatatttatggaatttagatttgctttaagagacaatggcatgcgtgctgctttccaactccttcatatggtccttgagcataatgtatggctagaagatgcatttgatagagcaatccagttatatttgtcttactatcgctctatccccaaaagtttggaacgttctacagctcataagcttatgttagccatgctaaaccatgatgaaaggtttgtagagccatcgccacattcactgcagaagttgactcttcagtcagttaaagatgctgtcatgaaccagtttgtgggtagcaacatggaggtcagcattgttggtgatttcactgaagaagaagtagaatcttgtgttcttgattatcttgggactgtgagggcttcaagttctccaaccatagaggagcgtattgaaaagatttcctttcgaccatttccatcagatgttcatttccagcaagtatacataaaggacacagacgagagagcctgtgcatatattgcaggccctgctcctaaccgttgggggttcgctactgaaggaaatgacctatttaatgtcattcagagatctgacgctgatgcagaaatatctgaaccagtaagcttggatctaacagggaagagacacatcaatgttcgcagccaccctcttttctttggcatcactttgagtctgcttgctgaaattatcaattctaggctatttacaacagttcgagattccatgggattaacatatgatgtttcttttgaattgaacctttttgacaaattggatcttggttggtatgtgatcgcagtcacttcaactccaagcaaggtccataaagctgttgatgcctgcaaaggtgttctgagaggattgcatagtagccgaattgtggaaagggagctcgatcgggcaaagaggacactgttgatgaaacatgaagctgagacgaagacaaacgcctactggcttggtttgcttgcccatctacaatcttcatctgtaccaagaaaggatgtatcatgcatcaaggaattgacgacattatatgaaaatgcaacgattgaggatctgtatattgcatatgagcacctgaaagttgacgattcttctttgtttgcttgcattgggattgctggcgctgaatctggtgaagatacaaacgatgacgagcctgatgtggatcttcatggcatgggtcccatgggaggccggggtctttcaacaatgaccagaccaaccacatgatcaccattgggatggccaacccttccaagggattaaccttgctccccaagacagggagtcacatggccctaggagactgcatgttgactgtcgtttcccagcaaaactgtttaaagataattcaagcatttgatctggatctggaagactattatatcctgagccacaaccaaaagcttggtggctgcattttttccccgaggagcgttgagttaatgactcagcaaggtcgtgaaaaagaatttattgtttgaggtcatgtagcttcacatgtacagtaaaagcaggttggttcttgcatacagttgttgtaactagtgcgttcagggcattgaagataggatgacagtagatcacagacgttgctgggctgcgaatagcgtaaggcatctgctgtaactgtaacgaaataatgaagcgcagtgtcaggaccctggatagatggcaagtgggtggcatgtgtgcctataaaaagggagaacgtatagaccaagggatatgaaagaaccatttgaacaaactaaatcctctctacctttccattactgttatctcttcataatctctcctctcatgtatcctgtttctctaccttctagaacaatttggctatcagatatcaaattagatcgtcttcctcgctgctatctccttcttcaacccttcttctacctgaacatctctcttctctccgatattcccttctgtggcgctaacacgcag

SEQ ID NO: 214210 - DNA, 4466 bp, Zea Mays
atggcctcggcccccttcccgccagtcgcggcgtcggcggcctccgcgccgccgcgcctggccccgcgccaccccttcgctgctgccgcagccgcgcgccgctcctcgctctcgttccgccccgccgcgcgccggcccgttctcccgctccgctcctccgcggtcgcggctaacaccctccgctgcacgcaccgccgcgccgtctcatccaggtcgaggagacgcgcgcaagaactcggcgcggcgcccgcgttggctgcgtcgacctggggcgtcggcgaggagaagggcggttgcctctcgtgcttccccaagagtaggcggggcaggtcggggctcgcgaggttcgcgccgtgcgcgctcccgcacgcgtcgggactatcgtttcgcagccggttgagcgggtccaaggtcaagcctagccatatattgcacgccgctggacctgatgaaccacatgttgcaagtccaacatggtctgatacttcccttgatacacgtgacatggatcatgctattagtaaggaggagcttgaagatgttctcaacactccgcttcctgagcatccgaagctaattcgtggtcaattgaagaatggacttcggtatcttatcttaccaaataaagttccagcaaacaggtttgaggctcacatggaagttcatgttggatcaattgatgaggaggaggatgagcaaggaattgcccatatgattgaacatgtcgcgtttcttggcagtaaaaaacgtgaaaaacttttggggacaggtgcgaggtctaatgcgtatacagacttccaccatacggtgttccatatccactctccaactaaaacaaaggaatatggtgaagacttactcccttctgtgctggatgcattgaatgagatagcttttcatccaaagttttcttcatctcgtgttgagaaggagagaagagcaattctttctgagctccagatgatgaacacgatagagtatcgtgttgattgccagttgttgcaacatctgcactcagaaaacaaactgagcaacagatttcctattggacttgaagagcaaatacagaaatgggatccggagaagatccgtagatttcacgaacgttggtactaccctgctaatgccactttatatctggtgggggaaattgatgatattcctagagctgtgcgggaaatagaggctgtatttgaacacactctttcagaaaatgaaggaaaccctgtaccgagcactagtccatttggtgctatggcaagcctttttgcaccaaaactcccaagtggctttactacaaacctaactggtgaaaaatcacctgccacagataaaataaagcctgtaaaaagggaaagacaagcagttagaccacctgtagagcataagtggtcccttcctgaagttgctcaggacgccaaacccccagcaatttttcagcatgagttgattcagagtttctctatcaacatgttctgtaagatacctgttagcaaagttcagacctacaaggacctgcgtagtgtactcatgaaaaggatatttttgtctgccctacattttcgaatcaatacaagatacaagttgagctggaccacagtgactctggaagggaagggtgcactgtcactactcttactgtaacggctgaaccccaaaattggagaagtgccatcaaagttgctgttcatgaggtgcgaaggctgaaagaatttggtgttacaatgggagaaatgacccgttacatggatgcactgataaaagatagtgaacagcttgctatgatgattgacagtgttccctcagttgacaacttggacttcatcatggagagtgatgcacttggccacactgtcatggatcagttgcagggacatgaaagtttgcttgcagtagctgaaactgtcacccttgaagaggtcaatactgttggtgcggaagtattggaattcatttcagattttggaaaacccaatgctccccttcctgctgctattgtggcatgtgtacccaaaaaggtacatgttgatgacataggtgaaactgaatttgagatatatccagaagaaatcactgaggctatcaaggcaggtcttgaggaacctatttacccagagcctgagcttgaggtgccaaaggaattgatcactcaatcaaagctcgatgaactgaaattgcaacacaatccatcatttgttcctttaaccaaagaggagaatgcggtgaaagtgtttgacagtgaaactggtatatcacaacgccgtctttctaacggaatttccatcaactacaagattacacaaaatgaagctagggttggtgtcatgcggctcatagtagggggagggagagcgacagaagattctgaatcaaagggatctgtcattgttggtgttcgttccctgagtgaaggtggctgtgttggtaacttttctagggaacaggttgaacttttctgcgtcaataaccttatcaactgctcactggaatcaaatgaggaattcatatttatggaatttagatttgctttaagagacaatggcatgcgtgctgctttccaactccttcatatggtccttgagcataatgtatggctagaagatgcatttgatagagcaatccagttatatttgtcttactatcgctctatccccaaaagtttggaacgttctacagctcataagcttatgttagccatgctaaaccatgatgaaaggtttgtagagccatcgccacattcactgcagaagttgactcttcagtcagttaaagatgctgtcatgaaccagtttgtgggtagcaacatggaggtcagcattgttggtgatttcactgaagaagaagtagaatcttgtgttcttgattatcttgggactgtgagggcttcaagttctccaaccatagaggagcgtattgaaaagatttcctttcgaccatttccatcagatgttcatttccagcaagtatacataaaggacacagacgagagagcctgtgcatatattgcaggccctgctcctaaccgttgggggttcgctactgaaggaaatgacctatttaatgtcattcagagatctgacgctgatgcagaaatatctgaaccagtaagcttggatctaacagggaagagacacatcaatgttcgcagccaccctcttttctttggcatcactttgagtctgcttgctgaaattatcaattctaggctatttacaacagttcgagattccatgggattaacatatgatgtttcttttgaattgaacctttttgacaaattggatcttggttggtatgtgatcgcagtcacttcaactccaagcaaggtccataaagctgttgatgcctgcaaaggtgttctgagaggattgcatagtagccgaattgtggaaagggagctcgatcgggcaaagaggacactgttgatgaaacatgaagctgagacgaagacaaacgcctactggcttggtttgcttgcccatctacaatcttcatctgtaccaagaaaggatgtatcatgcatcaaggaattgacgacattatatgaaaatgcaacgattgaggatctgtatattgcatatgagcacctgaaagttgacgattcttctttgtttgcttgcattgggattgctggcgctgaatctggtgaagatacaaacgatgacgagcctgatgtggatcttcatggcatgggtcccatgggaggccggggtctttcaacaatgaccagaccaaccacatgatcaccattgggatggccaacccttccaagggattaaccttgctccccaagacagggagtcacatggccctaggagactgcatgttgactgtcgtttcccagcaaaactgtttaaagataattcaagcatttgatctggatctggaagactattatatcctgagccacaaccaaaagcttggtggctgcattttttccccgaggagcgttgagttaatgactcagcaaggtcgtgaaaaagaatttattgtttgaggtcatgtagcttcacatgtacagtaaaagcaggttggttcttgcatacagttgttgtaactagtgcgttcagggcattgaagataggatgacagtagatcacagacgttgctgggctgcgaatagcgtaaggcatctgctgtaactgtaacgaaataatgaagcgcagtgtcaggaccctggatagatggcaagtgggtggcatgtgtgcctataaaaagggagaacgtatagaccaagggatatgaaagaaccatttgaacaaactaaatcctctctacctttccattactgttatctcttcataatctctcctctcatgtatcctgtttctctaccttctagaacaatttggctatcagatatcaaattagatcgtcttcctcgctgctatctccttcttcaacccttcttctacctgaacatctctcttctctccgatattcccttctgtggcgctaacacgcag

SEQ ID NO: 214211 - DNA, 754 bp, Zea Mays
atcagtatgtccaattatctgaaatctcaatggtatattttgtccaagacgctggcagaggaggctgcttggaagttctcaagggataatggacttgaaatcgttactataaacccagcgatggttattggtcccctgctgcagcctacactaaataccagtgctgaagcaatcctgaagttaatcaatgggtcatcgtctacatatcccaatttttgctttggatgggttaatgtcaaggatgttgccctggcccatatccttgcatacgaggttccctcatcaaatggaaggtactgcatggtggaaagagttgttcactactcagaactggtgaacattatccgcaacatgtatcctacccttcctcttccggacaagtgtgcagatgacaagccgtttgtcccaccctaccaagtatcaaaggagaagataaaaagcataggcatcgagttgattccactggagacgagcgtcaaggagaccatcgaaagcttgaaagagaaggggttcgctagtttttgactcgagcaagctgtgaaacataagtgttactgtactacgtgatgttgcattgtatacatgcatcggacttcgcagttcccaagctattttggtagctttggtctgtaagattacctaaaataaactgagccacgttgccacgctgtagcttttggacatgttatgctttgatcggattgagacacgtgatatatgatcgttgcttacaaatgtggtacgctctatctcc

SEQ ID NO: 214212 - DNA, 6232 bp, Zea Mays
gtccgactccgatgcttatgttttattcaaacgcactcgtgtgtaaaatcgatgggtgcgagagtggacaaatctgaatgaggtgaaacaataccttggataatgaatcgggaaatggcatagctatcctgtttaaattaacaatgccaagccttggcaaagaacatctgatctgctgaacatgtatcatggtatgattcaaatgatcgagaaggtcggatactaatgtgtcagttaataatgtttggcacaagggagtggaggtattttgtaattcagatggaacacaagtgtgtgtttatgtgcatatggacatttctttctctgcctacaattgtatcattcaagggcatacgtaaagggcagatatgcttttttttcaggaattcctgaagacacattgagaaattttatgtccaatgtcttgcctgctgtattgatcctggagtttctcagtgggaccaatttgattgttcaaacgtttgctctagaagtagtcgcccctgccatgcctccattccaaggttggggaccatttcattctttggcatcccaaactaaagtccttgtgagtgtttctgcacaaccagatgatggcctccaaagacaaaagaagctatattcatcagcagttgccatgtcatccacacatcctcctatttcagcacctagctatcgttacatgcctggtgctttagatcttgccatttattcctcagatctatcacgtcctccagtgcagcataccagacacttagcaacagctgctcctgctcacgtagatgctgaccctccggatgcagcttcaaattctagcgcagctcctttgggattagtgcagcctccagtgtctcctcacagtggttgttgtgcaccgaacatggtacaaaaacgagggacccgggactgccattgtgtttatccagtgagaattgagctcttccttcgtaatgtttccttgacttcaaactggagcaacaaatttcttcaagaacttgcttctcagctcaacctgcgcgttaatcagtttgagattgtaaatttttatgttgttggagcttctgggctaaatatcacaatggatatagctccctacactggaattagctttgctgctgatcaagtcaaggcaatgaattattcacttactctgcatacagttcggattgatcctgtgttggtcggggactataatcttcttaatttaacttggttcaggtcattggctccagctccagctccagcattcacaatggcacctagggcctctccatctacagcatctacctttccaagacagagtgagggtccaagcaaaaatagacatgcaagcctgatcacagtggttattatatgtgttggttctctaattggagtcttgctgattgttttaacaatatgcttctgcacatttaggaaagggaaaaagagagtgcctcatgttgaaactcccaagcaaaggacagcagatgcagtttctacagtggagtcccttcctcgccccaccagcacaaggttcctttcatacgaagaactgaaagtggcaacaaataacttcgagccttcaagtgtgcttggagaaggtggttttggccgtgtcttcaagggggtactgggtgatggcactgctgtcgctataaagaagcttactaacggagggcaccaaggagataaggagtttttagttgaagtggaaatgctgagcaggttgcaccaccggaatcttgtgaaactgattggttattacagcagccgtgaatcatcacagaaccttctttgttatgagcttgttcccaatggaagcctagaggcttggcttcatggtacacaaggtgctagccgccccttggactgggacgccaggatgaggatagcacttgatgctgccaggggattagcatacctccatgaggattcgcagccttgcgcgccggaaggtcggacgaactatctttctactcgtgttatgggaactttcgggtatgttgcaccggagtacgccatgacaggacacttgcttgtaaaaagtgatgtatatagctatggagttgttctacttgaactactaactgggaggaggcccgttgatatgtcacagccctctgggcaggaaaacctagtgacttgggcacggccaattctccgagaccaagatagattaggagagctagctgatcccaggcttggcggccagtacccgaaagatgattttgtgcgggtgtgcacaatcgcagcagcctgcgtttcgccagaggcgaaccagaggccaacaatgggcgaggtggtgcagtcactcaagatggtgcagcgctctgtggagttccaggaatctgtgccaacacctcccgctcgccccaacgtccggcaatcgtcgacgacctatgagtctgatggcacctcgtccatgttctcttcgggccccttctcaggcctcagccccttcgagaccgaaaccattccaaggactgcggttttctcagaagatctccatgaaggtcgatgactggtggggggtggctgccttgccatcgccgagccgagccgtttctctagagcctgtagccatgtagtcaagcattcaaaggctggtggtccaattggcctggccagccattgggaggaaaggggtacctgtaaattccatttttctgcgccgtctcaaaagactactactagattattacaacccacaaggacgttctctggctttgtatggaagaaatggttttgttcgaagttgctgctgtcctcagtccatagctcctgaattacgcagacagacagtcctaactcctacatgcagccaaacgcccgttgtgtgggtggacatgtttgtagggtttctcagctgcatgcccctactggcctccaaccgcgttctcccgcggtcaagcaccctcacggtctcacctccgagacctttctctctcttcccctttcaccaatcgctgtcacccatgcaatgcatcttctcttccgtcaccataggccgccggactgcctagctccctcccaatctctcggcgcatggctggcagagctcggggcccattcctggtgctgctactcgtcgccggcgtcgctgccaccgcagagtccaaggtgtacgctccggcggaccgggtgttgctcaactgtgggtcgacgacggacggcctggacgcggacggccggaggtgggtggctgacacgaacgacaacacgtggctggccgactccggcaagtcgtccctgatgatggcggccgacaaggtggacactgggctgccgtccaccatcccctacatgacggcgcgtgtgttcaccgtggaggccgtgtacaacttcaccgtgaacccacgggaccgccactgggtgcgcctccacttctacccgtcctcctacagcgggctctccgccgccggcttccacttctccgtgtccacgtccaccggcatcacgctactccgcaacttcagcgcgtacacctacgcaaaggcgctgagccaggcgtacatcatccgggagttctccttcccgcctacgcccgcggggttcctcaccctcaccttcacgccaacgcccatgggcaacgagacctacgcctacgtcaatggcatcgaggtgatctccatgcccgacatcttcgtcgacccggcgatcatggtcggcttcgcggaccagaccgtagacatcgccagctccacgctccagaccatgtaccggttgaatgtcggcggctcgtacatcccgccgtccaacgactccggcctcacccggcactggtacgacgacacgccatacgtgtacggcgcgacgcagggcgtcacctacagggccggcccgcatttccagatcaagtaccccagcgagatcgccgagtacgccgcgccgccggaggtgtacctgggcacccgatccatgggctccgaccctcgcctgaaccagaactacaacctcacctggaccatggcggtggacggcaacttcacctacgtcgcgcgcctccacttctgcgagctgctgctcagccgggccaaccagcgggcgttcgacatctacgtcaacaacaagacggcgcaggccgacgccgacgtgatcgggatgacgtcggagaagggcgtgcccatatacaaggactacgcggtgtacgtggccgacgaccctgatggccaggccatgtgggtggcgctgcacccgtccgtagcgctccggccgcagttctacgacgccatcctcaacggcctcgagatcttcaagctcaacgacaccgcgggcaacctcgccgcgccagaccccgagccgtccaggttgctcgccaaggcggagctgggcgctggagagcaggaggcgcccaggagtgagcacccccacatatcgacggtgatgggcggcacggcaggcggcgcggccgtgctcgggatcatcgctgcgatctgcgttgtgtggaaccatgaaaagaagagcagggaggcagccagcaccggcgggtcgcacacctccgggtggctgccgctgtaccactcccacaacagcggcaagtcgtcgggccacctcccggcgaaccttgctggcatgtgccggcacttctcgttcgccgagatcaaggtggccaccaagaacttcagcgagtcgctggtgatcggtgtgggcgggttcggcaaagtgtaccggggcgtcgtggatggcgacaccaaggtggccatcaagcggtcgaacccgtcgtcggagcagggcgtgcaggagttccagacggaggtggagatgctgtccaagctgcggcaccggcaccttgtctccctcatcggcttctgcgaggatgccggcgagatgatcctcgtgtatgactacatggagcatggcacgctgcgggagcacctctacatgggcggcaagccgccgctgtcgtggcggcaccgcctagacatctgcatcggcgccgcgcggggcctccactacctccacacgggcgccaagtacaccatcatccaccgcgacgtcaagaccaccaacatcctcgtggaccgggactgggtcgccaaggtctccgacttcggcctctccaagtccggcccgacgacagtgaaccagacgcacgtgagcaccatggtcaagggcagcttcgggtacctcgacccggagtacttccggcggcagcagctgacggacaagtccgacgtgtactccttcggcgtcgtcctcttcgaggtgctcctcgcgcggccagcgctcgacccggcgctgccacgggagcaggtcagcctcgccgactacgcgctcaactgccagcggaccggcaccctgccagacgttgtcgacccagcgatcaaggaccagatcgcgccggagtgtttgaagaaggtcgcggacacggccgagaagtgcctcgccgagcagagcatcgaccggccgtccatgggggacgtcctgtggaacctcgagttcgcgctgcagctgcaggacacctacgaaggaggcagctgcgggcggcgggccgtgggcgacggcagcggcacggggcgcccggcactcgagccgagcaacagcaacgggagcacggcgagcgtcacgacgctggggacgtcgtccacgtcccgggcgcacgaggcggcgtgcgcgatcatggaggagaccgacaatgaggcgttctcgcagctcgtgcgcccaactggccggtaacacggcgctcggtagagatactctcgaggaatttctatccattgcccgaaagatcctgtgcatgcgcgctctcatagtagtgctttattagaaaaatcacctctactccgtattggttactctaatttagttttttttgtttttttggtagatagtaatatagtatacaatgtatttagccatgttcttggaaattttgaagttaaaagttagccggccatgaaaatgtctacacctccattgcctccaccatctgtgatacacaataccgactaaccccgtcaattaccattaaaacacttgggcaccttcgcggctctgtgttgctggcaattatgtaaaagaagaactggcgtggtgttgaaggcagagcttgaggcacattttgtctactgcagaggcgaagaggaactatggacatgtgattgccaagaaatagatcacggcataatagatgtagaatgtcagccaaacgggtggatctaaagtagtttttctagaaagaactgcttttaagtagtactgttttcgtagcatattagatcttttttttctctctgtttttttaaaagag

SEQ ID NO: 214213 - DNA, 6252 bp, Zea Mays
ccgatcccttctgaaaaatccccctcccctccccgaggttgcagcggcgagggaggggagagataataataatcgcaggagggaaaagcagcagcgcaggcgcaaaaagcaaatcaaagccacaccaccaccaccaccggcagctgccgagagccgcgcccgcgcccgaacacaagggagagcggccggagaggaaagccaaatccatccactccaccccgtacgccgccgccgtccctgtccctcccctcttcccgcgcgcatgggccccaaatcgccagcgccgcgacgagcgcgcctgcccccgcggcggcggtagcagcagcagcagctgctgctgtgtgcttcgcgtcttcgccggggatggcgcggctcgggcgagcgggctgccgctccggtccagcccgaggaattcctgaagacacattgagaaattttatgtccaatgtcttgcctgctgtattgatcctggagtttctcagtgggaccaatttgattgttcaaacgtttgctctagaagtagtcgcccctgccatgcctccattccaaggttggggaccatttcattctttggcatcccaaactaaagtccttgtgagtgtttctgcacaaccagatgatggcctccaaagacaaaagaagctatattcatcagcagttgccatgtcatccacacatcctcctatttcagcacctagctatcgttacatgcctggtgctttagatcttgccatttattcctcagatctatcacgtcctccagtgcagcataccagacacttagcaacagctgctcctgctcacgtagatgctgaccctccggatgcagcttcaaattctagcgcagctcctttgggattagtgcagcctccagtgtctcctcacagtggttgttgtgcaccgaacatggtacaaaaacgagggacccgggactgccattgtgtttatccagtgagaattgagctcttccttcgtaatgtttccttgacttcaaactggagcaacaaatttcttcaagaacttgcttctcagctcaacctgcgcgttaatcagtttgagattgtaaatttttatgttgttggagcttctgggctaaatatcacaatggatatagctccctacactggaattagctttgctgctgatcaagtcaaggcaatgaattattcacttactctgcatacagttcggattgatcctgtgttggtcggggactataatcttcttaatttaacttggttcaggtcattggctccagctccagcattcacaatggcacctagggcctctccatctacagcatctacctttccaagacagagtgagggtccaagcaaaaatagacatgcaagcctgatcacagtggttattatatgtgttggttctctaattggagtcttgctgattgttttaacaatatgcttctgcacatttaggaaagggaaaaagagagtgcctcatgttgaaactcccaagcaaaggacagcagatgcagtttctacagtggagtcccttcctcgccccaccagcacaaggttcctttcatacgaagaactgaaagtggcaacaaataacttcgagccttcaagtgtgcttggagaaggtggttttggccgtgtcttcaagggggtactgggtgatggcactgctgtcgctataaagaagcttactaacggagggcaccaaggagataaggagtttttagttgaagtggaaatgctgagcaggttgcaccaccggaatcttgtgaaactgattggttattacagcagccgtgaatcatcacagaaccttctttgttatgagcttgttcccaatggaagcctagaggcttggcttcatggtacacaaggtgctagccgccccttggactgggacgccaggatgaggatagcacttgatgctgccaggggattagcatacctccatgaggattcgcagccttgcgcgccggaaggtcggacgaactatctttctactcgtgttatgggaactttcgggtatgttgcaccggagtacgccatgacaggacacttgcttgtaaaaagtgatgtatatagctatggagttgttctacttgaactactaactgggaggaggcccgttgatatgtcacagccctctgggcaggaaaacctagtgacttgggcacggccaattctccgagaccaagatagattaggagagctagctgatcccaggcttggcggccagtacccgaaagatgattttgtgcgggtgtgcacaatcgcagcagcctgcgtttcgccagaggcgaaccagaggccaacaatgggcgaggtggtgcagtcactcaagatggtgcagcgctctgtggagttccaggaatctgtgccaacacctcccgctcgccccaacgtccggcaatcgtcgacgacctatgagtctgatggcacctcgtccatgttctcttcgggccccttctcaggcctcagccccttcgagaccgaaaccattccaaggactgcggttttctcagaagatctccatgaaggtcgatgactggtggggggtggctgccttgccatcgccgagccgagccgtttctctagagcctgtagccatgtagtcaagcattcaaaggctggtggtccaattggcctggccagccattgggaggaaaggggtacctgtaaattccatttttctgcgccgtctcaaaagactactactagattattacaacccacaaggacgttctctggctttgtatggaagaaatggttttgttcgaagttgctgctgtcctcagtccatagctcctgaattacgcagacagacagtcctaactcctacatgcagccaaacgcccgttgtgtgggtggacatgtttgtagggtttctcagctgcatgcccctactggcctccaaccgcgttctcccgcggtcaagcaccctcacggtctcacctccgagacctttctctctcttcccctttcaccaatcgctgtcacccatgcaatgcatcttctcttccgtcaccataggccgccggactgcctagctccctcccaatctctcggcgcatggctggcagagctcggggcccattcctggtgctgctactcgtcgccggcgtcgctgccaccgcagagtccaaggtgtacgctccggcggaccgggtgttgctcaactgtgggtcgacgacggacggcctggacgcggacggccggaggtgggtggctgacacgaacgacaacacgtggctggccgactccggcaagtcgtccctgatgatggcggccgacaaggtggacactgggctgccgtccaccatcccctacatgacggcgcgtgtgttcaccgtggaggccgtgtacaacttcaccgtgaacccacgggaccgccactgggtgcgcctccacttctacccgtcctcctacagcgggctctccgccgccggcttccacttctccgtgtccacgtccaccggcatcacgctactccgcaacttcagcgcgtacacctacgcaaaggcgctgagccaggcgtacatcatccgggagttctccttcccgcctacgcccgcggggttcctcaccctcaccttcacgccaacgcccatgggcaacgagacctacgcctacgtcaatggcatcgaggtgatctccatgcccgacatcttcgtcgacccggcgatcatggtcggcttcgcggaccagaccgtagacatcgccagctccacgctccagaccatgtaccggttgaatgtcggcggctcgtacatcccgccgtccaacgactccggcctcacccggcactggtacgacgacacgccatacgtgtacggcgcgacgcagggcgtcacctacagggccggcccgcatttccagatcaagtaccccagcgagatcgccgagtacgccgcgccgccggaggtgtacctgggcacccgatccatgggctccgaccctcgcctgaaccagaactacaacctcacctggaccatggcggtggacggcaacttcacctacgtcgcgcgcctccacttctgcgagctgctgctcagccgggccaaccagcgggcgttcgacatctacgtcaacaacaagacggcgcaggccgacgccgacgtgatcgggatgacgtcggagaagggcgtgcccatatacaaggactacgcggtgtacgtggccgacgaccctgatggccaggccatgtgggtggcgctgcacccgtccgtagcgctccggccgcagttctacgacgccatcctcaacggcctcgagatcttcaagctcaacgacaccgcgggcaacctcgccgcgccagaccccgagccgtccaggttgctcgccaaggcggagctgggcgctggagagcaggaggcgcccaggagtgagcacccccacatatcgacggtgatgggcggcacggcaggcggcgcggccgtgctcgggatcatcgctgcgatctgcgttgtgtggaaccatgaaaagaagagcagggaggcagccagcaccggcgggtcgcacacctccgggtggctgccgctgtaccactcccacaacagcggcaagtcgtcgggccacctcccggcgaaccttgctggcatgtgccggcacttctcgttcgccgagatcaaggtggccaccaagaacttcagcgagtcgctggtgatcggtgtgggcgggttcggcaaagtgtaccggggcgtcgtggatggcgacaccaaggtggccatcaagcggtcgaacccgtcgtcggagcagggcgtgcaggagttccagacggaggtggagatgctgtccaagctgcggcaccggcaccttgtctccctcatcggcttctgcgaggatgccggcgagatgatcctcgtgtatgactacatggagcatggcacgctgcgggagcacctctacatgggcggcaagccgccgctgtcgtggcggcaccgcctagacatctgcatcggcgccgcgcggggcctccactacctccacacgggcgccaagtacaccatcatccaccgcgacgtcaagaccaccaacatcctcgtggaccgggactgggtcgccaaggtctccgacttcggcctctccaagtccggcccgacgacagtgaaccagacgcacgtgagcaccatggtcaagggcagcttcgggtacctcgacccggagtacttccggcggcagcagctgacggacaagtccgacgtgtactccttcggcgtcgtcctcttcgaggtgctcctcgcgcggccagcgctcgacccggcgctgccacgggagcaggtcagcctcgccgactacgcgctcaactgccagcggaccggcaccctgccagacgttgtcgacccagcgatcaaggaccagatcgcgccggagtgtttgaagaaggtcgcggacacggccgagaagtgcctcgccgagcagagcatcgaccggccgtccatgggggacgtcctgtggaacctcgagttcgcgctgcagctgcaggacacctacgaaggaggcagctgcgggcggcgggccgtgggcgacggcagcggcacggggcgcccggcactcgagccgagcaacagcaacgggagcacggcgagcgtcacgacgctggggacgtcgtccacgtcccgggcgcacgaggcggcgtgcgcgatcatggaggagaccgacaatgaggcgttctcgcagctcgtgcgcccaactggccggtaacacggcgctcggtagagatactctcgaggaatttctatccattgcccgaaagatcctgtgcatgcgcgctctcatagtagtgctttattagaaaaatcacctctactccgtattggttactctaatttagttttttttgtttttttggtagatagtaatatagtatacaatgtatttagccatgttcttggaaattttgaagttaaaagttagccggccatgaaaatgtctacacctccattgcctccaccatctgtgatacacaataccgactaaccccgtcaattaccattaaaacacttgggcaccttcgcggctctgtgttgctggcaattatgtaaaagaagaactggcgtggtgttgaaggcagagcttgaggcacattttgtctactgcagaggcgaagaggaactatggacatgtgattgccaagaaatagatcacggcataatagatgtagaatgtcagccaaacgggtggatctaaagtagtttttctagaaagaactgcttttaagtagtactgttttcgtagcatattagatcttttttttctctctgtttttttaaaagag

SEQ ID NO: 214214 - DNA, 3608 bp, Zea Mays
agtcatcgcagccgcgtttcgccttcccctctcgctcgcctgcggttcggttggttagctcggcagctggagcgttttccccgctggtggttcgtctttcggttgctccacctccaaccgaacctccctcctccccaccacaaatatactagtgctagcaaccaccaccacctgcgtcttcccagctccgttccgtcctcgcccgccggccaccaccggtggggcccactgccctacgctccgattgcttgcctggcccttcccaccgcctctgtgcggcgtcgcgcgggaaacacaccaacgtccaaggggaggtagagagagaggaacgggaggcgcctcggatccccggcctccaccgcgcgccgggggacctccggagtgaaatgtgggacccgtgccgccgggaatttctctagaggcttgtccgcaccaccgccgagcgacacgatatggtggagggtaggagctatctccctgcagaggtcaggagcggcctcgagaccctgaagcagaggaggctcgagagaatgcgtttgagtgctcagaatgaagagggcggcaatcctgcgttggctgcgagaagcggtggtgatgccttgcggagccccactaactgcagggtcagattgcatcccgacaacaatacaggaggtttacctggagatgtccagggcaagaatccttttgcaaagcgcaaggtggagaagtttgatatgtccaaccttgagtggataaacaagataccagagtgccctgtgtattgtcccaccaaggtggaattcgaggatcccattgcttatatacaaatgatttcacccgaggctgctaaatacggtatttgtaaaatcgtctctcctgtatgtgcgtctgttcctgccggtgttgtgctgatgaaggaacagcccagctttaagttcatgactagagttcagccccttcgtcttgctgaatgggctgaggatgatacggtcactttcttcatgagtggaagaaagtacaccttccgggactacgagaaaatggcaaacaaagtgttctctaagagatattccagctctagttgtcttccaggtaggtatgtggaggaggagttctggcgtgaaattgcttttggcaaaatggatttcgtagaatatgcttgtgatgttgatgggagtgccttctcttcttctccccatgatcaacttgggaaaagcaactggaacctcaagaatttttcacggctccccggttcagttctaagacttcttcagacaccaattccaggagtgacagatccaatgctttatattgggatgctcttcagcatgtttgcgtggcatgtggaagatcattatttgtacagcatcaattaccatcactgtggggcatctaagacatggtatgggataccaggcgatgcggctcctgggtttgaaagggttgcaagccaatacgtatataacaaggacattttgattggtgatggagaggatgcagcgtttgatgttctactgggcaagacgacaatgttccctccaaatgtcttgctagatcacaatgttcctgtctataaagctgtacaaagacctggagagtttgttataacgtttcctcgttcttaccacgcaggcttcagtcatggcttcaattgtggagaggctgttaattttgctgttggcgattggttccctcttggttctttggctagcaagcgctacgcgcttctgaacagaactccattgcttgcacatgaggagctactttgtcgttctgctatgcttctgtcccaaaagctgttaaactgtgacccaagatccttggacaagttggaacatccatgttcccagtattctgtgaaatcctgctttgtgcggttgataaaattccagcgacgtgcacgtgacctacttgctaaaatgggttctgaaatatgctataagccaaagacatctccaaatctatcctgtagcatttgccggcgtggttgctatatcacacatgtgttgtgtggatgtaactttgatcctgtctgcctacatcatgaacaagaactgcggagctgcccttgtaagtccagtcgtgttgtctatgttagagaagacatactggagctagaggctctatcaagaaaatttgagcatgatgtctacttgtataaggaaagaagttccattagatcatgtaaggaggctgagatctctgatgctaatgttgaacacgtcccaaatcttggtattactctggattttgctaatagtaaagctggtagctctggctttataactgtcgatggaggaaacagttcttctgcagtatcaattttgacatcttctgcgcatcatgaggcactcatgcattcagaagcaagggcaataaatacatcagtgaccaaaggaacttgcactacagatgagagttcatccggcatggattgtgcttgtaatgaacatggttcatgtaatgcttcagtcatggaatgcagtgatgattccggttcagagaatgaaattttccgagtcaagcgcaggtccaccttatttgacaaacctacttctgaaacaaagacatcaaccttgtctgaacagcaggttctgaggcggctgaagaaggtacgtcctggagtacagcaggtcagtaagcgtccagaagaatctggtaatggttcagttcgctctacccatatgagcccgagctcaaatcatgcctcttcggatgatgaaatagacatggctcccctattcttgaggataaagcggcggcagttggaaaaccaagatgttacaagtcgtggcgcgagatcacagtcatacccatcttccagtggttctcgagaagagtttgtggaaagaagtagagatgctgcagcagagctccgtccaaaacgagtgaaaatccggctaccttctagtgccagtaggcagattgagcagcagcgcagttcggggcagcgatttgcaagggaggacaagttgccgcttgcattttagggaatcacaggtactaacctctactgggcagacgaattctttgtttaagtgcattgttaactacaaaacgaggtggcagaagagagtgggagggatcaggttgtgattgtggcagagctgatttggttagcacaggtgcagactgactttagaattggcagcaaagggaagtggctggctaatcgattcttttgtgcagcagggcctccaatttgaggcctctgggggcacgcttaggagacacacacgtgacaatattctcgttgctcgaggttctgtgtcactgccggtggctctttgatgcctggttatcagtgacagaaattgaggagaacctcgctacttcgatttctctgcaagtgtttagagcatgtagctagcttagctgtatatctctcactgtacctacggtctttcctattttttttgtaatttcctgtaaacaggcatagctgctacagtatggctaactctctattcttttgttggtttagcctggcgctgcttagcattttcaattaaatcgagattcgtttccttttcggatggttggtatatgttctggtgttgctgctctcaattgtgtggaatgttctgttatgttggcatggttagagatgacaatggggaccttat

SEQ ID NO: 214215 - DNA, 3450 bp, Zea Mays
ccgcgtttcgccttcccctctcgctcgcctgcggttcggttggttagctcggcagctggagcgttttccccgctggtggttcgtctttcggttgctccacctccaaccgaacctccctcctccccaccacaaatatactagtgctagcaaccaccaccacctgcgtcttcccagctccgttccgtcctcgcccgccggccaccaccggtggggcccactgccctacgctccgattgcttgcctggcccttcccaccgcctctgtgcggcgtcgcgcgggaaacacaccaacgtccaaggggaggtagagagagaggaacgggaggcgcctcggatccccggcctccaccgcgcgccgggggacctccggagtgaaatgtgggacccgtgccgccgggaatttctctagaggcttgtccgcaccaccgccgagcgacacgatatggtggagggtaggagctatctccctgcagaggtcaggagcggcctcgagaccctgaagcagaggaggctcgagagaatgcgtttgagtgctcagaatgaagagggcggcaatcctgcgttggctgcgagaagcggtggtgatgccttgcggagccccactaactgcagggtcagattgcatcccgacaacaatacaggaggtttacctggagatgtccagggcaagaatccttttgcaaagcgcaaggtggagaagtttgatatgtccaaccttgagtggataaacaagataccagagtgccctgtgtattgtcccaccaaggtggaattcgaggatcccattgcttatatacaaatgatttcacccgaggctgctaaatacggtatttgtaaaatcgtctctcctgtatgtgcgtctgttcctgccggtgttgtgctgatgaaggaacagcccagctttaagttcatgactagagttcagccccttcgtcttgctgaatgggctgaggatgatacggtcactttcttcatgagtggaagaaagtacaccttccgggactacgagaaaatggcaaacaaagtgttctctaagagatattccagctctagttgtcttccaggtaggtatgtggaggaggagttctggcgtgaaattgcttttggcaaaatggatttcgtagaatatgcttgtgatgttgatgggagtgccttctcttcttctccccatgatcaacttgggaaaagcaactggaacctcaagaatttttcacggctccccggttcagttctaagacttcttcagacaccaattccaggagtgacagatccaatgctttatattgggatgctcttcagcatgtttgcgtggcatgtggaagatcattatttgtacagcatcaattaccatcactgtggggcatctaagacatggtatgggataccaggcgatgcggctcctgggtttgaaagggttgcaagccaatacgtatataacaaggacattttgattggtgatggagaggatgcagcgtttgatgttctactgggcaagacgacaatgttccctccaaatgtcttgctagatcacaatgttcctgtctataaagctgtacaaagacctggagagtttgttataacgtttcctcgttcttaccacgcaggcttcagtcatggcttcaattgtggagaggctgttaattttgctgttggcgattggttccctcttggttctttggctagcaagcgctacgcgcttctgaacagaactccattgcttgcacatgaggagctactttgtcgttctgctatgcttctgtcccaaaagctgttaaactgtgacccaagatccttggacaagttggaacatccatgttcccagtattctgtgaaatcctgctttgtgcggttgataaaattccagcgacgtgcacgtgacctacttgctaaaatgggttctgaaatatgctataagccaaagacatctccaaatctatcctgtagcatttgccggcgtggttgctatatcacacatgtgttgtgtggatgtaactttgatcctgtctgcctacatcatgaacaagaactgcggagctgcccttgtaagtccagtcgtgttgtctatgttagagaagacatactggagctagaggctctatcaagaaaatttgagcatgatgtctacttgtataaggaaagaagttccattagatcatgtaaggaggctgagatctctgatgctaatgttgaacacgtcccaaatcttggtattactctggattttgctaatagtaaagctggtagctctggctttataactgtcgatggaggaaacagttcttctgcagtatcaattttgacatcttctgcgcatcatgaggcactcatgcattcagaagcaagggttcatgcaacacaaactgaccagatttattccactgccaagcaggcaataaatacatcagtgaccaaaggaacttgcactacagatgagagttcatccggcatggattgtgcttgtaatgaacatggttcatgtaatgcttcagtcatggaatgcagtgatgattccggttcagagaatgaaattttccgagtcaagcgcaggtccaccttatttgacaaacctacttctgaaacaaagacatcaaccttgtctgaacagcaggttctgaggcggctgaagaaggtacgtcctggagtacagcaggtcagtaagcgtccagaagaatctggtaatggttcagttcgctctacccatatgagcccgagctcaaatcatgcctcttcggatgatgaaatagacatggctcccctattcttgaggataaagcggcggcagttggaaaaccaagatgttacaagtcgtggcgcgagatcacagtcatacccatcttccagtggttctcgagaagagtttgtggaaagaagtagagatgctgcagcagagctccgtccaaaacgagtgaaaatccggctaccttctagtgccagtaggcagattgagcagcagcgcagttcggggcagcgatttgcaagggaggacaagttgccgcttgcattttagggaatcacagggcctccaatttgaggcctctgggggcacgcttaggagacacacacgtgacaatattctcgttgctcgaggttctgtgtcactgccggtggctctttgatgcctggttatcagtgacagaaattgaggagaacctcgctacttcgatttctctgcaagtgtttagagcatgtagctagcttagctgtatatctctcactgtacctacggtctttcctattttttttgtaatttcctgtaaacaggcatagctgctacagtatggctaactctctattcttttgttggtttagcctggcgctgcttagcattttcaattaaatcgagattcgtttccttttcggatggttggtatatgttctggtgttgctgctctcaattgtgtggaatgttctgttatgttggcatggttagagatgacaatggggaccttat

SEQ ID NO: 214216 - DNA, 3217 bp, Zea Mays
cattaggctgctgacgaaagtggagggtaggagctatctccctgcagaggtcaggagcggcctcgagaccctgaagcagaggaggctcgagagaatgcgtttgagtgctcagaatgaagagggcggcaatcctgcgttggctgcgagaagcggtggtgatgccttgcggagccccactaactgcagggtcagattgcatcccgacaacaatacaggaggtttacctggagatgtccagggcaagaatccttttgcaaagcgcaaggtggagaagtttgatatgtccaaccttgagtggataaacaagataccagagtgccctgtgtattgtcccaccaaggtggaattcgaggatcccattgcttatatacaaatgatttcacccgaggctgctaaatacggtatttgtaaaatcgtctctcctgtatgtgcgtctgttcctgccggtgttgtgctgatgaaggaacagcccagctttaagttcatgactagagttcagccccttcgtcttgctgaatgggctgaggatgatacggtcactttcttcatgagtggaagaaagtacaccttccgggactacgagaaaatggcaaacaaagtgttctctaagagatattccagctctagttgtcttccaggtaggtatgtggaggaggagttctggcgtgaaattgcttttggcaaaatggatttcgtagaatatgcttgtgatgttgatgggagtgccttctcttcttctccccatgatcaacttgggaaaagcaactggaacctcaagaatttttcacggctccccggttcagttctaagacttcttcagacaccaattccaggagtgacagatccaatgctttatattgggatgctcttcagcatgtttgcgtggcatgtggaagatcattatttgtacagcatcaattaccatcactgtggggcatctaagacatggtatgggataccaggcgatgcggctcctgggtttgaaagggttgcaagccaatacgtatataacaaggacattttgattggtgatggagaggatgcagcgtttgatgttctactgggcaagacgacaatgttccctccaaatgtcttgctagatcacaatgttcctgtctataaagctgtacaaagacctggagagtttgttataacgtttcctcgttcttaccacgcaggcttcagtcatggcttcaattgtggagaggctgttaattttgctgttggcgattggttccctcttggttctttggctagcaagcgctacgcgcttctgaacagaactccattgcttgcacatgaggagctactttgtcgttctgctatgcttctgtcccaaaagctgttaaactgtgacccaagatccttggacaagttggaacatccatgttcccagtattctgtgaaatcctgctttgtgcggttgataaaattccagcgacgtgcacgtgacctacttgctaaaatgggttctgaaatatgctataagccaaagacatctccaaatctatcctgtagcatttgccggcgtggttgctatatcacacatgtgttgtgtggatgtaactttgatcctgtctgcctacatcatgaacaagaactgcggagctgcccttgtaagtccagtcgtgttgtctatgttagagaagacatactggagctagaggctctatcaagaaaatttgagcatgatgtctacttgtataaggaaagaagttccattagatcatgtaaggaggctgagatctctgatgctaatgttgaacacgtcccaaatcttggtattactctggattttgctaatagtaaagctggtagctctggctttataactgtcgatggaggaaacagttcttctgcagtatcaattttgacatcttctgcgcatcatgaggcactcatgcattcagaagcaagggttcatgcaacacaaactgaccagatttattccactgccaagcaggcaataaatacatcagtgaccaaaggaacttgcactacagatgagagttcatccggcatggattgtgcttgtaatgaacatggttcatgtaatgcttcagtcatggaatgcagtgatgattccggttcagagaatgaaattttccgagtcaagcgcaggtccaccttatttgacaaacctacttctgaaacaaagacatcaaccttgtctgaacagcaggttctgaggcggctgaagaaggtacgtcctggagtacagcaggtcagtaagcgtccagaagaatctggtaatggttcagttcgctctacccatatgagcccgagctcaaatcatgcctcttcggatgatgaaatagacatggctcccctattcttgaggataaagcggcggcagttggaaaaccaagatgttacaagtcgtggcgcgagatcacagtcatacccatcttccagtggttctcgagaagagtttgtggaaagaagtagagatgctgcagcagagctccgtccaaaacgagtgaaaatccggctaccttctagtgccagtaggcagattgagcagcagcgcagttcggggcagcgatttgcaagggaggacaagttgccgcttgcattttagggaatcacaggtactaacctctactgggcagacgaattctttgtttaagtgcattgttaactacaaaacgaggtggcagaagagagtgggagggatcaggttgtgattgtggcagagctgatttggttagcacaggtgcagactgactttagaattggcagcaaagggaagtggctggctaatcgattcttttgtgcagcagggcctccaatttgaggcctctgggggcacgcttaggagacacacacgtgacaatattctcgttgctcgaggttctgtgtcactgccggtggctctttgatgcctggttatcagtgacagaaattgaggagaacctcgctacttcgatttctctgcaagtgtttagagcatgtagctagcttagctgtatatctctcactgtacctacggtctttcctattttttttgtaatttcctgtaaacaggcatagctgctacagtatggctaactctctattcttttgttggtttagcctggcgctgcttagcattttcaattaaatcgagattcgtttccttttcggatggttggtatatgttctggtgttgctgctctcaattgtgtggaatgttctgttatgttggcatggttagagatgacaatggggaccttat

SEQ ID NO: 214217 - DNA, 1660 bp, Zea Mays
acgacgaatccggcactcgcaaccaccgcatccgtcctcgtctggtccggttgcctactcccctcccactgccccgctgctgctgcctccccgcgcaatggcgccgagatccccgcgctgagcgagcctcccgggggtcgacctccgaaccggcgctgccgtcccgcagtgcacttgaagaccaggcagctgttctctactcaaggaagagatggcccatgtttcgttcaaaagcaaagatgtggacagcggcatgtcccggtggtctgaatacctaagtgttgaagagccaattccttccgcaatggcaacctggaggaacatgagcgctgatgcgccgcaaggctcttctgctggtagccacaaacatcttcagatggagccggtggttcagctgtccaaggttgcggaaggcttgctggccaaaatgtaccggctgaacagcatcctggactatccagatccaaacacgcacacattctcggatgcattttggaaagctggtgtctttccaaatttccccaaaatttgcatcacgatgtcaaaaaaatttccggaacatcctaacaagctgcagctagaaagggtagataagtttggtcttgatgctttaaacgagaatgctgaaggttacatgcacaatcttgagcagtggatcctgttgcttcttgatttgctggcatttcgtgaacaagctttgcgacttattttggatttgagcagcacggtcataacattgctgccacaccaaaactctttaattcttcatgcttttatggatctgttttgttcatttgtccgagtgaatcttttctctgacaagatgccaagaaagatgatcctccaggtttataacatcttgcacataatgctaaagggtggtcgtgattgtgagttttatcaccgactggttcagtttgtggactcttatgatccacctatcaaggggttgcatgaagatcttaattttgtgagcccaagaattggagaggtcctggaagctgttggcccaattatatttctttcaactgatacaaaaaagttaaggaacgaaggtttcctcagtccatttcatccacgttatccagacatcctaacaaattctgcccatccaatgagggcccaagacttggctaatgtcacatcataccgtgagtgggttcttctaggatatcttgtttgtcctgatgaactacttagggtgaccagtatagatgttgccatggttgttctgaaagagaacttaatacttcctctgttcagagatgagtacatcttacttcatgaaaattatcaactttatgttcttccaaaagttctagaatcgaagagaatggctaaatctggccgaactaagcaaaaggaagctgatctggagtacaatgttgcaaagcaggttgagagaatgttaacggaagtgcatgagcaagcactggtgtcatgtgatgctatgcatcgtgagaggagaattcttcttaagcaggaaattggaaggatggttttatttttcactgatcaacctagcctcctagcacctaatattcaggacaaaaaacggatcagtccacatggagctccgggataatcactggatcaacgcgatgtgaggctaaatcaccattgcaatccagatacaggagttcatctcactttggatcag

SEQ ID NO: 214218 - DNA, 738 bp, Zea Mays
attaaccgacggcgtcatctccagctccactccacttgactccgtccccgggcctgggcgaaccctagcgccgccccgccaaggttgcttcagacgatgcagccgaacgaggtcgccgacaaggccattgtcataatgcagcacgccgcgaagcaggtcctgggtacgtgcaaggagaagctccacctggggaagccactcagcgtgtttgaagtgaaggaactaaaagaagcgcttgaagccattgccgaagcactggaccaggactcgctgctttgccaagttgctttggatgcgggtgctcccagcttagtagaagatcactgggacgacgaaggcggagaagccgtggtggcgggtctcccatggcctgaatccccacgtccggaggacttcatgtcccttgaaaagcacatagaaacctactggagcgtcgagtacgactcggacaatatgctgcctagcttatctgattagattaggtggtagatatgatggattaattcttcttcgcaagcaatttttttttcttgcattccttcctcctcctcccaccttccttccctctatttgtaaagctagcacccccggccaatcaatctcttttgaaggatgaaatgttactagatgcatatcctgagaatcatgcaaaaaatatattcatcttaaacacacaataaccaacacataatttctaatgctgccctaaatactaaaatacattttcttcactgtgcc

SEQ ID NO: 214219 - DNA, 4035 bp, Zea Mays
ctctgcacaaactactaaacaatcgcacgtcactctaggtagggatagtaatggccaactaattcttcataaaatgttaagtccctaaacaaaaatgaatactctaatcctaatccgacccccttgtctctaggggggaggagggaatagatcagagaggaggcgcgaacacgtaggggcacggacctctgcacgacggagaactctgcaacacagaagcaacatcagctcgtcgcgcatgacgcgaatcaaggagggagggaatagatctcgggacggaaagacatacctgaagcaaccttggcggggcggcgctagggttcgcccaggcccggggacggagtcaagtggagtggagctggagatgacgccgtcggttaatggacaggggaatggattaatgaggagatgacaaaatgggccaaccaatggccggcgattctgtcaaagcccaacaatggcagtttcataatcgcagatttctctccacgatatttccatctccatctccacacccttgagatgcttggggtcgctgtctgggccgagacagcggcgacttgcacatcaggagaaggacgacgactacgaccccccattgtccttgtctagacgcttttaccttgtgtaccaccccatggcggagtcgccgcatcattttgagatatttatgatccccttattaatgggtgaccgtgatgctctggtgtgtgatgcggcaatgggggaggtgtgagatatttatgatccccatggcggagacgctctggtgtgccgacaatatcactattgaccttgaggagcaagaatgaccgccatcaacattcagaacccacgtcttctcatcaaggagatggaggtgggaggagaggtcctggatacgccaaggggagcctacgggacgtccccatggccgatatgctgcgataggatgaaggatggtggggttcttgtaggtggactgaaggaatatctcaaaacaattaggcgctgcagaaaagggtgggttttattttattggttgtggaacaagttacaatgctgccttagctgcaagaccctttttgtggaagaactgactggtattcctgtgactatggaggttgcaagcgacttgctggacagacaaggtcccatctacagagaagacgccgcagtttttgttagtcagtctggagagacagcagataccctccttgcattgctcttgattatgctctagaaaatggacctctccgtgttggcatcacgaaatactgttggaatcacactgtctagaagaacgcactgcggagtccatatcaatgctgattgccggtacaaaggcatatacaagtcaaatagtagcaatggtgatgatggcgttggctatcggatccgaccaataatatatctactcgagctagaaggaaaattatcatcagtggacttaacaacctttcaagtacgtcgaacttactagatccttgtgctatggctgcagtcaagcaaaaaggctgtttctgacgcatgcttcagcaagcagcagtcggtgatccagcagctcctctcgcgcaaggggacgccgccgatagtgatgtgctcgaggggggacgccaccgcgctgctgtatgccccagtggatcctgcagagtcattgaagttccggaggttgcatgttgtctccagccagtgattaacataatcccattacagttgctcgcgtacaatctgactgttctccagggattcgatgtggaccaaccacggaatctggagaagagcgtgaccacgcagtaggtagagaggtggaagtggatgatgagatgcgcgaacgatttgtacccctatgtcgtgttgtgtagggttctaggagagagcaagccggctatagctgttggttagtcattttcttttgtgtaatgtaattattactgttcttgaggtagctagtactatcattactctacgttaaacaagtcgttgtgaaatgcatggtacaaaaggtatcatttgagaaacaagtgtgtttttcataccgattgggcgatataaatctcgtaaacttgtaattctgatctctcaaatttgaggcgtctggcaaaggtacaaaatcaaaaccctcaaaaatctgacggcagaaattttccgacgaacattgtatcagagttttctctccttatttcctgtaagaacatgacggtcatttctttttacagggcattgagccccctgatattccagtacaacagtctaatactccaaattctaaaacaggagctgagatattcatgtatgacatctcgtcggcgtcttcttctgcctcctgtcctccggcctcatctggcctttgctgcggccatacgtattcatgtatgccatatgatcgacggcctccccctgtataaccctccagggctaatcttgctctgggctttcatgtggatttggtgatattgagtcagtttaaatccataataaattaaaatccacctcaatacatctcaatcctataaccgaacaaggcctcatcgttggttgaagctccagctattctctaaaaatcaaatatggtggtaaggatgaagatgaacagttggaacacttttctgaataggtaaaattttcagcccactcatgtgtgagccaccgtcagcattggatcggctgttctttttatatctgtagtagggcctcttatcatttcaaactgatgggtgatctcaaggacctcagggggtagctgagaacacactgacctgaatcttcgacggaagaaacttgaagatatcatagatcttataaggaggaaagaagagttgaaagctggttagatgtatatgattcccaataataaatttgacctgtgcatatcacaatactactaatcaccgaataccatgcataaatgtcgattagttgagatctgcagtttctttcctgattcagcctaggagtacttaacagtttattggaactagtctgattcagccctagagtagcaagggagcctaagccgcaagaaaatgtgtattgtagcaacctgtgcatgtgtcctggtgttagtttcttctgaacggacattgaacttacagtacaaattttcagaattttgcagcaggttcaagcacaagcacgcttcatcatcaacaaattaagtgcaaaccaaccttatttgctgaaaatggataatatggtttacgtatcacaaaccagcaggttgatttgaatttaatttattgtcgatgaagcgtgcttgtgcttaaaactgctgcaaagttctaaaaaattgcactgttaagttcaatgtccgctctgaagaaactaacaccagaacacatgcacaggttggaacaatccacatttttgcagcttaggctcccttgttgctccagtgctgaattagaccagttccaataagccgttaaagtactcctaggctgaatcaggaaataaactgcatacctcaactaatcgatatttatgtatggtacgcgagcaattgaaccaaaaaaacagcagaatttgttcagtgaacagtgaactgtaccaaaaaaaaatatgacaaaacaagcttagacaaacaaacctgtaatgggattatgttaatcactggctggagacaatctacaaactctagaacttgaatgactctgcaggatccactggggcatacagcagaggcgtccccctcgaacacatcactatcaggcgccccttgcgccagaggagctgctggatcaccgactgctgcttgctgcaagacacgaggtggggaaccaaccagcttcagccttcaggggtttcttggtattaagcacaaccaaaactgacgaggcccttttcgaaacatttatttggccaaaacaaaagcatttaagaaagtgggagaattcttcaaaacctagaaatacttgtgcaaattcaattcttgtactttcgaccaaaaacaaaagactttgaaaagtttttatcaaaaaataaaaaacaaatgctaagtgatgcaaataaggtccaaaattttattgttcagactatacacaatttgagttgaat

SEQ ID NO: 214220 - DNA, 3187 bp, Zea Mays
gtcctggatacgccaaggggagcctacgggacgtccccatggccgatatgctgcgataggatgaaggatggtggggttcttgtaggtggactgaaggaatatctcaaaacaattaggcgctgcagaaaagggtgggttttattttattggttgtggaacaagttacaatgctgccttagctgcaagaccctttttgtggaagaactgactggtattcctgtgactatggaggttgcaagcgacttgctggacagacaaggtcccatctacagagaagacgccgcagtttttgttagtcagtctggagagacagcagataccctccttgcattgctcttgattatgctctagaaaatggacctctccgtgttggcatcacgaaatactgttggaatcacactgtctagaagaacgcactgcggagtccatatcaatgctgattgccggtacaaaggcatatacaagtcaaatagtagcaatggtgatgatggcgttggctatcggatccgaccaataatatatctactcgagctagaaggaaaattatcatcagtggacttaacaacctttcaagtacgtcgaacttactagatccttgtgctatggctgcagtcaagcaaaaaggctgtttctgacgcatgcttcagcaagcagcagtcggtgatccagcagctcctctcgcgcaaggggacgccgccgatagtgatgtgctcgaggggggacgccaccgcgctgctgtatgccccagtggatcctgcagagtcattgaagttccggaggttgcatgttgtctccagccagtgattaacataatcccattacagttgctcgcgtacaatctgactgttctccagggattcgatgtggaccaaccacggaatctggagaagagcgtgaccacgcagtaggtagagaggtggaagtggatgatgagatgcgcgaacgatttgtacccctatgtcgtgttgtgtagggttctaggagagagcaagccggctatagctgttggttagtcattttcttttgtgtaatgtaattattactgttcttgaggtagctagtactatcattactctacgttaaacaagtcgttgtgaaatgcatggtacaaaaggtatcatttgagaaacaagtgtgtttttcataccgattgggcgatataaatctcgtaaacttgtaattctgatctctcaaatttgaggcgtctggcaaaggtacaaaatcaaaaccctcaaaaatctgacggcagaaattttccgacgaacattgtatcagagttttctctccttatttcctgtaagaacatgacggtcatttctttttacagggcattgagccccctgatattccagtacaacagtctaatactccaaattctaaaacaggagctgagatattcatgtatgacatctcgtcggcgtcttcttctgcctcctgtcctccggcctcatctggcctttgctgcggccatacgtattcatgtatgccatatgatcgacggcctccccctgtataaccctccagggctaatcttgctctgggctttcatgtggatttggtgatattgagtcagtttaaatccataataaattaaaatccacctcaatacatctcaatcctataaccgaacaaggcctcatcgttggttgaagctccagctattctctaaaaatcaaatatggtggtaaggatgaagatgaacagttggaacacttttctgaataggtaaaattttcagcccactcatgtgtgagccaccgtcagcattggatcggctgttctttttatatctgtagtagggcctcttatcatttcaaactgatgggtgatctcaaggacctcagggggtagctgagaacacactgacctgaatcttcgacggaagaaacttgaagatatcatagatatatattagttgaaggcaagtaccttataaggaggaaagaagagttgaaagctggttagatgtatatgattcccaataataaatttgacctgtgcatatcacaatactactaatcaccgaataccatgcataaatgtcgattagttgagatctgcagtttctttcctgattcagcctaggagtacttaacagtttattggaactagtctgattcagccctagagtagcaagggagcctaagccgcaagaaaatgtgtattgtagcaacctgtgcatgtgtcctggtgttagtttcttctgaacggacattgaacttacagtacaaattttcagaattttgcagcaggttcaagcacaagcacgcttcatcatcaacaaattaagtgcaaaccaaccttatttgctgaaaatggataatatggtttacgtatcacaaaccagcaggttgatttgaatttaatttattgtcgatgaagcgtgcttgtgcttaaaactgctgcaaagttctaaaaaattgcactgttaagttcaatgtccgctctgaagaaactaacaccagaacacatgcacaggttggaacaatccacatttttgcagcttaggctcccttgttgctccagtgctgaattagaccagttccaataagccgttaaagtactcctaggctgaatcaggaaataaactgcatacctcaactaatcgatatttatgtatggtacgcgagcaattgaaccaaaaaaacagcagaatttgttcagtgaacagtgaactgtaccaaaaaaaaatatgacaaaacaagcttagacaaacaaacctgtaatgggattatgttaatcactggctggagacaatctacaaactctagaacttgaatgactctgcaggatccactggggcatacagcagaggcgtccccctcgaacacatcactatcaggcgccccttgcgccagaggagctgctggatcaccgactgctgcttgctgcaagacacgaggtggggaaccaaccagcttcagccttcaggggtttcttggtattaagcacaaccaaaactgacgaggcccttttcgaaacatttatttggccaaaacaaaagcatttaagaaagtgggagaattcttcaaaacctagaaatacttgtgcaaattcaattcttgtactttcgaccaaaaacaaaagactttgaaaagtttttatcaaaaaataaaaaacaaatgctaagtgatgcaaataaggtccaaaattttattgttcagactatacacaatttgagttgaat

SEQ ID NO: 214221 - DNA, 3365 bp, Zea Mays
gcctctcgatccaccattctccgtccgccgtcacccacgcttgctggctccgccgacgcatctcgcaagctgccagcgcccccctcgcccctctccactgtggtccgcagccgcttggagcttgcagcttgcctgttcgtcgtctcggtcccagccggcagccggtcaaccctccaaccccctctctaggcggctaggcagcaagtctcccaggctggcaggctcccagccggcagcggcaggagcccgcacaatctgctcggcccctggcccctaccatgcttggccgcctgggcaccttggtgctaaacctgctgaggcagagagtagaaaggacatgacatcgctctactaactggccaccgttgcagctccagcaagtcgccattgctctagagatccacatgtggttctcggtgcattttcgtatcttttagaattgaactgtgaaaaacacaatggcatcgatcttatctggagcaaggagccttcactcactcgctctgctatcgcggatgttgggcgagacgactcagctcggtccttttaaccgcagcgtgcagcggaggtggagaaagcctgtagattcggcaagaacacgtcttgagggaagaacgagggatcataggctggacaaactaatggttcagctgaggaacttgaggctggccttggctttgcatgaggtgatatctcagcagaggaacggatacgcgtctctccagctcctctcaaggtggaggcatgaggtcgggctgaacattgaggtcggtgctttcctcaagaaatacccccacgtgtttcagacctacgtgcaccctgtcaagaggaaccactgctgcaaggtcacgcagaagatgtccgacttgatcgcagaggaagacgctgtggtcagggagaatgaggtcggcgtagttcagcggctgaagaaacttctcatgctctctgtggatggaactctgaacatgcacgcgttatggctcataagaagggagcttgggcttcctgatgattacaggtcctctatactgccgaaccatcgacatgatttaattctcaaatccccagatactctatcacttttctctagggatgaaacattggctgtagctaaggtcgacgagtggaggaaaagggagtacacagaaaaatggctagctgaatcagagacaaaatatgctttcccgatcaacttcccaactggatttaaggttcaaaaaggtttcagggagaaactcaagaactggcagaggcttccctacaccaaaccttatgagaagaatgattcgcatccgatatgcaacgtggagcggcttgagaaacgcattgttggtgttcttcatgagcttttgagcctgacggtcgaaaggatgatgccacttgagagactgtcacacttcagaagattgtacaccatggaggtaaacctgcgagaattttttctcaagtatccaggcattttctacatctcgacgaaaggaagcacacagacagtcatcctaagggatagttacagtaaaggatatctgattgagcctaaccctgtgtacattgtgcggaggaagatgctggacctggtattatctggatctcgtaacgttggtgaatgccaacaggatagtgcaacttggtcagctgaggagcatgatctgggaagcagccatgggtgccaggataacatatgctaggtggattctgcaattccatactggaacatggagttagaagtgacgcatggaaagaaccaattaactcaaccatgatcttgctgtaatatctacatataaaaatacctactgatatcgtctgcccggggtgaagcgatgcctagctgcggcattgccctgcctagcctcgcctcgtctccggcacgcgaacacccagctcggactctgtaaagaggaagtttaccacaatctctggtggactttctttgctcactgcccctgctcctccatcgctctcgtgcgccactgttctccatggatctcttcaatttgatgctaggtggcaacattgcacctagcaatgctatttttactatgctgatcaaggcatatgctaactgtggaatgctagatagggctatgattatcttcaatgagatgagagcaaggagtgaaacctgatgtggtaacctatttgacagtgattggtgccctttacagaattggtaagatggatggtgctgtggaaaaatttaatcatatgattgatcaaggagtaacacccaaaaaatctacttactgttgcctgattcaagttttttgtattcatggtggtttactgaaagccaaggaattggtttggaaaccatgaataaagcaagcagcagtcggtgatccagcagctcctctggcgcaaggggcgcctgatagtgatgtgttcgagggggacgcctctgctgtatgccccagtggatcctgcagagtcattcaagttctagagtttgtagattgtctccagccagtgattaacataatcccattacaggtttgtttgtctaagcttgttttgtcatatttttttttggtacagttcactgttcactgaacaaattctgctgtttttttggttcaattgctcgcgtaccatacataaatatcgattagttgaggtatgcagtttatttcctgattcagcctaggagtactttaacggcttattggaactggtctaattcagcactggagcaacaagggagcctaagctgcaaaaatgtggattgttccaacctgtgcatgtgttctggtgttagtttcttcagagcggacattgaacttaacagtgcaattttttagaactttgcagcagttttaagcacaagcacgcttcatcgacaataaattaaattcaaatcaacctgctggtttgtgatacgtaaaccatattatccattttcagcaaataaggttggtttgcacttaatttgttgatgatgaagcgtgcttgtgcttgaacctgctgcaaaattctgaaaatttgtactgtaagttcaatgtccgttcagaagaaactaacaccaggacacatgcacaggttgctacaatacacattttcttgcggcttaggctcccttgctactctagggctgaatcagactagttccaataaactgttaagtactcctaggctgaatcaggaaagaaactgcagatctcaactaatcgacatttatgcatggtattcggtgattagtagtattgtgatatgcacaggtcaaatttattattgggaatcatatacatctaaccagctttcaactcttctttcctccttataagatctatgatatcttcaagtttcttccgtcgaagattcaggtcagtgtgttctcagctaccccctgaggtccttgagatcac

SEQ ID NO: 214222 - DNA, 3619 bp, Zea Mays
cacctcgcctctcgatccaccattctccgtccgccgtcacccacgcttgctggctccgccgacgcatctcgcaagctgccagcgcccccctcgcccctctccactgtggtccgcagccgcttggagcttgcagcttgcctgttcgtcgtctcggtcccagccggcagccggtcaaccctccaaccccctctctaggcggctaggcagcaagtctcccaggctggcaggctcccagccggcagcggcaggagcccgcacaatctgctcggcccctggcccctaccatgcttggccgcctgggcaccttggtgctaaacctgctgaggcagagagtagaaaggacatgacatcgctctactaactggccaccgttgcagctccagcaagtcgccattgctctagagatccacatgtggttctcggtgcattttcgtatcttttagaattgaactgtgaaaaacacaatggcatcgatcttatctggagcaaggagccttcactcactcgctctgctatcgcggatgttgggcgagacgactcagctcggtccttttaaccgcagcgtgcagcggaggtggagaaagcctgtagattcggcaagaacacgtcttgagggaagaacgagggatcataggctggacaaactaatggttcagctgaggaacttgaggctggccttggctttgcatgaggtgatatctcagcagaggaacggatacgcgtctctccagctcctctcaaggtggaggcatgaggtcgggctgaacattgaggtcggtgctttcctcaagaaatacccccacgtgtttcagacctacgtgcaccctgtcaagaggaaccactgctgcaaggtcacgcagaagatgtccgacttgatcgcagaggaagacgctgtggtcagggagaatgaggtcggcgtagttcagcggctgaagaaacttctcatgctctctgtggatggaactctgaacatgcacgcgttatggctcataagaagggagcttgggcttcctgatgattacaggtcctctatactgccgaaccatcgacatgatttaattctcaaatccccagatactctatcacttttctctagggatgaaacattggctgtagctaaggtcgacgagtggaggaaaagggagtacacagaaaaatggctagctgaatcagagacaaaatatgctttcccgatcaacttcccaactggatttaaggttcaaaaaggtttcagggagaaactcaagaactggcagaggcttccctacaccaaaccttatgagaagaatgattcgcatccgatatgcaacgtggagcggcttgagaaacgcattgttggtgttcttcatgagcttttgagcctgacggtcgaaaggatgatgccacttgagagactgtcacacttcagaagattgtacaccatggaggtaaacctgcgagaattttttctcaagtatccaggcattttctacatctcgacgaaaggaagcacacagacagtcatcctaagggatagttacagtaaaggatatctgattgagcctaaccctgtgtacattgtgcggaggaagatgctggacctggtattatctggatctcgtaacgttggtgaatgccaacaggatagtgcaacttggtcagctgaggagcatgatctgggaagcagccatgggtgccaggataacatatgctaggtggattctgcaattccatactggaacatggagttagaagtgacgcatggaaagaaccaattaactcaaccatgatcttgctgtaatatctacatataaaaatacctactgatatcgtctgcccggggtgaagcgatgcctagctgcggcattgccctgcctagcctcgcctcgtctccggcacgcgaacacccagctcggactctgtaaagaggaagtttaccacaatctctggtggactttctttgctcactgcccctgctcctccatcgctctcgtgcgccactgttctccatggatctcttcaatttgatgctaggtggcaacattgcacctagcaatgctatttttactatgctgatcaaggcatatgctaactgtggaatgctagatagggctatgattatcttcaatgagatgagagcaaggagtgaaacctgatgtggtaacctatttgacagtgattggtgccctttacagaattggtaagatggatggtgctgtggaaaaatttaatcatatgattgatcaaggagtaacacccaaaaaatctacttactgttgcctgattcaagttttttgtattcatggtggtttactgaaagccaaggaattggtttggaaaccatgaataaaggtatgtgtcctgacattgttttcttcagttcgataataaacaacctttgcaaactaggaagggtaatggacgcacaaaatatatttgacttaactgtaaatgttggtctgcatcctactgttgcgatgcatagtatgctgatggtgggtactgtcttgttggcaagatggagaaggcatcaagggtatttgatgctatggtgtctgctggcgttgaaccaaacaatgtagtgtatggtgtacttgttaatggctatcgtaaaattggaaggatcgatgatgagtcttttcaaagaaatgttgcataaaggaataaagccttcaactatttcgtacaacatcatacttgatgggttatttcaggcagggagaacagttcctgcgaaggtgaaattccacgaaatgactgaaagtggtatcacaatggacaaatggacatacaacataggtcttagtgaacattttaaaaacagatgctctgttgaagcaatcttgctttttgaagaattacgtgcaatgaatgtaaagatcaatatcaaaactctcaataccatgatagctggaatgtttcaaaccaggagagttgaagaagctaaggatctgtttgcttctatctcgagaagtgggctggtgccttctgttgtgacttacagtataatgatgacaaatcttataaaaggattggtggaggaggcagatgatatgttttcatccatggagaatgctggccgtgagcctgattctcgattgtgtggttagggaattactagagaaaaatgaaatggtcagggctacaacgtacctgtccaaaattgatgagaggaatttctcacttgagcattcaaccacaacattgttgatcgatctcttctcaagcaaaggggcttgtagggaacacataagatttctccctacaaagtatcgttttcttgcagggggctcgttaatgttcgattgcaagcagcagtcggtgatccagcagctcctctggcgcaaggggcgcctgatagtgatgtgttcgagggggacgcctctgctgtatgccccagtggatcctgcagagtcattcaagttctagagtttgtagattgtctccagccagtgattaacataatcccattacagtattgtgatatgcacaggtcaaatttattattgggaatcatatacatctaaccagctttcaactcttctttcctccttataagatctatgatatcttcaagtttcttccgtcgaagattcaggtcagtgtgttctcagctaccccctgaggtccttgagatcac

SEQ ID NO: 214223 - DNA, 771 bp, Zea Mays
ctctaaagttaacatccacatacttttactgatttatatgtgtgcctatgctgcaacagttttttttgtcaaaaaataatgggtttttacgctggtttatatgtgtgcctatgctgcaacacatccaattctaactaaatatacataaagaatttgctgagtagcagcagcacgcgagcacctcatattttattctcattgtttctacttcgttaattcattgacccatgtctctgtcttggtatattctggagacagatccccacgtccagagttacaagaagatcaagcttggctgtggctgctgctgtgttgcctcctcttgttggaccgaagagagggaggggagaagcagctggtgtgcagacttctactcaggtggtcttttattctctatggggcttctaggatacatcttctccaaaagcaccataagtcttgtcttgggcattacaccagggctagccactctgctacttggcactcagtctgaagttctggaggagcggcagatccagcttcctgcttatcttggctcaggcaggtagaatgaattttaagcaactagttatatgggacctggaagtctttttatgtcttctagtgtacttcactatgcacttatttctatctcaagaattgctgctatgattagtcagcggttagtgacacttgttttttccccactattgcttttttagaggtgatgctgatgtgcaagcatcttcaccttgagttctgccttgccagaatgaatcaagtttattttcc

SEQ ID NO: 214224 - DNA, 4367 bp, Zea Mays
tcgggactcgccatctcccagccgcacgctcttctcgcccacgcacacacgattccttctcgcgctctcgagattcttcccacacgcacacggaagattcccgcctcctcccctctgtcgccgctgctgccaacgctagcaccgatgccacctcttggttcccaggttgtgtcttgcctctttccatccaccgtcatcgccgctacctatggcttccccgtcgggtcgtctcttgcctcattctgttccccgccgctgctctcgccacccactatcggaggcattgtgtccagaaacatggttaagagggtatgctgtctgagcgccagggagatccgaacggtgatgccctctactcgcttcccattgtcctagagtcaggcaaatggaggaacatgagtcagtggggctgccatagttggagaatgcggcgtaagcaggccgacgacggcgagttcctcaacatgtactccggtgaaattttggtggtggttccgtgacctgacatctttccaatatcgaagatgagaaataccgaggctgttatagatctcttctttttttaggagttttctattttacaaaatagctaaactatggaatttggctaataactttagattagctctcggagttgctcttcatgcgccacatccgtagtcgcacgcacctaccatgtgcacccaacgagcatgtactattattattttcctaatctttcttggccccttacacagctgcttcgtcatttccagccatatgcgtgatgacagctcctccgtcattaccatttgttttatggtagcgagatgcgcgtgaagacatttggattcgtccaccaccacatcactagtctcactctcacctgtaatatatctgcacccaacgagcaggtaccaagcaattagcaagagaaacacaaggtcgaggtggtgaggtatggagctcgccttgggggccatgaccagcttggcccttaagctaggcgacctgctcatggaggagtatgtcgtgcagaagggcctcaagcccgacatcgagtctctctccagggagcttgtgatgatgaacgccgctctcatcgacgcgtcccgggttccacctgaccagctcaccgaggtggaaaagctttgggcacgcaaggtccgggacctgtcgtatgacatggaggacgccgtcgacgatttcatcctgcgtgtggctggtggtgacgactctgccgccgactcaaaattcttcaagaagacccttgccatggtcaaggacgtgatgtcgatgaagaagttcaaggatcggcgccagatctccgacaaggtcaaagacatcaagaaactctccaacgagttagctgaacttcgtgccaagtacacggtaaggggtgtgggcgctgatctcgccgcgagcaccggcatcgaccctcgtgtcatcaatctgtacaagaaagagacagatctcgttggcatcaagaagtcaaggaacaaagtcattaggatgctgtctatggagaccaaagatgatgatgcacttgagtcccatcaggctctaaagatagtgtctatagtcggggttggaggactagatgggatctagaacaatttaaaaacgaactggatgaattcttgaaggacaagaggtacttgatcgttgttgatgacatatgggatgttgactcatgggaagcaatcagatatgccttgaaggacaataattgtggaagtagaataatcatgactactcgtaattttgggattgtcacgaaattagaagaggtttatagattaaaacctctttctaatgcaaactccaagaaattgttctacaaaagaatagagagtcaggaaggagaaagccttgatggtgaactctctagtaaaatcatacataaatgtggcggcataccattggctatcattgcaatagctagtttgttggttgaaagatcacgtgaggagtggtcagaagtgtacgacaagattggtcttgggaatgaagacaatacaacaaagataatgtcatacagctactatgatctgcctccttatctcaagccatgtctgctgcaactaagcatatatccagaagactgtatcattgatacaaactctaccatatggaagtggataggtgaaggtctagttcatcttgagaaagaagagggtagcctatttaaggttggagaaagatacttcaaggagcttgtgaatagaagcatgatccagccgacagaggacaaaaatgatcggtttgtagaagggttccgtattcacgacattgtgtttgatctcatctgtaagttgtccaaggatgaagacttcattaccattagcgggcaacattcatctcgggatagtttaagaagagagaagaaaacatgtgtgcctcgctcagactgcaagctacgtcggctggccgtccgaaatcaacgtgtgcagcgcttccctgaagaaaccatcgacatgccagaggtgttgagatcacttagcattatagattgtaatattgaggttatggccccaattgatagcttcagggtttgccgtgtgctgcatctggggaagagctacgtacccatcagcctaaagcatctggggaagctgttgcatctcaagttcctagagatagtatacacgcctattgatgagctccctaaggaaattgggcatctgaggtctcttcagacactgatattagaccgtactggactagacgagctgccaccggttgtttgctcgcttacacggttgatgtgcctgatagcccaggggttcgaaaggttgccagctgacaggatggggaacctaacgtccctggaggagctacgactacgtagggtagttggccggagtgccacccaagccctagtggcagagcttggcaagctgacgaggttgagggtggtcgacatcaccttttcagagcagctagaggagagcttgcaagaagcattggtgcaatctctgtccaatctgcggggactccaggaactaacgcttttgtttaaaatgacacggtggggaagcgatatgtggggagactgggagccaccaaggcagctccggcgcctgattattgaaggcatcatcgtcttctcacgacagcctcgatggatcaaccgctcctgtctgccacgcctctgctacttatctctgatggtgcacactcttgaagcacaggacctagataatctagcgaggttgccagagctccagtacctcacgctagatggtctcagctggcctccaaggtatactgttggcccagacgacttcaggaatctgaggttctgcaaagtgggcacaacgttcgagtttcgtaagggcgccatgccaaggctcgaagtgctgcaatttagagtttttgcagggtactattgttgggcatacaatggtgtgccgttcgagcagttcccaacgaaggatcttgacttggacctggataacgtccttttacttcagcaagtaatagtcaaagtcaactgcgtaggtgctactgtcacacaagtggaggaggtggaggccgtggtcatgcgtgccgtggaaaatcatgccaaccgtccaaccataaaaatgaatcgagcatatgaaatagctatcctatccgacgaagggcgggaggctctgcttcggcgacacattgaaaaggattgctgcgtgcgcacgatgaaggataaatctgatgctttcttcatcagccagctgcggaggtatcgacatcttcagaaagccattattttcatcgactgttcgggtgccagcatgtgtgaggtgcagaaagtggaagcagcttttagacatgcagccgaggttcatcctaaccatccaagtattgaacttatcagaacaaacaccgacggaatggcctcctcctcatctgaccatcccaacacagagcccaggaattgatggctcggtttgtcagatccttccaacccaggagcaggtaaatgtgagttgcttaagtaccaaagagagaggtcctgttcagcaagatgattagaagcattggcaattggcatggcttgttaattagattcgtggttcttagtctaaaatcacattgaagagggagacggacccaagtgatgcagttcatgtgttatctgtatcagtctctgtttttataagctgtcatatattttctcgaaactatcttgtgttgattttgtgtgaagtgtacttttaatggcacgggccattgtgtatttgcttgaaagataaggatggtattatctttgtatttgaactctaaatgcttaaatgaagtgatcattctggatggagatatgtatggtgtgaacccaattctcgacgccaacgtgtgtgggattttggtgcaagctcctgtagctcgtctctgttatatctatg

SEQ ID NO: 214225 - DNA, 4262 bp, Zea Mays
aaaaatctttggctagccttcgggactcgccatctcccagccgcacgctcttctcgcccacgcacacacgattccttctcgcgctctcgagattcttcccacacgcacacggaagattcccgcctcctcccctctgtcgccgctgctgccaacgctagcaccgatgccacctcttggttcccaggttgtgtcttgcctctttccatccaccgtcatcgccgctacctatggcttccccgtcgggtcgtctcttgcctcattctgttccccgccgctgctctcgccacccactatcggaggcattgtgtccagaaacatggttaagagggtatgctgtctgagcgccagggagatccgaacggtgatgccctctactcgcttcccattgtcctagagtcaggcaaatggaggaacatgagtcagtggggctgccatagttggagaatgcggcgtaagcaggccgacgacggcgagttcctcaacatgtactccgccatatgcgtgatgacagctcctccgtcattaccatttgttttatggtagcgagatgcgcgtgaagacatttggattcgtccaccaccacatcactagtctcactctcacctgtaatatatctgcacccaacgagcaggtaccaagcaattagcaagagaaacacaaggtcgaggtggtgaggtatggagctcgccttgggggccatgaccagcttggcccttaagctaggcgacctgctcatggaggagtatgtcgtgcagaagggcctcaagcccgacatcgagtctctctccagggagcttgtgatgatgaacgccgctctcatcgacgcgtcccgggttccacctgaccagctcaccgaggtggaaaagctttgggcacgcaaggtccgggacctgtcgtatgacatggaggacgccgtcgacgatttcatcctgcgtgtggctggtggtgacgactctgccgccgactcaaaattcttcaagaagacccttgccatggtcaaggacgtgatgtcgatgaagaagttcaaggatcggcgccagatctccgacaaggtcaaagacatcaagaaactctccaacgagttagctgaacttcgtgccaagtacacggtaaggggtgtgggcgctgatctcgccgcgagcaccggcatcgaccctcgtgtcatcaatctgtacaagaaagagacagatctcgttggcatcaagaagtcaaggaacaaagtcattaggatgctgtctatggagaccaaagatgatgatgcacttgagtcccatcaggctctaaagatagtgtctatagtcggggttggaggactaggtaagactactctagccaaaacagtgcatgacatgcttaagaagcaattcgactgttctgcttttatttctattggtagaactcctaatctgaataggacattcgagaagatgctattgaaacttgatcgtgagtataaacaagttgacatggccagatgggatctagaacaatttaaaaacgaactggatgaattcttgaaggacaagaggtacttgatcgttgttgatgacatatgggatgttgactcatgggaagcaatcagatatgccttgaaggacaataattgtggaagtagaataatcatgactactcgtaattttgggattgtcacgaaattagaagaggtttatagattaaaacctctttctaatgcaaactccaagaaattgttctacaaaagaatagagagtcaggaaggagaaagccttgatggtgaactctctagtaaaatcatacataaatgtggcggcataccattggctatcattgcaatagctagtttgttggttgaaagatcacgtgaggagtggtcagaagtgtacgacaagattggtcttgggaatgaagacaatacaacaaagataatgtcatacagctactatgatctgcctccttatctcaagccatgtctgctgcaactaagcatatatccagaagactgtatcattgatacaaactctaccatatggaagtggataggtgaaggtctagttcatcttgagaaagaagagggtagcctatttaaggttggagaaagatacttcaaggagcttgtgaatagaagcatgatccagccgacagaggacaaaaatgatcggtttgtagaagggttccgtattcacgacattgtgtttgatctcatctgtaagttgtccaaggatgaagacttcattaccattagcgggcaacattcatctcgggatagtttaagaagagagaagaaaacatgtgtgcctcgctcagactgcaagctacgtcggctggccgtccgaaatcaacgtgtgcagcgcttccctgaagaaaccatcgacatgccagaggtgttgagatcacttagcattatagattgtaatattgaggttatggccccaattgatagcttcagggtttgccgtgtgctgcatctggggaagagctacgtacccatcagcctaaagcatctggggaagctgttgcatctcaagttcctagagatagtatacacgcctattgatgagctccctaaggaaattgggcatctgaggtctcttcagacactgatattagaccgtactggactagacgagctgccaccggttgtttgctcgcttacacggttgatgtgcctgatagcccaggggttcgaaaggttgccagctgacaggatggggaacctaacgtccctggaggagctacgactacgtagggtagttggccggagtgccacccaagccctagtggcagagcttggcaagctgacgaggttgagggtggtcgacatcaccttttcagagcagctagaggagagcttgcaagaagcattggtgcaatctctgtccaatctgcggggactccaggaactaacgcttttgtttaaaatgacacggtggggaagcgatatgtggggagactgggagccaccaaggcagctccggcgcctgattattgaaggcatcatcgtcttctcacgacagcctcgatggatcaaccgctcctgtctgccacgcctctgctacttatctctgatggtgcacactcttgaagcacaggacctagataatctagcgaggttgccagagctccagtacctcacgctagatggtctcagctggcctccaaggtatactgttggcccagacgacttcaggaatctgaggttctgcaaagtgggcacaacgttcgagtttcgtaagggcgccatgccaaggctcgaagtgctgcaatttagagtttttgcagggtactattgttgggcatacaatggtgtgccgttcgagcagttcccaacgaaggatcttgacttggacctggataacgtccttttacttcagcaagtaatagtcaaagtcaactgcgtaggtgctactgtcacacaagtggaggaggtggaggccgtggtcatgcgtgccgtggaaaatcatgccaaccgtccaaccataaaaatgaatcgagcatatgaaatagctatcctatccgacgaagggcgggaggctctgcttcggcgacacattgaaaaggattgctgcgtgcgcacgatgaaggataaatctgatgctttcttcatcagccagctgcggaggtatcgacatcttcagaaagccattattttcatcgactgttcgggtgccagcatgtgtgaggtgcagaaagtggaagcagcttttagacatgcagccgaggttcatcctaaccatccaagtattgaacttatcagaacaaacaccgacggaatggcctcctcctcatctgaccatcccaacacagagcccaggaattgatggctcggtttgtcagatccttccaacccaggagcaggtaaatgtgagttgcttaagtaccaaagagagaggtcctgttcagcaagatgattagaagcattggcaattggcatggcttgttaattagattcgtggttcttagtctaaaatcacattgaagagggagacggacccaagtgatgcagttcatgtgttatctgtatcagtctctgtttttataagctgtcatatattttctcgaaactatcttgtgttgattttgtgtgaagtgtacttttaatggcacgggccattgtgtatttgcttgaaagataaggatggtattatctttgtatttgaactctaaatgcttaaatgaagtgatcattctggatggagatatgtatggtgtgaacccaattctcgacgccaacgtgtgtgggattttggtgcaagctcctgtagctcgtctctgttatatctatg

SEQ ID NO: 214226 - DNA, 2787 bp, Zea Mays
ctcttgactatcagaaccaatagtagcaagatgatgtgctaccttgttacatattctaggagcaaacaacaccttaacatcattgaaacatgatctatctcataaacatgtacaggaggggcaacggtggtacacttcaccctctcatggcgcccctgggggcgattggcgccgccgccgccagccctggtcgcccgcatccggttcggggggtgctccgtcctttctccgcgggcggggctagcgctcctctccgtggtggcctcgggtcgtccctccacgcggcggactcggtgtccggtcctctgcccaaacctcttctagagccggtaagtgctgagcgctcgttctctggcgggcaaactctgcgcagtgatgtgccccccacgagcgttcaagaccttctcctcctcggttctcctcaaccagatccacagcgggccgttgcgggcggcattgatcacaggaggatttcactttcaagttccagatctgaaaagtgctctacgccggtgctgcctgaagatccgcatagtctgctttcggcgctgcgaatccaggcggctgaatcatccgactgtgatgcagtctgctcgccgtgtttccagtttacctgcgtggaggatgaggcattgaagtcgggcagcgttcggtcccgtcgtcgtgctactgatgactctgctgcgccgcgcgtgagtggaatgcctctccattccgctaccggggtcaacgatgggggatgggaggttgttcggccgcggttttggtggcgcaaggcattgaagaatcctgtgagatctccacgaaatcttcaactggatgtgaagggcaccaatcttttcaaattgaagctcaagggtaaatgctacaactgcctctcaccggctcatctcgctttctgctgctcggctcccacgcgctgttggcagtgcttacaatccgggcacaaggcgcgatattgcaaccaaaaagtcagccagagaacattcaatgctgctcaatgcttccctgaaccagccgtgctcgcatctaagagttccacctaccaggaggtgctgctaaagccagacaaactgcataagtatcaggatctgcctcatgtgaactcacttggtcatccgcccccatcgaccaaaaagtcctacctccaggctgttctggaagaccacggtatggaggcacgctaccctggtgaccctcgtgtgaggccagcgcgcgccttctgtgcggtctcggcgaccggctctattcgtcgccggagagatgagttgattgacacggccgtcgtctgctccttcgacggcaacagccacgaggttgacattctttccgcaggtgatatgctgagggagaagttcagcttacaacacggtcagtatcaactggtcaagcatttccctgagcaattctttatcatcttctcggaccctaggtcgaagcagtgggcgctggataggagatctgtctcatatcgtggtcgaattttccattttggggattggtctgaggacagctacgctagaaaaacaaaccttgaatttagagttaaagtccgggtcgaagggatctcggtgcactgttggggggaagatgtggcttcaaaggccttgggcaagagttgtgcaatccactatgtgcaagagcgcacaaggcgtagggagcgtaccaggtcttttgacctatgggcttggtgctctgacccgtgtgacattcctaaagaggtcttgcttacggttttagaaccagacagggaacttccacctatcagcacgcccttagctcttgttggtgctcagcaagatgcccctgctgatctgaaagctggacatgtttacactcttcgcaaccacattgaggtggtggaggatctctctttcctccgtgggaggggttccagggggggtccgcctaatcgcaagcagcgcatggagtttatttggagctatggcgccccagattcagtgggtgaaaaaagagaacgggtggaagctgttagaggaagagagattgcgcgacgggactggggtcatgatgatgatgatgatggggattttcagcgtagcaggcgctgcggcaaccgccgtcatcgcagcttgtctggttgggcgcgctcgtcgcgatgtcgagggggcatggacgactgttacagttccaatgacaagcagcggcacttaactccctttcgtcgccatggctgggagtcgaagctgtcttctcgctgggtacccaaggtgaaggtctggttcgatgggcgctgttattctggaacctgtgcgcagccctgctacaaccacatgcaaggtggatttggttgagcagctggcgaggcatttctctaggcctttgaccaaggaacaaatggaggcaattatggagctggcaactctggggaaggaaaaggaagggatcaagaagaagggcagcaaggtgacgcccctcaaggctcctattatcgaggcttctgagatgctataagttgtaatttgagttgtgggggtagttctagtgcatcatgttgtgtcgctggtgtacttgcctgtgggtcgcccaggttcttttgctggctgtttcgtgtgccaggttgttgcctgggcagcggtgtttgtttctttggttggtattttcggtgtctctatctgtcttagtatctgttgtaagacgctggtcttttgcttctggaagcaagttacggatggtggaatcctggttggctcctgttcttctctcctatcctgtgttccccatgtgtgacaactttttaattagtggagctgttttggattaatg

SEQ ID NO: 214227 - DNA, 2781 bp, Zea Mays
ctcttgactatcagaaccaatagtagcaagatgatgtgctaccttgttacatattctaggagcaaacaacaccttaacatcattgaaacatgatctatctcataaacatgtacaggaggggcaacggtggtacacttcaccctctcatggcgcccctgggggcgattggcgccgccgccgccagccctggtcgcccgcatccggttcggggggtgctccgtcctttctccgcgggcggggctagcgctcctctccgtggtggcctcgggtcgtccctccacgcggcggactcggtgtccggtcctctgcccaaacctcttctagagccggtaagtgctgagcgctcgttctctggcgggcaaactctgcgcagtgatgtgccccccacgagcgttcaagaccttctcctcctcggttctcctcaaccagatccacagcgggccgttgcgggcggcattgatcacaggaggatttcactttcaagttccagatctgaaaagtgctctacgccggtgctgcctgaagatccgcatagtctgctttcggcgctgcgaatccaggcggctgaatcatccgactgtgatgcagtctgctcgccgtgtttccagtttacctgcgtggaggatgaggcattgaagtcgggcagcgttcggtcccgtcgtcgtgctactgatgactctgctgcgccgcgcgtgagtggaatgcctctccattccgctaccggggtcaacgatgggggatgggaggttgttcggccgcggttttggtggcgcaaggcattgaagaatcctgtgagatctccacgaaatcttcaactggatgtgaagggcaccaatcttttcaaattgaagctcaagggtaaatgctacaactgcctctcaccggctcatctcgctttctgctgctcggctcccacgcgctgttggcagtgcttacaatccgggcacaaggcgcgatattgcaaccaaaaagtcagccagagaacattcaatgctgctcaatgcttccctgaaccagccgtgctcgcatctaagagttccacctaccaggaggtgctgctaaagccagacaaactgcataagtatcaggatctgcctcatgtgaactcacttggtcatccgcccccatcgaccaaaaagtcctacctccaggctgttctggaagaccacggtatggaggcacgctaccctggtgaccctcgtgtgaggccagcgcgcgccttctgtgcggtctcggcgaccggctctattcgtcgccggagagatgagttgattgacacggccgtcgtctgctccttcgacggcaacagccacgaggttgacattctttccgcaggtgatatgctgagggagaagttcagcttacaacacggtcagtatcaactggtcaagcatttccctgagcaattctttatcatcttctcggaccctaggtcgaagcagtgggcgctggataggagatctgtctcatatcgtggtcgaattttccattttggggattggtctgaggacagctacgctagaaaaacaaaccttgaatttagagttaaagtccgggtcgaagggatctcggtgcactgttggggggaagatgtggcttcaaaggccttgggcaagagttgtgcaatccactatgtgcaagagcgcacaaggcgtagggagcgtaccaggtcttttgacctatgggcttggtgctctgacccgtgtgacattcctaaagaggtcttgcttacggttttagaaccagacagggaacttccacctatcagcacgcccttagctcttgttggtgctcagcaagatgcccctgctgatctgaaagctggacatgtttacactcttcgcaaccacattgaggtggtggaggatctctctttcctccgtgggaggggttccagggggggtccgcctaatcgcaagcagcgcatggagtttatttggagctatggcgccccagattcagtgggtgaaaaaagagaacgggtggaagctgttagaggaagagagattgcgcgacgggactggggtcatgatgatgatgatgatggggattttcagcgtagcaggcgctgcggcaaccgccgtcatcgcagcttgtctggttgggcgcgctcgtcgcgatgtcgagggggcatggacgactgttacagttccaatgacaagcagcggcacttaactccctttcgtcgccatggctgggagtcgaagctgtcttctcgctgggtacccaaggtctggttcgatgggcgctgttattctggaacctgtgcgcagccctgctacaaccacatgcaaggtggatttggttgagcagctggcgaggcatttctctaggcctttgaccaaggaacaaatggaggcaattatggagctggcaactctggggaaggaaaaggaagggatcaagaagaagggcagcaaggtgacgcccctcaaggctcctattatcgaggcttctgagatgctataagttgtaatttgagttgtgggggtagttctagtgcatcatgttgtgtcgctggtgtacttgcctgtgggtcgcccaggttcttttgctggctgtttcgtgtgccaggttgttgcctgggcagcggtgtttgtttctttggttggtattttcggtgtctctatctgtcttagtatctgttgtaagacgctggtcttttgcttctggaagcaagttacggatggtggaatcctggttggctcctgttcttctctcctatcctgtgttccccatgtgtgacaactttttaattagtggagctgttttggattaatg

SEQ ID NO: 214228 - DNA, 498 bp, Zea Mays
cagttatcacgttccaatgccatgtgtaaatgtgagttgcttaagtaccaaagagagaggtcctgttcagcaagatgattagaagcattggcatggcttgttaattagattcgcggttcttagtctaaaatcacattgaagagggagacggacccaagtgatgcagttcatgtgttatctgtatcaatccctatttttataagctgtcatatattttctcgaaactatcttctgttgattttgtgtgaagtgtacttttaatggcacgggccacgtatttccttggaaacgaccatgtggagttattttttcccccattttctttcctgagatgggctgtgtatttgcttgaaagataaggatgatattatctttgtatttgaactctagatgcttaaatgaagtgatcatcctggatggagataagtatggtgtgaacccaattctcgacgccaacgtgtatgggattttggtgcaagctcctgtagctcgtctttg

SEQ ID NO: 214229 - DNA, 504 bp, Zea Mays
agtggagaaatttgccgttccaactttgtcgcggttctctctcactggcggcggcggcgaggcctctgcgtcttccagatccctcgtacgggagggaatctccgcagccgagcggagcggcggaggggagggaggtgtgccctatatccgtacggtgtacgtgcatgtgctggcgcagcaaagcgacagctctctcgaagatgacgatgtttatgctcccttttggacgttgatattggagggcaagaaatacaattgagttgtataccaaatcagtcatgtattaaaatgagatgtagttttaattctattgtttgtatattgttgggttgtactttagaatcgtgcgttctaattccacgcaatataagagagctttgtatgtattagatgtaatactcaaaagtgtaataaaagaggatagagataatctcaaaagtttgtggtctctactattcatcacatgtgatcaacactagtgaaaagtggataattagaacaaag

SEQ ID NO: 214230 - DNA, 3053 bp, Zea Mays
cccccttgaagcctctcgatttgaaatcccacacctcaaaactgaaaaaaagggaaaaaaggtgctctcgatctagggaatagggatccccttcccggcttctagttcccctcctcgtccaaaaccctaggccagcctagcggcggagcccgcgcgcccgcctccaggaccatggccgaagaccacttctcctccgcgccgtccgccccgtcggcagcggcgacagcggcggcggcggccgccgcggcggtcgggtcctcggtgatcccgatcgtcaacaagctgcaggatatcttcgcgcagctggggagcagctccacgatcgacctgccgcaggttgccgtggtcgggagccagagcagcggcaagtccagcgtgctcgaggcgctcgtcggccgcgactttctcccgcggggctcggacatttgcacgcgccgccccctcgtgctgcagctcgtgcaccagccgcgccgacccgccgacgccgaggccgatgagtggggcgagttcctccacctatcggggcgtcgcttctacgatttccgcgaaattcgacgcgagatccaggcagaaacagaccgagaggcaggtggtaacaaaggtgtatcggataggcagatacgattgaagattttttctccaaatgttcttaacattactttggttgatttgcctggaattactaaggtgccagttggtgaccagccaactgatattgaagctagaatacggactatgataatgtcatacatcaagcacaagacatgtatcatcttagctgtatcgccagcaaatgcagatttagcaaactctgacgctcttcaaatggctcgggttgctgatcctgatggttctcgaacaattggtgttatcacaaagttggatataatggacaggggcactgatgcccggaactttctgctgggaaatgtgatccccttaaaacttggctatgttggtgttgttaaccgcagccagcaggatatcaactctgacctcagtatcaaggatgctctggctcgtgaagaaaaattcttccgtactcagccggcatatcatggtcttgcacagtactgtgggataccacaattagcaaagaagctaaatcagattctggtccaacatataaaaacagttctgccagggcttaagtcacgcataagcagtcaattgactgctgttgccaaggagcttgctgtgtatggtgaccctgttgattcaaaggctggtcaaggtgctaagcttttgaacatactagctaaatactgtgaagctttttcgtcaatggtggaaggaaaaaatgaagatatatcgacaactgaactttctggtggagcgaggatccattacattttccagtctatctttgtcaaaagtttagaggaggttgatccttgcgaggatgttacagacgtagatatccgcatggctattcaaaatgcaactggtcctagaagtgctctgtttgtacctgaagttccatttgaagtccttgtacgtaggcagatcagcagattgcttgatccaagtcttcagtgtgcacagttcatatatgatgaacttgtaaagatgagccatcgctgccttgcaacggagttgcagcagtttcctatactccgcagaagcatggatgaagtcattgggaagtttttgcgggatggacttaagccagcagaaagtatgatatcacacattattgagatggaggaagattacataaacacatcgcacccaagttttattggtggcagcaaggctgttgaggaagcacagcagcaagttaggtctgccaaaacgtctgcagtggtagtaagaaaggatggagtggattcacaggtttctgagaaaactcaaaaatcacgcccgatattgggtagaagtggtgtaaatggagtagttactgaccacatccagggggtacggcctgctgctgaggcagagagaccaggatcttctggtagtggaagcacatctttctggaatcaaatatttacttccaatgaggatcgaacacatgctcctgcaagagataacacagcaaacaaatcttatgctatgcctgcccctaatctggatcattcattctccactatacagttaagagagccaccagtcgtcctgaagccttcagaacaccagtctgagcaggaggcacttgaaatagcaattacaaagttgctattgaagtcatattacaatattgtcaggaaaaatgtggaggacttcataccaaaagcaattatgcatttcctggttaatcacacaaaaagggcactgcataattacctcataacaaaactttatagagatgatcttttggaagacttgctcaaagaacctgatgagctaaccataaagaggaagcagatacgtgaaaatcttaaggtccttcaacaagcttacaaaactttggatgagataccacttgacgcagaggcagtagagaggggtggtggatactccctcgattctgatgcgattggtctaccaagggctcatgggctttcttcatccctccacggattcaatgatggaagctcatcatattcaaccccgaagcagtcaaggtcaaggaggccaaaccattctggcgagcaacttcctttcaaccccgcaacgagtggcaatggtttttgatgccaccctacacgatggccacccagattggttatggaaccaaccattgcagcaagcacaccttactctgctccaagtttgttggcacccgtagatatatgttatttctagttaaattctttgcagcgttgcgctgatgaagcctggcatggtgcgagttttgtcatttcgccttttgtacagtatatatctttgcccagtcatttcgtcttgaaatggtatcaagtgataggtatactttttcttcggacccagggaaagcaatggaaaaagttatactaggtgcagcacccagcgtctgagtgacttgccacggatttgccttgcaaaatagacatggcaaaaacttggtctagctgagaaagtttctgtaattaccctgtgtcatattggtcacttgattggttcggacgatg

SEQ ID NO: 214231 - DNA, 1531 bp, Zea Mays
gaaggtgcactgggctggagctggtgttgcagataatttttgggcataaatggagacatcttaagggggagagggacatgtgggagcgttatgggggagttgatatttctctggatccttgtagctttggccaggctaatactctgtcatttaactctttgttgcataagctgaacaagtatgtaccacgtagttcaacagttgttgatttgtactctggggctggtgttattggcctatcagttgctgcttcaaggaaatgtaggtctgtgaaatgtatcgagattaacaaacagtcaaagatgtcttttgagacatcagcaagccgacttccagcgaacctgggttgcaccattacttggcacaataccgatgcttcagttgaaccttcgcactggcttgaagggtcaagtgttgttattgtggatccaccaaggaaaggattgcacccatctgttatcagcgctttacagaaagttgctttgtctgagcgcaaggcatacaaggctaaaagttcgcttgcaaaggttaaggatgagaagagaccatggatcttacgggcaagggaggctgcagttcatgttgataatacaacaactgaagagggcaatgaaacgtggcctgaaactctcatatacattagctgtggatgggaaagttttaagagggactgcaaaagcttgatatccagcaaggcctggcagttggaaaatgctcatgcttttaacttcttccctggcacagatagcattgaaattctggctatcttcaaacgggaatcagaagctggtcaaaagaaaaagaagaaagcaaaaaagaaggctaagtagattaacaaaaggctgatccaccttgcggattttgtatttttgtgaatcttaggcattgatccagaacttcagaatgagtgctcatgtctgttatgaggaattttgcatcgtccgaaccaatcaagtgaccaatatgacacaggtcactcaaaatgtagccgtccaaaagcgtcggctcggaatgaaagggtcttttttgctaatcataccggggacttggttttgcgtaccacccgtggtgacattgtgacaggcaagtgggtgtttgcacacaagctgcacgccgatggctctttccaccgatacaagtctcgttagatccttggcgggtcagtggcttggagttaactatgataacactttcagtcctacggtgaagttagccactatgtgcactgttctatctatggctctatctggttttggcttgtctatcaattggacgtcaagaacgtcttccttcgtggcactctgactgagataatgtattgcaaccagcagatcgtttttgtagattcagctcatttgaacattgtatgcaaactcaacaagtcattgtatgatctgaagcatgcaccttgagtttggtatggtcactttgcttcctttgtctcgctggactttgatgaggctaagtcagaactcatcgttgtttatctatcgccagtggtgacactatgtgtctacttctgtacgtcgat

SEQ ID NO: 214232 - DNA, 1133 bp, Zea Mays
atctgatatggaattatgattgtatatgattgcagtgcatcgtatcagaatatcctaatagttgaatatttttttaatatttaaaaaaatttagcttttcgctggcataatacatgcttaccggtccgagatgttctggatgcaatttcgatattccgatctggattggcagatcgcagttgggccggcccgacaaaacgacttaatagacctattcagtaagcccaaagagccagaccctgcgtttccttacttcctggtaaagaaagaagcgaagccaggtacttgttgttgagcgcggagagaggagaggcgcagagcatcgacgatggcgagcggcagcatgaagagggagatcagcgagacccacgacaccctccgcttcggcctcaatgccggcgtcaaggccgacctcgcgccgccgcacccgctccagtccagcatccaatcggaggccaagttctgggcggacaagaagaagtttgggacagaggccatctacggatccgccttgaacatccgcaaggatctcgatgcccaaatcctctcaaggttccaaaggccccctggtgctttgccatcatctctgcttggatatgaggcactgacaggttccctagatgattttggttttgaagattatcttaacatgcctcaagattctgaaggtttccgtcaacctgacatgcaccacggaatggaggttcgccttggtttgtccaagggacctatctgccctagcttcagttgaggcagtgaatgtagttctgcggttctgccgcacgttgatgcaccttagtccagtacactcgggtcaataaaagaccacattaggatggtgaaacggtgaaaactgatggcttgcatatgttcagagtgttatgttgtaatgaacagtgttatgttgtaatgaacgcatatatcgcatgattgatagcttggctagctgtgcgcaggcttagtggaagcattgactggggtgcaggtcggcgcgagcccggctcttatgggtgtaggaaccaatcacgccgattgtgaagcatcgcagttgagcttcaggatctctgcagctgcaggtggcttcttccgtactcgaattagagatgggtccgtaggcttcaatcgaagttaca

SEQ ID NO: 214233 - DNA, 2056 bp, Zea Mays
cagcagtgtccgctgcagcggtggcgagaggccgaggccgctaaaacccaagcctgaggtggagagaccgcacgggtcaccagtcaccacatccctccctcactgccatttgtttggttgttcctctcgctcgccagtcgccaccaggcagcaggcatcccaatctcgcgagagccagtagcggcggcggcgcttccggcttcccttcccattggcctccgggatggcgctccgcctccacgacgtcgcgctctgcctctccccgccgctcgccgcccgccgccgcagcggcggcagtttcgtcgccgtcgcctccatgacgtccgccgccgtctccaccagggtggagaacaagaagccatttgctcctccgagggaggtacatgtccaggttacacattcaatgccatctcacaagattgaaattttcaagtcacttgatgattgggctagagataatatcttgacacatctcaagccagtcgagaagtgttggcagccacaggatttcctccctgacccagcatctgaaggatttcatgatgaagttaaggagctcagagaacgtgccaaggagatccctgatgattattttgtttgtttggttggagacatgattactgaggaagctctaccaacataccagactatgcttaacaccctcgacggtgtcagagatgagacaggtgcaagccccactgcttgggctgtttggacgagggcatggactgctgaggagaacaggcatggtgatcttctcaacaagtacatgtacctcactgggagggtagatatgaggcaaattgagaagacaattcagtatcttattggctctggaatggtaacatattctctctttttatccattttttcttacctatttaacatggcaagtctttcttgtacattcatgcttctgaagtgtttattttcggttgcttggagtttggttctttggtgaattttttttatattaactcactatgttgccatttttttgagcaactattgttctgaaattttgaaccgttgttctatttcagttgggtcgatgattatttctcttttgtactttgtttttttaagatctatgctactgattataactatgtaggactaatatgtagttcctttactgagtccttttcaggatcctaggactgagaataatccttatcttggtttcatctacacctccttccaagagcgggcgaccttcatctcgcatgggaacactgctcgtcatgccaaggactttggcgacttaaagctcgcacaaatctgtggcatcatcgcctcagatgagaagcgacatgaaactgcgtacaccaagatcgtggagaagttgtttgagatcgaccctgatggtacagtggttgctctggctgacatgatgaagaagaagatctcaatgcctgcccacctgatgtttgacggtcaggacgacaagctgtttgagcacttctccatggtcgcgcagaggcttggcgtttacactgccagggactacgccgacattcttgagttccttgttgacaggtggaaggtggcggacctgactggtctgtcgggtgaggggaacaaggcgcaggactacctctgcacccttgcttcaaggatccggaggctagacgagagggcccagagcagagccaagaaagcaggcacgctgcctttcagctgggtatatggtagggaagtccaactgtgaaatcggaaacccattgcgactgcttgagttggagcatagtctatcatgcaccctatgacgcatcgcgacgacaagacctggtgtgtcgcgtgacatagttgttcaggttttgaccaaatggtctgggagcatttgttttgccttgtgccgtctcatagagcgttaggatagtgtacgtctgtgttctagctttgttttgtctgctgctttgatgtacaacttgtggccatgaggctggacatggagtgaacatgttgtacattgtcgctggcggtatgtttcggtatgttatttcagttgttgagatctgttaatttttttgtgagctatggaggtcgttctgtt

SEQ ID NO: 214234 - DNA, 878 bp, Zea Mays
tgagcacacgccggcgatacatgatcgttcgcattgctatgtctgaactcgcatttcccgctggagacctcaggcgcgccgctgccatacctcaaccaggggaaccctctaataggctgcggcctacccaacggcatggacaacagccagagctccatgcacccgctcgacccggcgttttgccggccgatgagctcgcagcagcaccctttcctcaacggtgtcagcgacgcagcgtccaaggtcgggactttctggcaagatgaccttcagagcgtagtccacatggatatggggcagcagagccagcaggagatggctcccacctcctccaacagctacaacgacggttcgttgcaaacagtgcacatgaaaatggagctttgacgtagctagctgaagaagtccagcccaaagcttcgacgcctcctccccccctgtatatacagaacagagagggagagagaggaggaccagcctgcagcggaaaaaagcactcttgagattccccaccccactggtgtgatgattctttggacagagatgtgaaagatcaatcgccacgccggcggccggtcgatcgcaccacccccgccgcctgttgttagccgcaagatcgccggcgaccaaacgcggtgcatcgcatcccccggtatattctcagatcagacctgaattcgtcttcctctcaagcgagagggggaaaaaaagacctgtaatatcatttgtatcgccattatatttgtagctgattatatataaatatataaaatatcatccctcgtattcctgtcacccctcgtctccctgggctggaactccccccgctgctgctggatgaatcatcgtagactctttcttcactctgatacaccaat

SEQ ID NO: 214235 - DNA, 1529 bp, Zea Mays
ctcggtacgccaaagttcacgtggtactgctgcgtccttcgtttactaaggatcaaagtcaaacgtcgagaaatatagattttcctggatgttgctgataatccaccatttagtcgatggagagagtttgtgagaacacagtggctgttgacttcaagcagactaagctgaacaactttgtgccattcatccggtcaggggaatggtctgatattggaggtcgcgattacatggaagatgcccatgtgtgcatctctgatctggcaaagaattttggctatgactcagtcgaagatgaagtaatttctttctatggggtgtttgatggccataatggcaaagatgctgctcattatgtccgtgataacttgccacgggtcatcgtggaagacgctgattttcctcttgagcttgaaaaggtggtaaagaggtcatttgtgcaaactgatagtaagtttgcagagaaattttctcatcacaggggactttcttctggaacgacagcacttacagcaatgatttttggaaggtcccttctggttgcgaatgccggtgactgcagagcggtgctctcgcggcgtggcactgccattgagatgtccaaggaccacaggccttgctgcatgaacgaaaggaagcgcgtagagtcacttggcggctacgttgacgacggttacctgaacggtcagctggcagtgaccagagcgctcggtgattggcatctggatggcatgaaagaggtgggcgagccaggagggcccctgagcgccgaaccagagctgaagatggtcacgctgaccaaggacgacgagttcctgataatcggcagcgacggcatctgggacttcttctcgagccagaacgccgtggacttcgcgcggcggaggctccaggaccacaacgacctgaggctgtgctgcagggagatggtcgacgaggcggtgcggcggggcgccagcgacaacctgacggctgtgatggtctcgttccacccggacgcccctcccccgagccgagccaacaagaggaccggcagggtcaccaggagcatttcggctgaggggcttcacagcctcagagtgctcctggaaggccagtgacgtcgccgggcggcgcggcgccattgctgcccgttcgtccctgatgctgtgctacgttgctgatgagtgttaactgtaagtagcggtttccggtatcttggtgcttgctcttcttcttccgctgagggcgggcgactattcttgtccttcctccgacaataaaccaacgggcctgagatctcactgtgagacgctgtaaataaggaaatatggaagttggagctcgtcattaaggacgagttagcggtgtgcatccagggggcttttgtggctcagtatgtgatgccttttcgcccctcctgattttctgtaaataaaacgatgctgggagccatcggtgtgattgaactagtgttctgttatgcgtgctccccatcgattcaagatctacagtttttatttactaattactactagtacaagtcttta

SEQ ID NO: 214236 - DNA, 2004 bp, Zea Mays
cgaggccacaaatcgactaatctagaagcggccaaccagggaggcgacgctgccaccgatagcagcagtgacgctgcagcttcgccctccacatcctctcgcgaccgccgacgacaacgacgccgcagctgcctccgcatcctctcgcgaccgccacttttccagttaggattcaaggcgtacattcactggaattggatctttgagtgaccagaatcataaaggatggtagttaaaacacttactgaattgtctctgcaagacaaagatgtaaccgttcaggttgaagtcaacagaagatgggaatttagaggaattggcgatgatggtcctgttttacatgttgacatgattctaacagatgcaacgggaaatgcaatctatgctgaattacctgccaaattattggaacaaaaaggttcattgttacagtcgaacaaagtgtactacatccgacgctttcgagttgcaaatgcaaagtcacaatacaaagttatcgatgcccctctcatgatctacttcactgtttattcgataattgaagtttgtcgtgatcctccatctacatttccactttacgtgtataatcttattccatatgaggctattgatgcaaatggaccaaagagtaaagacttccatgtttctgagataaatccaatacaactaagcggaaagtcatctatctaccggaatgtgttcatcaagaacctcagtaatgacataattaaagttactctttggggaaatcaagctctaaaattttcatatgaagctatatatgatcagaaaatacaacatgctgttgttgttctatttgttggatgcttaccgaaggaatacaaaggatctgtatatctaagtggtggtgcagcttgccactggtatttcaatccatccattaatgaagctcaaccatactatcaaaggattcataatgaaaatgtaacaatcaagctccctccactaacgaacgaacaagcggcgtttgttaaccctcctgaaacacaacacaaggatttaaaagagctattagagtctgaaccattgacactaccagaggaaggttttaaatgcactgtaaccattacaagattgcttgatgatcatccatggtggtacaaagcatgtaatacatgtccaaacaaaccatccatgcggtcatcagtgtcatcatgtcctacatgtggctcgacagatgctattctaaggtacaaactcaatttcatggctactgatgacattgctgaaatgcggatgttttgtttcgacaatgttgctaaaagaatcattggaaaaacatgcacttctctcctaacatcagttacagatacctcaaatatccctcctgatttagcagccattgtgtctctcaaattcacattcgtagttgtttataatctaatgtcttttcaaaatcaagaaaaagaactcctaatcaagtcagtcatagcttcacatggaagagacctatccttgccatcaaccaaattgagcattccaatgcatccgtcaactccaacaaaacttctatcgagaacaagacagacaatttcaccctctacggcattgtccaacctatctacatccagttctctagagttttgaagctgaagacagtcttgaagaccaaaatccagagtcttttgaatcgccaccgaaaaggactaagcacaaatctttaagattcgattgcggtgaggatgcgactaacaaggataaatgatctattgtccatggaaacaaaatgatggggctggtgttcctaatattagtcactaagcgcaccaacttttgtctaacatagatgtttatgtcttatttggaaaacagtatccaaatattttttgtctatgcatcatagacttaatgttgtcgaagacatactgtttgtacgtacgtcgacacatcctatgatgaccatattatgtaatgagcactactatctttatatgctaatcatattacgtaataatcactactatctttctatgggacgctaat

SEQ ID NO: 214237 - DNA, 1874 bp, Zea Mays
acgaggcggagtcgccgcacgccctccgctttccgagtgacagccgcactcggccctcgtagctggaggagtgggggcgcgggagagatgataaggatggcggcagcgtctcagccgccatcgtcagccttgcggatgcacgggtgcggcggcgcggcttctgcgtcgtccgcgcccgtgcgcctcttcacggagtcgcggggtagagtcgtggcgtcgattgggaggggcaggaggcggaggcgcgccatctcgtgctgctcgtctccagacgcagatggccctcgccccgccgcgccaccgacctccgcagcgccttccgacgggtcgatacagctctattcccagatcgagagggtaatcacggaggcggcaaagcagtcccgggaaggctggggttcgactggagattggaccgaagtcgagggatcatgggtgttgagaccgaagtccttggagccatcatttgttgtccactttgttggaggaatttttgtcggagccgctccccagatcacataccgcttcttcctcgagtgtctcgcgaacaggggagctttggtgattgctacaccttatgcgagcggctttgaccatttcttcattgcagatgaagttcaatttaagtttgacaggtgtttgagaaacttggatgagcctgtaaatgatctcccaacgtttggtgttggacattcattgggatctgttatccacatgttgattggatcaagatatgctgtgcagcgaagtggaaatgtactgatgtcctttaacaacaaggaggcaagctctgcgatcccactattttcacctgtaattgttcctatggcacagagttttggccctatattctcccaattggcatcgtatccaacaatccgatttggggcagaagcagctattaagcagcttgagaatctaagcccacctgttgttaagcaacttctacctttacttcaacaacttcctccgttgtatatggacctaataaaagggcgggaggacttcattccaaaaccagaagagacacgccgcctgataaaatcctactatggaatttctcggaatctcttaataaagtttaaagatgatcaaattgatgaaacctctacccttgcacaagtactaagctctgaagcagctattagctcattgcttgatatgtcaattcgatcacttcctggggatcatgggttaccattacaacaggttcttcctgatgttccaccagcaatggctgatgcagtgaaccgcggaggtgaacttctgacaaatctgacaacaggcacaccatgggaggctgttgctaaggaggttggcaccactttgggtactgactcaggcattctacgagcacagatctcaaaagacgttgaaactcttgttgatgtaattgcttcatggacatcttcaaattctggtccaagactacttcgcccatgatcacccagcagtctgcgtacagaaatgttagtaacagtgaagagcaacaggatttaatgatgcattgtgagtaacaaaaagatgatacgagacgttggcaattaaggagttatgttaccttggccggtggaggaaggatgcatggcactggcaataggagcttttgtggacaaactatcttaacccattggcaaaggcaagatctccttcccagatattttagtctgtaatcaatttggattaaaggtaaacaatataggcttataaggtgaactaagtaagttaggatatttctccccactaaatgtattaagatcttatattcaagatgactgagtaagagatgctagtaaatggacaatgaaattacgtatcttatattcaagatgactgagtaagagatgctagtaaatggataatgaaattaccct

SEQ ID NO: 214238 - DNA, 1819 bp, Zea Mays
acgaggcggagtcgccgcacgccctccgctttccgagtgacagccgcactcggccctcgtagctggaggagtgggggcgcgggagagatgataaggatggcggcagcgtctcagccgccatcgtcagccttgcggatgcacgggtgcggcggcgcggcttctgcgtcgtccgcgcccgtgcgcctcttcacggagtcgcggggtagagtcgtggcgtcgattgggaggggcaggaggcggaggcgcgccatctcgtgctgctcgtctccagacgcagatggccctcgccccgccgcgccaccgacctccgcagcgccttccgacgggtcgatacagctctattcccagatcgagagggtaatcacggaggcggcaaagcagtcccgggaaggctggggttcgactggagattggaccgaagtcgagggatcatgggtgttgagaccgaagtccttggagccatcatttgttgtccactttgttggaggaatttttgtcggagccgctccccagatcacataccgcttcttcctcgagtgtctcgcgaacaggggagctttggtgattgctacaccttatgcgagcggctttgaccatttcttcattgcagatgaagttcaatttaagtttgacaggtgtttgagaaacttggatgagcctgtaaatgatctcccaacgtttggtgttggacattcattgggatctgttatccacatgttgattggatcaagatatgctgtgcagcgaagtggaaatgtactgatgtcctttaacaacaaggaggcaagctctgcgatcccactattttcacctgtaattgttcctatggcacagagttttggccctatattctcccaattggcatcgtatccaacaatccgatttggggcagaagcagctattaagcagcttgagaatctaagcccacctgttgttaagcaacttctacctttacttcaacaacttcctccgttgtatatggacctaataaaagggcgggaggacttcattccaaaaccagaagagacacgccgcctgataaaatcctactatggaatttctcggaatctcttaataaagtttaaagatgatcaaattgatgaaacctctacccttgcacaagtactaagctctgaagcagctattagctcattgcttgatatgtcaattcgatcacttcctggggatcatgggttaccattacaacaggttcttcctgatgttccaccagcaatggctgatgcagtgaaccgcggaggtgaacttctgacaaatctgacaacaggcacaccatgggaggctgttgctaaggaggttggcaccactttgggtactgactcaggcattctacgagcacagatctcaaaagacgttgaaactcttgttgatgtaattgcttcatggacatcttcaaattctggtccaagactacttcgcccatgatcacccagcagtctgcgtacagaaatatgatacgagacgttggcaattaaggagttatgttaccttggccggtggaggaaggatgcatggcactggcaataggagcttttgtggacaaactatcttaacccattggcaaaggcaagatctccttcccagatattttagtctgtaatcaatttggattaaaggtaaacaatataggcttataaggtgaactaagtaagttaggatatttctccccactaaatgtattaagatcttatattcaagatgactgagtaagagatgctagtaaatggacaatgaaattacgtatcttatattcaagatgactgagtaagagatgctagtaaatggataatgaaattaccct

SEQ ID NO: 214239 - DNA, 1859 bp, Zea Mays
acgaggcggagtcgccgcacgccctccgctttccgagtgacagccgcactcggccctcgtagctggaggagtgggggcgcgggagagatgataaggatggcggcagcgtctcagccgccatcgtcagccttgcggatgcacgggtgcggcggcgcggcttctgcgtcgtccgcgcccgtgcgcctcttcacggagtcgcggggtagagtcgtggcgtcgattgggaggggcaggaggcggaggcgcgccatctcgtgctgctcgtctccagacgcagatggccctcgccccgccgcgccaccgacctccgcagcgccttccgacgggtcgatacagctctattcccagatcgagagggtaatcacggaggcggcaaagcagtcccgggaaggctggggttcgactggagattggaccgaagtcgagggatcatgggtgttgagaccgaagtccttggagccatcatttgttgtccactttgttggaggaatttttgtcggagccgctccccagatcacataccgcttcttcctcgagtgtctcgcgaacaggggagctttggtgattgctacaccttatgcgagcggctttgaccatttcttcattgcagatgaagttcaatttaagtttgacaggtgtttgagaaacttggatgagcctgtaaatgatctcccaacgtttggtgttggacattcattgggatctgttatccacatgttgattggatcaagatatgctgtgcagcgaagtggaaatgtactgatgtcctttaacaacaaggaggcaagctctgcgatcccactattttcacctgtaattgttcctatggcacagagttttggccctatattctcccaattggcatcgtatccaacaatccgatttggggcagaagcagctattaagcagcttgagaatctaagcccacctgttgttaagcaacttctacctttacttcaacaacttcctccgttgtatatggacctaataaaagggcgggaggacttcattccaaaaccagaagagacacgccgcctgataaaatcctactatggaatttctcggaatctcttaataaagtttaaagatgatcaaattgatgaaacctctacccttgcacaagtactaagctctgaagcagctattagctcattgcttgatatgtcaattcgatcacttcctggggatcatgggttaccattacaacaggttcttcctgatgttccaccagcaatggctgatgcagtgaaccgcggaggtgaacttctgacaaatctgacaacaggcacaccatgggaggctgttgctaaggaggttggcaccactttgggtactgactcaggcattctacgagcacagatctcaaaagacgttgaaactcttgttgatgtaattgcttcatggacatcttcaaattctggtccaagactacttcgcccatgatcacccagcagtctgcgtacagaaatgttagtaacagtgaagagcaacaggatttaatgatgcattatgatacgagacgttggcaattaaggagttatgttaccttggccggtggaggaaggatgcatggcactggcaataggagcttttgtggacaaactatcttaacccattggcaaaggcaagatctccttcccagatattttagtctgtaatcaatttggattaaaggtaaacaatataggcttataaggtgaactaagtaagttaggatatttctccccactaaatgtattaagatcttatattcaagatgactgagtaagagatgctagtaaatggacaatgaaattacgtatcttatattcaagatgactgagtaagagatgctagtaaatggataatgaaattaccct

SEQ ID NO: 214240 - DNA, 1558 bp, Zea Mays
ggacacgcacgtagtacatacaggtcacccgtttcgatctcaattcgtgtactagtataatagtagtagctaggattaagttagcaagacaggagctgtgaggggacctgccggtatactactatctaaccttggctgcagctgcaaccctcctcctaccttggtttctctatcccctctcctctgatcggctggtccccgttgcattggccttggcccttgccatgccaacctcatcaacgcctctcaactctagctagccagccacacctcctctgctctggtcctccccgccattagccggtagctgcctaagctgctaaccttgctatcttagctacttctactagtctagtgcgtattttgtgtcctgtacatgcttagttcgtcccccgccccgacctaacgtgcgagtgccggactgctgcggaaggaaggaagggagggaggaggccgggcatcagggacaaggaagactagctcgacattaatttcgttccggtaaggggaatccggaatcgttcggcatggataatcagcgagccacctcaacctcaaagggaatcggctgctagctaggagctagcgaggaggagggttatcggctcctccggcaatcctgaggccggctagctgagggcgaggcagcgtcacgcccgtccgtatgcatggagagccagagggtggtggtggtggtggaggacgcgggcgccgcgcggtcggcgctgcagtgggccgtcggcaacttcatccgcggcagcgactccatcacgctgctccacgtctgcccgccggcgcggtcgcgcaggaagcgccgccgcctccgcctcggcggcttccagctcgcgctcgccttcaaggacctctgcaacggcatcgccgaggccaaggtggagatcgtggtgacggagggggagctcggggagacggtggtggcgacggtgaaccagctcggcgcctccacgctcgtcgtcggcctccacgacaagagcttcctctacagcataccaccgccaaagatcccgttcccgatgttcacgctcccccttggcgtgatatggagaagatcgaagcggagaaagtgatactcaaactgcggggaagacggaggaacagcagaacaggaacagcacggcaggcatagctgagcctgtcctgatggctagtagatatatacacgtacacgcacgcgtgcacatcaacggaggcgcagcaaatctgcggattgacgtaactgtaatgacgacagcggcaggcacagaatgttagagaggaagggtatactccagctccgggaaagacggccccgtacttgtattattagatgattaatcgacaggttggtttactggaaactagaggagccattctgttttctgaagaaaaagaagaatggagcaaggttagaggactgccggttctgatgttaagtctgtaacctctcacgacctgatgctctgttatccttaaaattgatctaagttagaaaacttcaaaactaaagaggttttggtttctaaagactaatttttaatccctccattttattccattttag

SEQ ID NO: 214241 - DNA, 2205 bp, Zea Mays
ctcgtttcgcgtcctagcccaggacaagttccctttttcttctcccaagtctgcgactaggaggcgacgggccgacgggccaagtttcctttctcttctcagtctgcgactggcggcggcgaccatcacgcacaagccttcgttgctacctgcgctccgccaattcggtgaattgcagtctaagcaaagggaaaaggaaggatcttttctccagacttggtaattttggacgacaaggtaacaaagtgtataatcgtgcatagtctgtgttcgtttcttggtagcggctgtcttagcttctcctattgttaaccttctcagtgtggtacggtgattttataaacatgtaactacagctagttccgagctcttattactgtcacttggagatataaagataacataaaaagggcagacctcccgaggagtggtgtttgggaaagggataaaccaaggcatgcctccccgcagatgcggattagctgctttgaacccgcgacccagttacctattgagacaactctcatacaccaggcccaccctttttatataagataagatgttgggagttaaattaatttggaagtctgtgtctcttttgctgcgcccagattcataaccataatcatgtttaaacaagtgctgtgtgaagagccatatttctcacataagttttttaggatattgtgtatagttgtgatataattgtgatatctgtgagatcccttttgttaacatagttttatgagcttggaagcttagaagccatctagctttgaacatgattgattgatcactctccatagaaagttgacttgaacattaagtgaactgcgtgagtattatctgagaatactttgattacatttgatgcttaaactagctcaaagtgtctccaagtaatttgtcgttaggaattaattcactgcattttgttatgtctatacatggaagtttgttgtataaatcttttaatctatctgattagatgtacatctctactgatgtgctatataactttagatgttcaaaaaactaacagtgtttttctctcttctatgagatgcacttccttgcatcatttcatgtccctacaggttttgtattatctgatttttcgggatggatgccaaaaggttcctgcatctggtcgaggagaagaaaagaagggtcctcgagaagaaagaagccccactaaagtgggagcagaagctagaaacagcagctaaggccaaggttgatgcagaagcaaaggtgaagaagctaaattcaagaaagcacaggaggagaggagatttgtcctcagactctgatagtgactatggcagcgatgttgatcgaaaacacttgaagaggaagaaccgcagaaggaacaagaagcatgagcattctgactctgatgatgccaggagacgcaatcgtagatctagaaggagcaccgactcaagtgatgagagcaacagtgaatacgagaccaggtctgaagaagaacgtccaaggaagaagcgctcgcacagaagaaggcatcaccggcactcttcaaagtcagactctgaaaactacagcagtgatgaggaacaacggagacctgccaaggaccattctcagagccgcaggcggcaccatcggtcatctgatgatgactcagacaaggacaaggtcaagtcaagacatgggaagggtctgagatctcgtgacgaggatgcaagagcagatttcaacagcaataagcatctcaggagccaatccttggaggagtcatcagatgatagagatgctgatgaatctgagaagatgaggaatggcaaaaggaggcaagtactgaaagatggccagagggcccttgaaggtgacagcgcatactgaagatatcccagcaaggtcgagttaattgtccttattaaggacatgaagatcatttttttttcgttcctgatgttctcagataattattgtattgctgacaacatttctttgatttgtgaatatactaaacatgttgcctatgcatttgcttagatgtccgatctccgaaggctgaagtcgataaaagggctagaacggagacatttgtgtcactgtagtggtgcaatttaagtattagatcattaagacaccatagtgcaacagactctttgaacacgtctcaattaaacaccatgcatcgatatgctccattccactcaattaattcagaattctgac

SEQ ID NO: 214242 - DNA, 1519 bp, Zea Mays
cgagccatggatggatgctggagagagctcggctgatggtggagatgcacgagatggtccccgggaagcggttcgaccgttaccacgagctggggcagcacgcgttcggggaccggctgggcctgtggatcgtggtgccgcagcagctggtcgtcgaggtgggcgtgaacatcgtgtacatggtgaccggcggcaagtccctgaagaagttccacgacgtgctggtgtgcggcgacacgggggtgtgcgaggggaaggacaacatcaagaccacctacttcatcatgatcttcgcgtccgtccacttcgtcctctcgcagctccccaacttcaactccatctccggcgtctccctcgccgccgccgtcatgtcgctcagctactccaccatcgcgtggggcgcgtcggtgcacaaggggaggatgtcgggcgtcgactaccacctgcgcgcgaccaccacgccggggaaggtgttcggcttcttcggcgcgctgggggacgtggcgttcgcctacgccggccacaacgtggtgctggagatccaggccaccatcccgtccacccccgacaagccgtccaagaagcccatgtggaagggcgtggtggtcgcctacgtcgtggtggcgctctgctacttccccgtcgcgctcatcggctactgggcgttcggaaacacggtcgaggacaacatcctcatcacgctcagcaagcccaagtggctcatcgcgctcgccaacatgatggtcgtcgtccatgtcatcggcagctaccagatctatgccatgccggtgtttgacatgatagagaccgtgctggtgaagaagctgcgcttccctcccggcctcacgctgcgtctgatcgctcggaccctctatgttgcgttcacgatgttcatagccatcaccttccccttcttcggtgggctgctcggtttcttcggcgggttcgccttcgcgccgaccacctatttccttccctgcgtcatgtggctcgcaatctacaagcccaagaggttcagcctctcctggttgaccaactggatgtgcatcattcttggggtgctcctgatgattctgtcgcccatcggagggctccggcaaataataatggacgcgaaaacctaccagttctactcgtgagctaccaccagccatgacttgtaagcacgattggagaaatctgtcaaagcctcaaccacgagtttttgtttttgttttttgtcatgccaaacacatacatatacgtactgtttttttaatattcaaaggtgttcttcgtggcttgcgtgtgtacagtattatgtgtatgagggagacataagtttaatgatgctggctgtcaaagataatggcggttcaattacactttcatctcacttgcttcgtagctaggactttggaaggggctacagtatgtatttgggattatttgagcagtgtgttttttgtcgtttctaaagcgcaggcttctttccttggcgcttttccttgcgattacaaggatggatggcacactgaag

SEQ ID NO: 214243 - DNA, 932 bp, Zea Mays
tcattaaattagatatatgaaatctataagagtaatagaccgcaagcaagaagtacctcatgatggggctatgtgtgaccttctatggtctgatccagaggacactgtagatggttggggactaagtcctcggggtgcaggattcctctttggtggaaatgtggtctcatcatttaaccattcaaacaacatagattacatttgtcgtgcacatcaacttgtcatggaagggtataaatggatgttcaatagcaagattgtaactgtatggtctgctcctaattactgctacaggaatcaagaggtgttcctgctaagaggccagcaccagattactttctgtgatgctacacagcgaacgcttgagcttactgtgctttcaagcgctggacctcatgttgcaagaagagctcaggccctacagctttccagccaggaggtggttttcaggatgtgtaaattgagtgtcatcttctcccttcaggtccatgatttgtaagagagttggattttggcatccagttttttcacagaacatcacccatttgagctggagaaatacgcccttgcgaaggggtttcatgtgatgtgctaaaagtacacgttgtaagatttttttgcgattgcataccccctagaaaaaccgttcctggaatatgtggcaatcaggaaatgtgtcgatgctctggaaagtgtaggagatttttgtagtagtcatttgcgcgtgctgttagggactagggagcatgtggtcaggggacactagcactagcttgtcggcatgcaatggtgtattgtaactgtctttatgcagcatctctaattcaaatagctaactacatttgatgtcttcttctgagctgtcgtgttcatataaattcgttttattggatataaaatatatgatttaataatgacacttagatgttcac

SEQ ID NO: 214244 - DNA, 1387 bp, Zea Mays
catattcagagcatggttgttttggaacttctgtcctggagaagccaatctagtctgtctggcggcaagcgcttattgatacttaacttccactacataacagtggatcacactaaccgtgaactgatttttctgaatggtatatgtataacactggagcatagaagtgataaaatgttaggtatccagaccgtattaccttaatacgaggaaaccatgagagcagacagatcacacaggtttatggattctatgatgagtgccttcgcaaatatggctcagtcaatgtctggagatattgcactgatatattcgactatttaagtttgtctgcacttattgagaacaaaatatttagtgtccatggaggcctttctcctgctatcacgacactggatcagataagagtaatagaccgcaagcaagaagtacctcatgatggggctatgtgtgaccttctatggtctgatccagaggacactgtagatggttggggactaagtcctcggggtgcaggattcctctttggtggaaatgtggtctcatcatttaaccattcaaacaacatagattacatttgtcgtgcacatcaacttgtcatggaagggtataaatggatgttcaatagcaagattgtaactgtatggtctgctcctaattactgctacaggtgtggcaatattgctgcaatcctagagctggatgagaacctgaataagcagttccgcgtatttgaagctgctccacatgaatcaagaggtgttcctgctaagaggccagcaccagattactttctgtgatgctacacagcgaacgcttgagcttactgtgctttcaagcgctggacctcatgttgcaagaagagctcaggccctacagctttccagccaggaggtggttttcaggatgtgtaaattgagtgtcatcttctcccttcaggtccatgatttgtaagagagttggattttggcatccagttttttcacagaacatcacccatttgagctggagaaatacgcccttgcgaaggggtttcatgtgatgtgctaaaagtacacgttgtaagatttttttgcgattgcataccccctagaaaaaccgttcctggaatatgtggcaatcaggaaatgtgtcgatgctctggaaagtgtaggagatttttgtagtagtcatttgcgcgtgctgttagggactagggagcatgtggtcaggggacactagcactagcttgtcggcatgcaatggtgtattgtaactgtctttatgcagcatctctaattcaaatagctaactacatttgatgtcttcttctgagctgtcgtgttcatataaattcgttttattggatataaaatatatgatttaataatgacacttagatgttcac

SEQ ID NO: 214245 - DNA, 1738 bp, Zea Mays
gcgaccggtatttggtccggccgagatgctctaaccgcacgacgggactcggctcccctacggcccacgccacgtcaccgcggtccgcacgcgccccacggcttccgccgcctcctaaccctagaatcttcgagaagcacccggcgaagagcgcgctgccacggcgctttccggaaacttcttggagagagagagagagagagagacggccccgcagcggcggaggcggagatgggggcgtcggatctagaccggcagatcgagcagctgaagcggtgcgagccgctcacggaggcggaggtcaaggcactgtgcctcaaggccatggagatcctcatcgaggagagtaacgtgcagcgcgtcgacgcccccgtcaccatttgtggagacatacatggacagttctatgacatgaaggagctgttcaaagttggaggtgactgcccaaagacaaactatttgttccttggggattttgttgaccgaggattttattctgttgaaacttttttgcttcttttggctttaaaggttaggtatccagaccgtattaccttaatacgaggaaaccatgagagcagacagatcacacaggtttatggattctatgatgagtgccttcgcaaatatggctcagtcaatgtctggagatattgcactgatatattcgactatttaagtttgtctgcacttattgagaacaaaatatttagtgtccatggaggcctttctcctgctatcacgacactggatcaggcaaaactattctcctagtgttgttttatattctgtatgttttatttgttttaacgttgtaccctacaccaacagataagagtaatagaccgcaagcaagaagtacctcatgatggggctatgtgtgaccttctatggtctgatccagaggacactgtagatggttggggactaagtcctcggggtgcaggattcctctttggtggaaatgtggtctcatcatttaaccattcaaacaacatagattacatttgtcgtgcacatcaacttgtcatggaagggtataaatggatgttcaatagcaagattgtaactgtatggtctgctcctaattactgctacaggaatcaagaggtgttcctgctaagaggccagcaccagattactttctgtgatgctacacagcgaacgcttgagcttactgtgctttcaagcgctggacctcatgttgcaagaagagctcaggccctacagctttccagccaggaggtggttttcaggatgtgtaaattgagtgtcatcttctcccttcaggtccatgatttgtaagagagttggattttggcatccagttttttcacagaacatcacccatttgagctggagaaatacgcccttgcgaaggggtttcatgtgatgtgctaaaagtacacgttgtaagatttttttgcgattgcataccccctagaaaaaccgttcctggaatatgtggcaatcaggaaatgtgtcgatgctctggaaagtgtaggagatttttgtagtagtcatttgcgcgtgctgttagggactagggagcatgtggtcaggggacactagcactagcttgtcggcatgcaatggtgtattgtaactgtctttatgcagcatctctaattcaaatagctaactacatttgatgtcttcttctgagctgtcgtgttcatataaattcgttttattggatataaaatatatgatttaataatgacacttagatgttcac

SEQ ID NO: 214246 - DNA, 3352 bp, Zea Mays
tgtttggagagcagatagcctaatgccaaaatagcaaatttctcagccgtgacaacacagcctgcgctccccttctttcccgttcggctcacagcgaagaaggaagccggttagggtttccacctcctttcccctcctctccttcagcgacgaccgcgggccacaccctcgatatccttcccctcggacccggaggcgagcagcagcctccagcgcctgccacgcctgcccgtctcgttattgggaggattcgccatgtctgacatggagtccgtcgcagctcttatgaactcgacaagctccaagatacagcagcttcaggaggcatttgctgagcttgagagccagagcacggtttccatgaacctcaagtggaagcagcttgaagaccactttcgtggtcttgaacagtccctcaagaaaaagtttgacgagctaaaagagcaggagaaggagttccaggagactgtcgcaaaatcagagcagattctggagcagcgggaggcagctgttgtggcaaaggaactgacctctttggagaagttgcaggagaagagggaagctgcattagctatgatctttagcaagtccaggctttccttacctgttcctaccatcaacccaatgaacaaggcgctgaataatcttggtgtcaagtggccaaaaccggcatctgaggagagtgtgcacttgcaagttgataatgctgtagtgacgcctcgttctgagcttgttgcactctgtgaggaaatgaatgtgaaggggcttcataagttcatatccgacaacaggaagaacttggctgccatccgcgaggaaattcccagtgcactgaagaaaacatctcatccgtatggcttggtgttggattccctggaagacttctattctggagataatcttgtattagatggcaaaaaggatggggaccttctgggtgttagaaggacgtgcctgatgttgttggagtcactcggacagttgcacactgctggtataacttgtttctctttggagggtcacatgcttacaactaatatcatagagcgagcaaagaagattgcatttgagtggaagtccaagttagataatcttgagattgatgctagtaatgggaactgtcttgaagctcatgcatttcttcaactcctggcaacctttggtatttctgctgaatataatgaagatgacctgtgcaaattgcttccatatgtcagtcgtcgtcgtcagacacctgaactttgtcgattgcttgggttgtcacagaaaatgccaggtgtcattgaagttctggtgaaaagtggaagaactattgatgcaattaatttagcttacgtgtttgagcttactgaacagtttgaaccagtgcaactgcttaaagcatatctgagggatgttaagaaactgtcacatgccaggaatgtcaaaatttctcctggagcacaggcagaggatggagggggcaggcaaggatggcaacccgttgaggaattatcggattggcaagactctcggaattggctcattcgggaaggtgaaaattgcggagcatatcagcactggacacaaggtggcaatcaagattctcaaccgccgtaaaatcagaggcatggagatggaagagaaagttaaaagagagattaagatattgaggttatttatgcatccacatattatccgcctctatgaggttatagacacaccggctgatatttatgttgttatggagtatgttaagtgtggggaattatttgattacattgttgagaaaggtaggctgcaggaggaagaggctcgccgtttcttccaacagattatatccggtgttgaatattgccatagaaacatggtggtgcatcgtgatctaaagccagaaaacctcctattggattcaaaatgcaatgttaagattgcagattttggcttaagtaatgttatgcgggatggtcattttctgaagacaagttgtggtagcccaaattatgctgctcctgaggtgatatctggtaaactatatgctggacctgaagttgatgtgtggagctgtggggttattctttatgctcttttatgtggtactctgccatttgatgacgagaacataccaaacctttttaagaaaataaagggtggaatatatacccttcccagccatttgtctggtgcagcaagggatttgattccaagaatgctagttgtcgatcctatgaagcggatcaccattcgtgaaattcgcgaacatgattggttcaaaattcttctcccgcgctatttgactgtgcctcctccagatagtgcgcaacaagtcaaaaaggttgatgaggaaactctccgtgaggttttaggtatgggatatgacaagaacctgttggtggaatcaatccaaaaaaggctgcaaaatgaggcaactgttgcatattacttactcttggacaataggctccgtacaaccagtggctatcttggagctgaatgtcaagaagctatggactcctcattctcaaacatcgcatcatatgaaacaccaagttcagcacgtgggaatagacagcaaatatttatggagtctccagttggcttgagaccacatcttccagctgagaggaaatgggctcttggtcttcagtctcgagcacatccaaaagaaataatgtctgaagtgctgaaagctctgcaagaattaaatgtttactggaaaaagataggtcactataacatgaagtgcagatggagtcctggctttcctgctcaaattcataacaatcataacttcagtgcagggtccattgaaactgatagcctgagtgagaggttaagtttaattaagtttgaaattcagctgtacaaaacaagagacgagaaatacctcctcgatttgcaaagagtcagtgggccacagctcctctttctggacttgtgcgcggcctttctaactcaactgagagttctttgatttctggtgtcagctttccatcagttgcattccttgcgtttcactagaggaatgtctaaatcgctcacaaagctgtaaatagtaatctccagtagattggattttctggagtatgtagatggtaggcatgagaagatgttatgcctggcggcgatcttctgaaccagactgtgtggagtaacttatctcctaattctttacggctggccagctgccggtgaattagatcagtgcttttgctggcataatgtctatctacattaataatttcagctattacaacggttaattaaatgctgtgctgcttacaggccaaatgagattatgttttgaaggcaactctttttttttgcattaattgattggagttgtttggcatgcgaagcgagtctgaccgag

SEQ ID NO: 214247 - DNA, 2030 bp, Zea Mays
ccacctcatcgtcgccctcccatttatccacctcctactcctccccgatctggagattcggcgatgcgcttggatttcgggccattggtgctacctgtttcgatctggaagcgtgcgagatgcggcagaggatggagggggcaggcaaggatggcaacccgttgaggaattatcggattggcaagactctcggaattggctcattcgggaaggtgaaaattgcggagcatatcagcactggacacaaggtggcaatcaagattctcaaccgccgtaaaatcagaggcatggagatggaagagaaagttaaaagagagattaagatattgaggttatttatgcatccacatattatccgcctctatgaggttatagacacaccggctgatatttatgttgttatggagtatgttaagtgtggggaattatttgattacattgttgagaaaggtaggctgcaggaggaagaggctcgccgtttcttccaacagattatatccggtgttgaatattgccatagaaacatggtggtgcatcgtgatctaaagccagaaaacctcctattggattcaaaatgcaatgttaagattgcagattttggcttaagtaatgttatgcgggatggtcattttctgaagacaagttgtggtagcccaaattatgctgctcctgaggtgatatctggtaaactatatgctggacctgaagttgatgtgtggagctgtggggttattctttatgctcttttatgtggtactctgccatttgatgacgagaacataccaaacctttttaagaaaataaagggtggaatatatacccttcccagccatttgtctggtgcagcaagggatttgattccaagaatgctagttgtcgatcctatgaagcggatcaccattcgtgaaattcgcgaacatgattggttcaaaattcttctcccgcgctatttgactgtgcctcctccagatagtgcgcaacaagtcaaaaaggttgatgaggaaactctccgtgaggttttaggtatgggatatgacaagaacctgttggtggaatcaatccaaaaaaggctgcaaaatgaggcaactgttgcatattacttactcttggacaataggctccgtacaaccagtggctatcttggagctgaatgtcaagaagctatggactcctcattctcaaacatcgcatcatatgaaacaccaagttcagcacgtgggaatagacagcaaatatttatggagtctccagttggcttgagaccacatcttccagctgagaggaaatgggctcttggtcttcagtctcgagcacatccaaaagaaataatgtctgaagtgctgaaagctctgcaagaattaaatgtttactggaaaaagataggtcactataacatgaagtgcagatggagtcctggctttcctgctcaaattcataacaatcataacttcagtgcagggtccattgaaactgatagcctgagtgagaggttaagtttaattaagtttgaaattcagctgtacaaaacaagagacgagaaatacctcctcgatttgcaaagagtcagtgggccacagctcctctttctggacttgtgcgcggcctttctaactcaactgagagttctttgatttctggtgtcagctttccatcagttgcattccttgcgtttcactagaggaatgtctaaatcgctcacaaagctgtaaatagtaatctccagtagattggattttctggagtatgtagatggtaggcatgagaagatgttatgcctggcggcgatcttctgaaccagactgtgtggagtaacttatctcctaattctttacggctggccagctgccggtgaattagatcagtgcttttgctggcataatgtctatctacattaataatttcagctattacaacggttaattaaatgctgtgctgcttacaggccaaatgagattatgttttgaaggcaactctttttttttgcattaattgattggagttgtttggcatgcgaagcgagtctgaccgag

SEQ ID NO: 214248 - DNA, 1586 bp, Zea Mays
cgggccattggtgctacctgtttcgatctggaagcgtgcgagatgcggcagaggatggagggggcaggcaaggatggcaacccgttgaggaattatcggattggcaagactctcggaattggctcattcgggaaggtgaaaattgcggagcatatcagcactggacacaaggtggcaatcaagattctcaaccgccgtaaaatcagaggcatggagatggaagagaaagttaaaagagagattaagatattgaggttatttatgcatccacatattatccgcctctatgaggttatagacacaccggctgatatttatgttgttatggagtatgttaagtgtggggaattatttgattacattgttgagaaaggtaggctgcaggaggaagaggctcgccgtttcttccaacagattatatccggtgttgaatattgccatagaaacatggtggtgcatcgtgatctaaagccagaaaacctcctattggattcaaaatgcaatgttaagattgcagattttggcttaagtaatgttatgcgggatggtcattttctgaagacaagttgtggtagcccaaattatgctgctcctgaggtgatatctggtaaactatatgctggacctgaagttgatgtgtggagctgtggggttattctttatgctcttttatgtggtactctgccatttgatgacgagaacataccaaacctttttaagaaaataaagggtggaatatatacccttcccagccatttgtctggtgcagcaagggatttgattccaagaatgctagttgtcgatcctatgaagcggatcaccattcgtgaaattcgcgaacatgattggttcaaaattcttctcccgcgctatttgactgtgcctcctccagatagtgcgcaacaagtcaaaaaggttgatgaggaaactctccgtgaggttttaggtatgggatatgacaagaacctgttggtggaatcaatccaaaaaaggctgcaaaatgaggcaactgttgcatattacttactcttggacaataggctccgtacaaccagtggctatcttggagctgaatgtcaagaagctatggactcctcattctcaaacatcgcatcatatgaaacaccaagttcagcacgtgggaatagacagcaaatatttatggagtctccagttggcttgagaccacatcttccagctgagaggaaatgggctcttggtcttcagtctcgagcacatccaaaagaaataatgtctgaagtgctgaaagctctgcaagaattaaatgtttactggaaaaagataggtcactataacatgaagtgcagatggagtcctggctttcctgctcaaattcataacaatcataacttcagtgcagggtccattgaaactgatagcctgagtgagaggttaagtttaattaagtttgaaattcagaaacattgaccctggactcctggagggcatatttggtgttgttttaatcttcgaacctaatatggttctagactccaaagcaatgcagcaagcatgctaaattgcgtaacagatgagcgaggtcgacattggcatcaaatttgtcg

SEQ ID NO: 214249 - DNA, 1941 bp, Zea Mays
tggtgctacctgtttcgatctggaagcgtgcgagatgcgaggatggagggggcaggcaaggatggcaacccgttgaggaattatcggattggcaagactctcggaattggctcattcgggaaggtgaaaattgcggagcatatcagcactggacacaaggtggcaatcaagattctcaaccgccgtaaaatcagaggcatggagatggaagagaaagttaaaagagagattaagatattgaggttatttatgcatccacatattatccgcctctatgaggttatagacacaccggctgatatttatgttgttatggagtatgttaagtgtggggaattatttgattacattgttgagaaaggtaggctgcaggaggaagaggctcgccgtttcttccaacagattatatccggtgttgaatattgccatagaaacatggtggtgcatcgtgatctaaagccagaaaacctcctattggattcaaaatgcaatgttaagattgcagattttggcttaagtaatgttatgcgggatggtcattttctgaagacaagttgtggtagcccaaattatgctgctcctgaggtgatatctggtaaactatatgctggacctgaagttgatgtgtggagctgtggggttattctttatgctcttttatgtggtactctgccatttgatgacgagaacataccaaacctttttaagaaaataaagggtggaatatatacccttcccagccatttgtctggtgcagcaagggatttgattccaagaatgctagttgtcgatcctatgaagcggatcaccattcgtgaaattcgcgaacatgattggttcaaaattcttctcccgcgctatttgactgtgcctcctccagatagtgcgcaacaagtcaaaaaggttgatgaggaaactctccgtgaggttttaggtatgggatatgacaagaacctgttggtggaatcaatccaaaaaaggctgcaaaatgaggcaactgttgcatattacttactcttggacaataggctccgtacaaccagtggctatcttggagctgaatgtcaagaagctatggactcctcattctcaaacatcgcatcatatgaaacaccaagttcagcacgtgggaatagacagcaaatatttatggagtctccagttggcttgagaccacatcttccagctgagaggaaatgggctcttggtcttcagtctcgagcacatccaaaagaaataatgtctgaagtgctgaaagctctgcaagaattaaatgtttactggaaaaagataggtcactataacatgaagtgcagatggagtcctggctttcctgctcaaattcataacaatcataacttcagtgcagggtccattgaaactgatagcctgagtgagaggttaagtttaattaagtttgaaattcagctgtacaaaacaagagacgagaaatacctcctcgatttgcaaagagtcagtgggccacagctcctctttctggacttgtgcgcggcctttctaactcaactgagagttctttgatttctggtgtcagctttccatcagttgcattccttgcgtttcactagaggaatgtctaaatcgctcacaaagctgtaaatagtaatctccagtagattggattttctggagtatgtagatggtaggcatgagaagatgttatgcctggcggcgatcttctgaaccagactgtgtggagtaacttatctcctaattctttacggctggccagctgccggtgaattagatcagtgcttttgctggcataatgtctatctacattaataatttcagctattacaacggttaattaaatgctgtgctgcttacaggccaaatgagattatgttttgaaggcaactctttttttttgcattaattgattggagttgtttggcatgcgaagcgagtctgaccgag

SEQ ID NO: 214250 - DNA, 1967 bp, Zea Mays
ctcagatggacgaaccagctggatctggcctgctcaaatggaaccgcgagctttcattgcgcctgaggatggagggggcaggcaaggatggcaacccgttgaggaattatcggattggcaagactctcggaattggctcattcgggaaggtgaaaattgcggagcatatcagcactggacacaaggtggcaatcaagattctcaaccgccgtaaaatcagaggcatggagatggaagagaaagttaaaagagagattaagatattgaggttatttatgcatccacatattatccgcctctatgaggttatagacacaccggctgatatttatgttgttatggagtatgttaagtgtggggaattatttgattacattgttgagaaaggtaggctgcaggaggaagaggctcgccgtttcttccaacagattatatccggtgttgaatattgccatagaaacatggtggtgcatcgtgatctaaagccagaaaacctcctattggattcaaaatgcaatgttaagattgcagattttggcttaagtaatgttatgcgggatggtcattttctgaagacaagttgtggtagcccaaattatgctgctcctgaggtgatatctggtaaactatatgctggacctgaagttgatgtgtggagctgtggggttattctttatgctcttttatgtggtactctgccatttgatgacgagaacataccaaacctttttaagaaaataaagggtggaatatatacccttcccagccatttgtctggtgcagcaagggatttgattccaagaatgctagttgtcgatcctatgaagcggatcaccattcgtgaaattcgcgaacatgattggttcaaaattcttctcccgcgctatttgactgtgcctcctccagatagtgcgcaacaagtcaaaaaggttgatgaggaaactctccgtgaggttttaggtatgggatatgacaagaacctgttggtggaatcaatccaaaaaaggctgcaaaatgaggcaactgttgcatattacttactcttggacaataggctccgtacaaccagtggctatcttggagctgaatgtcaagaagctatggactcctcattctcaaacatcgcatcatatgaaacaccaagttcagcacgtgggaatagacagcaaatatttatggagtctccagttggcttgagaccacatcttccagctgagaggaaatgggctcttggtcttcagtctcgagcacatccaaaagaaataatgtctgaagtgctgaaagctctgcaagaattaaatgtttactggaaaaagataggtcactataacatgaagtgcagatggagtcctggctttcctgctcaaattcataacaatcataacttcagtgcagggtccattgaaactgatagcctgagtgagaggttaagtttaattaagtttgaaattcagctgtacaaaacaagagacgagaaatacctcctcgatttgcaaagagtcagtgggccacagctcctctttctggacttgtgcgcggcctttctaactcaactgagagttctttgatttctggtgtcagctttccatcagttgcattccttgcgtttcactagaggaatgtctaaatcgctcacaaagctgtaaatagtaatctccagtagattggattttctggagtatgtagatggtaggcatgagaagatgttatgcctggcggcgatcttctgaaccagactgtgtggagtaacttatctcctaattctttacggctggccagctgccggtgaattagatcagtgcttttgctggcataatgtctatctacattaataatttcagctattacaacggttaattaaatgctgtgctgcttacaggccaaatgagattatgttttgaaggcaactctttttttttgcattaattgattggagttgtttggcatgcgaagcgagtctgaccgag

SEQ ID NO: 214251 - DNA, 542 bp, Zea Mays
ttgaaaacacctcaactaaaaaaactcagctgtacaaaacaagagacgagaaatacctcctcgatttgcaaagagtcagtgggccacagctcctctttctggacttgtgcgcggcctttctaactcaactgagagttctttgatttctggtgtcagctttccatcagttgcattccttgcgtttcactagaggaatgtctaaatcgctcacaaagctgtaaatagtaatctccagtagattggattttctggagtatgtagatggtaggcatgagaagatgttatgcctggcggcgatcttctgaaccagactgtgtggagtaacttatctcctaattctttacggctggccagctgccggtgaattagatcagtgcttttgctggcataatgtctatctacattaataatttcagctattacaacggttaattaaatgctgtgctgcttacaggccaaatgagattatgttttgaaggcaactctttttttttgcattaattgattggagttgtttggcatgcgaagcgagtctgaccgag

SEQ ID NO: 214252 - DNA, 1493 bp, Zea Mays
ccggccaacacgagtgcggcgcgtcatgatgcatggctccacgagtgccgcagttggcacgctcaacggcgcccagcgatgttgacctcgatcgcctgccgctcgtcggccacctctccgccgtttcagaagtctccagttgaagaagcaccggaggaatttgaccacataatcttccctgtcaatcataaaccattccatttgtccagcagaaggcttggccctcaactaaaggaaaccttttgtatttgaatattagtgatacctgtgtatggatacgaatccaccacatcccatgaactgaagtatcattgattggaatatcattgattggaaggagctgaacaagatggaatcctgaatcgactgcccgatcaacaagacgtttaggatttagaaattctccaacgccaaggtgatcgtgtgatctgattgaaaacatgggtacaacaacacctgcagtcctgcacccctccatgatgcatcttggggcgtacaagtatgtctcggagttatggaggaggaagcaatccgacgtgatgcggttcgtgcagcgcgtgcgctgctgggagtacaggcagcagccggccatcgtccgcctcacaaggcccacccgccccgacaaggcccgccgcctcggctacaaggccaagcaggggtatgttgtttaccgtgtccgtgtcaagcgtggcggcaggaagaggcctgtgccgaagggtattgtctatggcaagcccaagcaccagggtatcacccagctcaagttccagaggaacaagaggtctgttgctgaggagagggctggacgaaagcttggtggactcagggttctcaactcctactgggtgaatgaggatagcacctacaagtacttcgagatcatcctggttgatgtggctcacaccgccatccgcaacgacccaagaatcaactggctatgcaatcctgtgcacaagcaccgtgagctccgtggtctcacctctgcaggcaagaagttccgtggtctgcgtggcaagggccacactcaccacaagaacaggccgtccaggagggccacctggaagcgcaaccagaccctttccctccgccgctaccgttgagcacacacatcttgatgctctgctactgtggaacccgccccatgcaggctctctgatagtatttggtatatttgtttcattgttaaattttgctacatgtgttacttttgagccccttgaactccgttgtctgtaccatggagcaagtgacgcgtacgagtcgatgaaaatgattgtttagtagtgcattgctgtgtattctgtctggcacgattgatttagggcatgtttgggaacacttctttcaaaaccacggtttatattaccatagtttaccgtatgttatgacatgaacatattgtattttacatcattctaattcaacatctgtttggagccgggaggagaaaggccaagacaaggaaggagaaaggggctagactgcgcctgcgg

SEQ ID NO: 214253 - DNA, 970 bp, Zea Mays
ctacaccccatgatgagtttgatgatgacctttgagattgagccattgaggctgaattcaagaggattacgtcacctttgaagctccagacaaggtgtcttgctgcatttcctgatcaacaaggttttttgattgggtctatagaaggacgagttggtgttcatcatgtggaagagtctcagcaaggaaaaaactttacattcaagtgtcaccgcgatggcaatgatatatacgctattagctcgttgaactttcatcctgtgcatggtacattcgctactacaggctctgatggaagtttcaacttttgggataaggacagtaagcaaaggctgaaggcttataataggtgtccatcccccatcacatgcagcgcattcaatcatgatggctctatatttgcttacgcggtatgttatgattggagcaaaggtgctgagaagcataatccttctactgcaaagacaaatatatttctacatagtgcacaggattctgacgtgaaaggaaaaccccgcgctggaaagaagtaggcgtagcaatgataagtcagtgactggtgatcgtaggacagcaaatcagctctcttctcctgatagttagggtatttcttgacagtacactagactaaaagcatgtccttttatcacaaccattgcatttgcctcttttggctaagtaatttcggtggcagtgcacttacggcgggttatttctaaaatggaccatctgctgggcgggggcattgttgttctttggacgtctggttgttggtctactggtcgcttttgaagcttggttagtcaatttctcttcgtgctctctagttgcttgactacccgttgcatctttgattgtggtggaaggtcatctctactcatataaaacaccatgttctacggttagttatgtgagttgttaccttctagatgagctatgagaaaacacttaagcctaacatgaaacaaag

SEQ ID NO: 214254 - DNA, 1093 bp, Zea Mays
ccttaacattatggcttatcactagttgtaggtactgggacattaggcaaccccaaccagtgcatgttcagcaacttcctgagcgttgctatgctctatcgctttgttatcctctcatggtggttggcactgctgatcgcaacgtaatagtcttcaatctgcagaatccacaggctgaattcaagaggattacgtcacctttgaagctccagacaaggtgtcttgctgcatttcctgatcaacaaggttttttgattgggtctatagaaggacgagttggtgttcatcatgtggaagagtctcagcaaggaaaaaactttacattcaagtgtcaccgcgatggcaatgatatatacgctattagctcgttgaactttcatcctgtgcatggtacattcgctactacaggctctgatggaagtttcaacttttgggataaggacagtaagcaaaggctgaaggcttataataggtgtccatcccccatcacatgcagcgcattcaatcatgatggctctatatttgcttacgcggtatgttatgattggagcaaaggtgctgagaagcataatccttctactgcaaagacaaatatatttctacatagtgcacaggattctgacgtgaaaggaaaaccccgcgctggaaagaagtaggcgtagcaatgataagtcagtgactggtgatcgtaggacagcaaatcagctctcttctcctgatagttagggtatttcttgacagtacactagactaaaagcatgtccttttatcacaaccattgcatttgcctcttttggctaagtaatttcggtggcagtgcacttacggcgggttatttctaaaatggaccatctgctgggcgggggcattgttgttctttggacgtctggttgttggtctactggtcgcttttgaagcttggttagtcaatttctcttcgtgctctctagttgcttgactacccgttgcatctttgattgtggtggaaggtcatctctactcatataaaacaccatgttctacggttagttatgtgagttgttaccttctagatgagctatgagaaaacacttaagcctaacatgaaacaaag

SEQ ID NO: 214255 - DNA, 743 bp, Zea Mays
agccagcctgcctatttgcctaaacctaatccactagcagttcggcactgcggctgcggggatgcggcggccggcggcagcggcactacggagccctcagccagcaccaggttgcggcaacggcaacaaccagcaagtggccagcgattcacgggttcaggcgttcagcgccacgccgtcgtcgccccaagccagacctccagtcaggaaccaccgattgtgatttgtgaagaactgtgaattgattaactgaagatgtcaaatagtggaggcaagggatgtcgttcccgtgctagatcaatgccacccgagaagcaactaggtatttcaagtttcttgcctgaacctccaccgccgcctccttctacgaaaggtagtaccaacggtcagccctgcatggatgatgaggaacaagatgctgaaagtgatcccgacgtcatgaatgattatggtgagctttgaccgtgagtcagcgactagtcatggtgcttaatgcttgacaacatgtttggaactttagataaatatgttgctgtgtccatgtgcggatgtgcctgtttctgtgtgttgtgtgtaatgaaccttgaacttttttggaacattggggcaagaaaaggtgccagccgcatggagcacccttctgtgtggctgtgtgtaatgaaccttgagcactattctatgcgacaacaactttgtcattgtgtgttcttaaatatgtgtgcccgtgtgatgtgtgcatatct

SEQ ID NO: 214256 - DNA, 2673 bp, Zea Mays
atctccttcatgcgataagcataaagtgacacggtcacactggagaagcatcaggcaaacgatacagcccttccctcttcaatcctctcgtcatttcctctcgcttctgctcagctgcaacccagcgcttagatcttattcttggacgagaactctcctcaagctctccgatttctgttctcgcgccgcttagcaattcaaccccgaaattcttttgcggcgcagtcttcacctgaatcttgggtcgtagccaagaagatgaacaaagacaaagctccgatgccgggagacggcggccccagcgacggcttgccgccgcagtccacgcgccgtgccggggcgccgccctcgtcgtctaccccgccgctggagtgcgacatcagccgcatgccggacttccctacccggagcaccggccaccggcgtgcgcactccgagatcctgggcctacccgacgacctcgacctcagtgctcccggaggcggcgaaggaccgtcgctgtcggacgagaacgatgaggagctcttctccatgttccttgacgtcgacaagctgaactcatcgtgcggggcgtcgtcggaggccgaggctgagtcctcctcggccgcgggtggcggcggtgagggggctgagctggccgacgcgcccaggccaaggcatcagcacagccagtccatggatgggtccatgtcgatcaaggcggaacagctggtgggtgcgccggggatggaggggatgtcatctgcagaggccaagaaagcagtgtctgcggcgaaactggctgagcttgctcttgttgacccaaagagggctaaaaggatttgggctaatagacaatctgctgcaagatcaaaggaaaggaagatgcaatatattggcgaactcgagctcaaggtgcaaaccctgcaaacagaagccacaacattgtcagctcagctagcattgctgcagagagacaccactgggctaacaaccgagaatagtgagctgaagattcgcctgcagaccatggaacaacaagtccacttacaagatgctttgaatgacaccctgaaaacagaggtccagcggctgaaggtggcaacaggacaggtgggcaatggtggtggagggatgatgctgaactttggggccatgccacgcctggtcggaggcaaccagcagatgttccacagcagccaagcgatgcaatccgtgctggcgacgcaccagctgcagcagctccagctccactcccagcctcagcagcagcaactgcactcgctgcagctccagcaggtggcgagagacctcaagatgaaagggcatctgggcggccaaggccagtggggcgatgggaagtctgggagtgggagcaggagcagcggcagctgagcctactggcaccgtggcacgggagttttggtgtatgtggtgagcaggaatggtgatcccttgttttgggggatgttgctgtgcaggtgtaattatcgttaactcagttgtctatctataggcccagttcagcttgagttttatggttaactcggcgatctttataggctcagctcacctgcaacgcacttcagttcagaaactcggatggtggcagatgtttgtctgttggatgttgtttgtatctcttttgctagtttaagggtaaaaatggttggcatttcagtgtttcagatgaagatctcccgtctcagccaggcgctaaaagttagcacggtactagtagggtattcgatttaggccttgttcgtttttgtcggattgcacctggaatcgttagaatcatgtcaccatcaaaaaactcacaatgcactacatcattgataatagtcatttctcaaaccaaacatctcataacatattttttttcatgcgccgctcacttaatttgatccttgtatcaacgagaacatcaccatgtttatgaattactgccatacaaaaaatacattacgcccatggccctaccgaagattaccatgatattttgcctaattctgtttcacctgaaaatatttcttaactactaatgaggtcataatgatggagaaggctggttatcaatcctagtggcaccacttatgcgtcatcagcttattgtaaatgaactgttgcgtcaaagcaaaattctttccctggttcaaatgctgcctcaagctcttcatagctctgctgaactttcatattcttcgatacagtcaggccctccttttgaacatactcagcaaccgtgctacttataattttcttgattgtttctttcttcacttttgatggcccgattaagtgtagagcaacttctttcggtatcttcagcaccacaaaagagtaattactaatcagtaagttagaacaacttctgcctatatgcaaatgagttcaactgatataaactgaaatggctacttttgagtgggaacttacgtctggagttttccctgaatatttaagatagcatcacgtggaagacaatgtcaacaaacttaaacagtattagttttcatatgccaaatttaaacaacatatagtataatatgcaagcaaccaaatttaatatcttatttacagcctaactggtatggcatattgaactcagtatcctttaagtacatctgaggtgaattcagaatttgcaggatgagagtacgaatcacatgcacagttttaggcaatttaaaa

SEQ ID NO: 214257 - DNA, 2352 bp, Zea Mays
ctcaattaaaaaccgcagaaaaggaatcaatccgaccatccataaaaaggacggcgacgcggtcaccactgcggcaccgccgccgccgccatcctcgacccctgaagtgaagaggcaacccgaggacgcctctcccatccacgcgcgaatcctaccgccctcccactcccaaaaacctagccgcgcgcgccacctgcatcccatggcggcaaccgcggccgtggcggggaccgggtcgtccctctcctcgcgccgcagtcgcagcgttgtctcctcgtccttccgcgcagctgcctcgcgcttccgctcgccgagatgcgtgctcgggagcgagcagctgcgggtggcgcatgaagggaagcggatgagcggcgccgagtccaggaccgcgtgggcgccaaaggtgcccgcaccggagtccaggcttgccgcactgccaagggagctgcgggactccaggatgaagatcttctccggcacggctaaccgtccgctcgctcaggaaattgctgcttacctgggtatagaactcggcaagatcctgatcaagcgctttgctgatggagaaatttatgtgcaactgcaagagagcgtgagaggatgtgatgtgttcttgatccagcccacatgctctcctgtcaacgaaaacctcatggagctcttcatcatgattgatgcatgccggcgggcttcagcacggtctattaccgttgttattccatactttggttatgccagagcagacagaaaggctcaagggcgtgaacccattactgccaaacttgctgcaaatttacttactgaagctggtagtgaccgtgtcattgtatgtgatattcattctacgcaagcgttggggtacttcgatattcctgtggatcatatatatggacagcctgtgattctggattacctggccagcaagacgatatctgaagatcttgtggttgtttctcctgatgtgggtggcgttgttagagcacgtgcattcgctaagaaattattgaatgcccgtttagctattgttgataaaagaagacagggtcacaacatgtcagaggtcatgaatttaattggcgacgtgaaaggaaaagtggctatcctgattgatgacatgattgatacagcagggacaatcactagcgcagcggctttgttaaagcaggagggagcagaagctgtatatgcttgttgtacacatgctgttttcaggttttctagttggctttatcgaatgtacttctggttttggtattttttatggtcacatcctatatgatgtggcttcatctctgagcactttctaatatttcgctgcaagaacattcacaacactgtacaaaaaagtacaccaggggtaatagtatctgttaacacctgtaggccatattaactttgctaatcttgggggcacccatattatcatcagcatcaatcctaacgatatgattgcttgaatcttatgcaatatgttttctacctcgtggtatcttattgtaggaaggtgcctgagaaatcttttcggcgtagtcacttgtctaaatttgactgctttcaataaatttgcctgtttgatgctcagtatgctactttatttcagaaagtagcaggacgctttatttggtttgaacaagttgctgcctttatattccgacatgcttattccttcagaggatttgtgtattaacatggttgacttttcagccctcccgcgattgaaaggctttctggaggcgtctttgaggaagttattgtgacaaactccatcctgctgccggaagacaaatgcttccctcagctgactgtgctttcgatggcgaaccttgtgggggagacaatttggcatgttcatcgcgatggctccgtcagcagcatcttccaatagcagaaacgagcgcgtagcatcgtcacctcgtcttgcgttcgtgtgcttggtatagagaaggcacccagtgcctgtgctgcttgcgtattttcgtagggagtcaattttggcggcaaggtataataaggttgtattgcccgatgtacggggtgataaataaggtggttattgccagtgtacgtgggataataaggttgtatgctggtgtaggtgttctgcaggctgcagcgtgttactaattaagtgcatctcttgtcctattatgtattgctgaggtagttgttgtcgagttgaagtttcagtgtctcagatacatggggatagtgatgtacccagcactcggtcactagtgaagtcctggtcattggaaatatgggagcaccaatttctgttttaaggtcggcattgtagctcaagctgttaatactcaaaattgcctgattgtctatgagcaccctgcaatattt

SEQ ID NO: 214258 - DNA, 1878 bp, Zea Mays
aattaaaaaccgcagaaaaggaatcaatccgaccatccataaaaaggacggcgacgcggtcaccactgcggcaccgccgccgccgccatcctcgacccctgaagtgaagaggcaacccgaggacgcctctcccatccacgcgcgaatcctaccgccctcccactcccaaaaacctagccgcgcgcgccacctgcatcccatggcggcaaccgcggccgtggcggggaccgggtcgtccctctcctcgcgccgcagtcgcagcgttgtctcctcgtccttccgcgcagctgcctcgcgcttccgctcgccgagatgcgtgctcgggagcgagcagctgcgggtggcgcatgaagggaagcggatgagcggcgccgagtccaggaccgcgtgggcgccaaaggtgcccgcaccggagtccaggcttgccgcactgccaagggagctgcgggactccaggatgaagatcttctccggcacggctaaccgtccgctcgctcaggaaattgctgcttacctgggtatagaactcggcaagatcctgatcaagcgctttgctgatggagaaatttatgtgcaactgcaagagagcgtgagaggatgtgatgtgttcttgatccagcccacatgctctcctgtcaacgaaaacctcatggagctcttcatcatgattgatgcatgccggcgggcttcagcacggtctattaccgttgttattccatactttggttatgccagagcagacagaaaggctcaagggcgtgaacccattactgccaaacttgctgcaaatttacttactgaagctggtagtgaccgtgtcattgtatgtgatattcattctacgcaagcgttggggtacttcgatattcctgtggatcatatatatggacagtgtcatccttggtgtctgtagcctgtgattctggattacctggccagcaagacgatatctgaagatcttgtggttgtttctcctgatgtgggtggcgttgttagagcacgtgcattcgctaagaaattattgaatgcccgtttagctattgttgataaaagaagacagggtcacaacatgtcagaggtcatgaatttaattggcgacgtgaaaggaaaagtggctatcctgattgatgacatgattgatacagcagggacaatcactagcgcagcggctttgttaaagcaggagggagcagaagctgtatatgcttgttgtacacatgctgttttcagccctcccgcgattgaaaggctttctggaggcgtctttgaggaagttattgtgacaaactccatcctgctgccggaagacaaatgcttccctcagctgactgtgctttcgatggcgaaccttgtgggggagacaatttggcatgttcatcgcgatggctccgtcagcagcatcttccaatagcagaaacgagcgcgtagcatcgtcacctcgtcttgcgttcgtgtgcttggtatagagaaggcacccagtgcctgtgctgcttgcgtattttcgtagggagtcaattttggcggcaaggtataataaggttgtattgcccgatgtacggggtgataaataaggtggttattgccagtgtacgtgggataataaggttgtatgctggtgtaggtgttctgcaggctgcagcgtgttactaattaagtgcatctcttgtcctattatgtattgctgaggtagttgttgtcgagttgaagtttcagtgtctcagatacatggggatagtgatgtacccagcactcggtcactagtgaagtcctggtcattggaaatatgggagcaccaatttctgttttaaggtcggcattgtagctcaagctgttaatactcaaaattgcctgattgtctatgagcaccctgcaatattt

SEQ ID NO: 214259 - DNA, 1549 bp, Zea Mays
cggcggcggcggaaaaacaggagcttctccatccttcccttcggttcatcagcagaagctgcttgctccgccgccgccctcttcctcctctactgcaccagcttgtactgctgtagttccagcaccaccacattctcctcctgctcctgttacctcagcaccagcttctcccctgcaccttctgcagcagctccagatactaaagatgaaccattgcaagataaaacagttgaagaaagtacagatgttgtgactggaaacatatctggttttcctgccagccaatttgatcatagtgcatgggcatacaagggtgccatggtcaggaatatgccagatgacccgtcccagtcacaacatctcgttcaagaagatttagttgatgtatttgacattttggatgacctgaagaatgaccctgtacagcgtgatttgttgaaagaagtcgagaaacacgatgtaaagaatgtttctacatttggttctactgaaaggagcatccccctgtcccaaggtttcacgatgccccggtacgttgtacctgatgacactgacattcagtacacacctcctcagccacgagcgacacgttctcaagctcaacctctgaaatcttcgctccgtaccaatgagactaggcagattaggaaaggccagaagaagctcaagaagtcgcctaagaaagtctcccaagatgttgagcttgatgacaatggtttccccatcatcgactttgctgctctagaccgttttgatcctcctccacatcttgccgtggatgttgagagttatggtggaccagctgcctcaggttgatatggtggactcgtgtcactattcagacctgaatggcgtcgcaaagtggctgcaaagcaggcagctttgaggatggtggcagaaattcttgagaagaggattgctcacccacagttgacatactttacatatgttgaaaagttccttcctgaggatgatccagaagatgtgattgctttggagtacaacctaattggcagtaagcagatttatgaagcatgtgcagatggcgaaatgagaagcaatgaccaagtgtactactacaccatctgcatagctaatgaagacaagctcttcaggaccgaagctgccgattacagaattttccttcctaccaatctgtcattcgcttgggtgatcacccaggccgtcgtcggtgcaagtcgccggagcaacgctgttaggcttgagcacgaacgcggcgtgaccgacaagctcggtgaggtggagcacgatgagcgagacgggacctcaacgcctccagtaggtcgatcagcggcgccgatgggcatgccgccggggagcgccagccctagcatcatgggcccgatcatgtacttgaacccgatctcgtccgtcaccagcgccgcgatgacgacgacaaaggaaccctccgacaacagtgaccccgtcggcgggcgcttgtacgcgatgtactgacccgccgcgcgcgccgcgcgcgaagcccacgaagagcacgaacgccacaaatgaggccaggatctgtgtcgtg

SEQ ID NO: 214260 - DNA, 1630 bp, Zea Mays
tctccatccttcccttcgttcgtgctcttcttcttgttattccgtttatcggtctggcgcagaaagaaacaagagatgagatctagtctgctaccggagtccccgtacgtacccagtgctccgcggcttcggcaggggtgctgctggctgcagacgctgatctgtatccaccggccaccgccgttcgtgtttctccatgtaaacggtggaggattttgtgtctgttggctgctgcttccaatgcgctccacgagagacgagaccctctctgccagttcccttgtgtttcaaaacatagctcgagttcaaattgcttatttagtttcttttttctcttcttacttattgacaacttgttcacagggttcatcagcagaagctgcttgctccgccgccgccctcttcctcctctactgttgcaagataaaacagttgaagaaagtacagatgttgtgactggaaacatatctggttttcctgccagccaatttgatcatagtgcatgggcatacaagggtgccatggtcaggaatatgccagatgacccgtcccagtcacaacatctcgttcaagaagatttagttgatgtatttgacattttggatgacctgaagaatgaccctgtacagcgtgatttgttgaaagaagtcgagaaacacgatgtaaagaatgtttctacatttggttctactgaaaggagcatccccctgtcccaaggtttcacgatgccccggtacgttgtacctgatgacactgacattcagtacacacctcctcagccacgagcgacacgttctcaagctcaacctctgaaatcttcgctccgtaccaatgagactaggcagattaggaaaggccagaagaagctcaagaagtcgcctaagaaagtctcccaagatgttgagcttgatgacaatggtttccccatcatcgactttgctgctctagaccgttttgatcctcctccacatcttgccgtggatgttgagagttatggtggaccagctgcctcaggttgatatggtggactcgtgtcactattcagacctgaatggcgtcgcaaagtggctgcaaagcaggcagctttgaggatggtggcagaaattcttgagaagaggattgctcacccacagttgacatactttacatatgttgaaaagttccttcctgaggatgatccagaagatgtgattgctttggagtacaacctaattggcagtaagcagatttatgaagcatgtgcagatggcgaaatgagaagcaatgaccaagtgtactactacaccatctgcatagctaatgaagacaagctcttcaggaccgaagctgccgattacagaattttccttcctaccaatctgtcaggagcagaggagcagttgagtccgcgtggagatcgacatcaaatggaggcattcgtcgtctgcccctttagcacccaacgtttctattttgattctcggtgtcaaccacacacactggccgtattttatattccatccaggtttgtggctgttttcagttacacagtccatccacaagtaattttgctcaaacggttgactgattgccaacaattaagggctaatctcttgaatatatatctacctttattttcaatcgattgatg

SEQ ID NO: 214261 - DNA, 1708 bp, Zea Mays
gtttctggaggctattcattttccttcgttcaccaccatacccaacctcttcttctcgatccttctacctctctcacattcggtgctcaggatgccagccctagggctcgccaacttcatctccctgctccagccgctccctccagactgctcaaccgcttgctggattgcgcaaaggtgtcaaaagagctgctgataaatacaagatgtcagctcaaaaggctaatgtctcaccagcccctaagcagtcctgtcccgcgcagcattcagcacctccttctccagttcaagttttagcttcagcagcaccagcgtcagcaacagcatcatcagcagcagtgcagcaccagcttctccagttcctgcacacacagcatcagattctccagaagcaccagtttctgtttgtccttctgttttttctctcccagcaccagcttgtactgctgtagttccagcaccaccacattctcctcctgctcctgttacctcagcaccagcttctcccctgcaccttctgcagcagctccagatactaaagatgaaccattgcaagataaaacagttgaagaaagtacagatgttgtgactggaaacatatctggttttcctgccagccaatttgatcatagtgcatgggcatacaagggtgccatggtcaggaatatgccagatgacccgtcccagtcacaacatctcgttcaagaagatttagttgatgtatttgacattttggatgacctgaagaatgaccctgtacagcgtgatttgttgaaagaagtcgagaaacacgatgtaaagaatgtttctacatttggttctactgaaaggagcatccccctgtcccaaggtttcacgatgccccggttgtacctgatgacactgacattcagtacacacctcctcagccacgagcgacacgttctcaagctcaacctctgaaatcttcgctccgtaccaatgagactaggcagattaggaaaggccagaagaagctcaagaagtcgcctaagaaagtctcccaagatgttgagcttgatgacaatggtttccccatcatcgactttgctgctctagaccgttttgatcctcctccacatcttgccgtggatgttgagagttatggtggaccagctgcctcagtggctgcaaagcaggcagctttgaggatggtggcagaaattcttgagaagaggattgctcacccacagttgacatactttacatatgttgaaaagttccttcctgaggatgatccagaagatgtgattgctttggagtacaacctaattggcagtaagcagatttatgaagcatgtgcagatggcgaaatgagaagcaatgaccaagtgtactactacaccatctgcatagctaatgaagacaagctcttcaggaccgaagctgccgattacagaattttccttcctaccaatctgtcaggagcagaggagcagttgagtccgcgtggagatcgacatcaaatggaggcattcgtcgtctgcccctttagcacccaacgtttctattttgattctcggtgtcaaccacacacactggccgtattttatattccatccaggtttgtggctgttttcagttacacagtccatccacaagtaattttgctcaaacggttgactgattgccaacaattaagggctaatctcttgaatatatatctacctttattttcaatcgattgatg

SEQ ID NO: 214262 - DNA, 2670 bp, Zea Mays
gcgcacccgccgccaccccgcgcccgccccaccgcgcgtcggctcgcgcgccgccacccagtgcggccccgccgccccaccgttaaggcaggttatgcggccgacaagggggcggcgtccgggaacccatagagtcacgtcgtgctggggaggcataggattcggatccggccgtggccgcacccggacctcgtcgaggtgatgcgggcgcaccggatcatggagtgcgtgcaggaggaacagcgccgctggtacggtgtcaaggagccgaggcaggtgctcgctgtcaccccgacctactcacgcgcgttccaggcgctccacctcatcggcctcctccactcactccgtcgaaatccttgcgcatactggcacggtagaccaactacggctcagcgaggaggacaagcagaatatgcctcttccagtccatggccctgcttgcaactcctcagggcatctgattggatggcacacgttcaactcattgcccttctctgggaagacggccacagttgttggtgaagcaacccctgttctgcctagggatttggagtgggctggttttgtgttgaactcgaggatgctgtggaaggaggctgacagcaagcctgactgggtgaaggatcttgatgctgtgggtgagaactttgaggagcgctggttaaaggcatcaaagcgcagtgccgctaagaaactgtcaaaattgtcgaggtcgcataatgagtcgttgttgtggatcaagaagatacctgatattattgctattgacgacgagatctattcaaatgatgatgatccagagagatgggacatgcagattttccgatcaattgattcgaattctgtcaagggttttccaaaagatccacgggaggccactagtaagaatcttgtttttgggaaaaatgtactgattgatatgagcgtgcatacagcatatgtgaatgtcatccgaggtgctcaacatttcatctatattgagaaccagtacttccttggctcttcatttaactgggattcacatagagatgttgaaaatgacaatgcaaatgatgtatgagataatctataaggccttgaaagaagtaggactagatggtacatatgagccacaggattacctgaatttcttctgccttggtaaccgtgaagctgaggacactacttgcacatctagtggaccattctcagccagtaacccacaggttagactgcagactattgttctgttttctgctgctgattccggtacactttagaaatgcccaaaactgaaggaggtactgatttccccaaaaaaatacaattatgctgcaacttggatatccaatcaggaccaagctcggaagaataggagattcatggtgtatgtgcactcgaaaggcatgattgtggatgatgaatatgtgataattggatccgctaacatcaaccagagatccatggaaggaactagagatacagagattgcaatggctgcataccaaccccagcatacatgggcaaatatgctttctgctcctcgtggacagattttcgggtacaggaaaatacagtgtacgtgttgaaactgttatcctgccccaggttgggatggacggcggtacatacgtgttggtagaactgtgagaagaaaagatgggaaaatttgctttcttggctgcgatggttatctgctcaaacaagatatgcaaattgcaaaactcttaaaggatagtattagttctatttgttcatacagttctacagctagttgtttcttgctttgttcatggattgcaatactggataagatcatgatggatgtcgtgtgtgttttaatcaccatttctaaaatttattctattggtaagacgattctaagatataggtcggagttggattccttgcatatacataaacagataaagaagcaaccggtttataacaaaaatatgtcttctgttttgcctgttgcccaattctcttttagtgtagcctacttacaataattaaaagaagagttggtgtctgtttgagtagacagctaagtgcatatataagtacgtgcatgattttgattactaattgtgattttgatgatctttcttttgaagacggtctaacatataagcgcatgatttagatgaacggaattactattgtgccatttctgaagaatcttactattttctcttgccttcttagaacaacatgggaagaagtgatgatgacagtccatcgccgccaagaggtcacatgagaagaactcgcagcccaagtccttgtggtagttatggaggccatggcaagcgccccacaactaatcttatggtgacgaatcttggtccagattgtaggagttatcaccttcgtgaaccattttggtttattttgtaggattccgactctcatcaagtgactcctcccctcacgatgactttgcggacagatgtctcaattatagtggtggagctacgaacaacaatccgatgtcctgatcgagagcgatggagctaatgtttgaacttgtgtgtttgaacttgtgaactaaaaatgtgaactatggatgtgaacttatgtgaatttgtgaacttatgtatttgaacttatgtgaatttgtgaacttatgtatttggacttgtgtgaatttgtgatatgaatatatatccatgtgtttgaaatctg

SEQ ID NO: 214263 - DNA, 980 bp, Zea Mays
acttatcttccttatcctatctccatcgccccatttcctatcctcccagccgatcccctctccctcacggcgccctctcccatggccgtcggccctccccgccatggacgccgctcttccttcctatagtacatcagcgacctcgtctccctcccttcccgtggactcctgctgcaggagctgttcctctactgcgctcgcctaagatggccggactcgcccatgatggctttcccctgtcgatgctgttctctagccgccatggcagtgcctccctgtatcagtccggtgaccgggccctccccttcccacgtcatgctggtgccatgtcttctccctcaccggccaacctcgccagccaccaggaaggtgtctccctctcggcagctcccatggccaccatcagccctagctgtgcttgccctggttccagcagctcgacgccagcccctctcaatcttccatcgctgccgctcagcttgtcccagatatattgatgttgacaattggaaatccatgtagcaaataaatgattttggaactgggggcaggtcagagtctagagcatgctcattccacacattggaggtggattttcctcaattggagatattgacaaattggaaaaaaatgtgacttgacctgtgctgcaacaaccttaaactaggaggggcttctaattcttcatctctaccaacagtcctctcctgttactttttaaaccaataactttttcaagtttgtgcagatgcacacatccttgagccaaaatagaaaaaaatcatagaagagttctttggctgtcacgtgattcaagagtattaatgatatacaaaagtttgctttatggcaagtcaggtaaccacaaattttgggcaatgatagggatgtgcagtggtggtctcttaaaagaattttgtgttccagcgtagctatttccactgcaaactatcaaatcattacaaactactgggaacatg

SEQ ID NO: 214264 - DNA, 1628 bp, Zea Mays
aagttgagcccgtgagaagccaaatcgcgaacccacccgggccaggggcaaacctcgtgctcccctccacttgccgaggaggccgatgccgccgcgatggaggaggccgcggcggtcgcgaagaggtggcccgggtggcccggggacagcgtgttccggctggtggtgccagtgctcaaggtcggaagcataatcgggcggaagggcgagctcattaagcgcctcgtcgaggagaccaaggccagggtccgcatcctcgagggacctgtcggcgccaccgagcgtatcgttttggtttctggaaaagaagatccagacttggagctacctccagccatggatgctctcatgagagtttttaagcgtgtcactgggataacagatggagctgctgagggcactcaggccgctgctactcctgatgtatgtgctgcccgattgttggttcctggagctcaggcaattaatctaattgggaagcaaggtgcaactatcaaagcaatccaggagagcacgagtgcaacaatacgggtaatatcagtagatgaacatgaacgaccattctatgtaactgacgatgaaaggatagttgagatacaaggcgatacagagaaagttctaaaagcactgcaagcagtttcaaatcatcttcggaagtttttggttgatcatagtgtacttccattatttgaaaagactaatactacagtgagccaagatcgcaatggtgatggttggagcgatatgtcacgtccttcaattggttctgcacaagtgaatcaactaccttcagtgttagatgactatattcttcaagtgaagagggatcctctgtaccttgaacgagaatctttggtagatcataacattcatcgctcaggcgtatcactttatgggcgtgatccagccttgtcaacactacgaccctctgcagtacatggtgctggctcactacttacacagataacccaaaccatgcaaatcccacttacctatgctgaagacattataggagttaaaggagcaaatattgcgtacatacgagctaatagtggggctgttgttacaattcaggagagtttgggtagtcctgatgatattactgttgaaataaaggggacatcttcacaggtgcaagctgcacagcagctcatccaggactcgttggctgcacaccgagaacctgtcaggagcagttatgtgggggcaggattagattcagtatataggtccagctactcacaatatggcagctcaatctatccctcgtcatcactgccgtcttattctagcatcgatgatgttagtagatacccgtcttcaggccttggtggctatggttcgagttaccggtactaatagcagtttgtcctcgggcttgaatgcttgatggcaccagtgatcattgtatcccagtacccagacttcagggtctgctttgttttgacaaacaattaattggttttatagattttcgccactcatggattcagaaattgtacatgtttgctggtgccttttttttttccttagcgctacaatttaggagctgtttggttggtctttttcagaccaccaatgatttccggcgtggatgtggatgtatgtatagtgctattttttgtttg

SEQ ID NO: 214265 - DNA, 1571 bp, Zea Mays
tcttccaaaaatcaagcaaagaaaatattcgcagtgttgcgcacttcgcgtctcgataaagccgaccgcccgacccccaactgttccgtcaaagcagagtctgcccctccccgcgccgttctttttggttccccactccccagtccccgccgccgccgaaacccgcagatggaggtcgtcgtcgccgcgaagcagaaggcgaagaaacacatacacctcttctactgctcagaatgcgaggagctcgccctcaagatcgccgccagctccgacgccatcgagctccaatccatcaactggcggagcttcgacgacgggttcccgaacctgttcatcaacaaggcgcacgacatccgtgggcagcacgtggcgttcctggcctccttcagctcgccgtcggtcatattcgagcagatctccgtcatcttcgcgctgcccaagctattcattgcctcattcactctcgtgctgcctttcttccccacgggctcattcgagcgcgttgaggaggagggcgatgtcgccaccgcgttcaccctcgcgcgcattctctcgatgatccccaagtcgcgcggcgggcctaccagcgtcgtcatctacgacatccacgcgctccaggagaggttctacttcggggacgacgtcctgccatgcttcgagacagggatcccgctcctgctgcagcgcctccgccagctcccggacgcagaaaatatcaccattgcctttccagatgacggtgcgtggaagcggttccacaagctgttacagcactttccaatgatagtctgtaacaaggttcgggaaggtgacaagagaatagttcgtataaaggaaggactacctgaaggccgtcatgttgttattgttgatgatttagtgcaatctgggggaactcttagagaatgccagaaagttctagctttgcatggcgctgcaaaagtcagtgcttatgtgactcatgctgtgtttcctaagcagtcatatgaacgtttcatggcgtctagttctgctggggccaggtgacagatttgcttacttctggatcacggactcatgcccacacacagtaaaagctattgggcaaagacctccatttgaggttctgagcctcgctggctcaattgcagatgctcttcagatatgagcgtacactggtggaatgctcccgcttttcctaaatgtaagagttggtttccagttcctggaaaagcaaataatgtgtagtaagttaagtacctgaaggttccataaacagccctgtggtttgtaataaaatcaggcattggatactcaattgttgacagctgtgtatttgtcaatgttcacttctgtttgaagtgcgcgagaccagtgctttactttcctgacccgtcggagtatcggtttagcaacttcaggtactgggctttgttgtgaacaaatagtgcaatgtaactgaacatgaacctaattgaatttctattagattggatggtcatattgcaaccatgacatgttggcctccttgaattttactgttacatggatgcatcgagcaaattggtttgtgttgatacttgatagcctgc

SEQ ID NO: 214266 - DNA, 1561 bp, Zea Mays
tcttccaaaaatcaagcaaagaaaatattcgcagtgttgcgcacttcgcgtctcgataaagccgaccgcccgacccccaactgttccgtcaaagcagagtctgcccctccccgcgccgttctttttggttccccactccccagtccccgccgccgccgaaacccgcagatggaggtcgtcgtcgccgcgaagcagaaggcgaagaaacacatacacctcttctactgctcagaatgcgaggagctcgccctcaagatcgccgccagctccgacgccatcgagctccaatccatcaactggcggagcttcgacgacgggttcccgaacctgttcatcaacaaggcgcacgacatccgtgggcagcacgtggcgttcctggcctccttcagctcgccgtcggtcatattcgagcagatctccgtcatcttcgcgctgcccaagctattcattgcctcattcactctcgtgctgcctttcttccccacgggctcattcgagcgcgttgaggaggagggcgatgtcgccaccgcgttcaccctcgcgcgcattctctcgatgatccccaagtcgcgcggcgggcctaccagcgtcgtcatctacgacatccacgcgctccaggagaggttctacttcggggacgacgtcctgccatgcttcgagacagggatcccgctcctgctgcagcgcctccgccagctcccggacgcagaaaatatcaccattgcctttccagatgacggtgcgtggaagcggttccacaagctgttacagcactttccaatgatagtctgtaacaaggttcgggaaggtgacaagagaatagttcgtataaaggaaggactacctgaaggccgtcatgttgttattgttgatgatttagtgcaatctgggggaactcttagagaatgccagaaagttctagctttgcatggcgctgcaaaagtcagtgcttatgtgactcatgctgtgtttcctaagcagtcatatgaacgtttcatggcgtctagttctggtgacagatttgcttacttctggatcacggactcatgcccacacacagtaaaagctattgggcaaagacctccatttgaggttctgagcctcgctggctcaattgcagatgctcttcagatatgagcgtacactggtggaatgctcccgcttttcctaaatgtaagagttggtttccagttcctggaaaagcaaataatgtgtagtaagttaagtacctgaaggttccataaacagccctgtggtttgtaataaaatcaggcattggatactcaattgttgacagctgtgtatttgtcaatgttcacttctgtttgaagtgcgcgagaccagtgctttactttcctgacccgtcggagtatcggtttagcaacttcaggtactgggctttgttgtgaacaaatagtgcaatgtaactgaacatgaacctaattgaatttctattagattggatggtcatattgcaaccatgacatgttggcctccttgaattttactgttacatggatgcatcgagcaaattggtttgtgttgatacttgatagcctgc

SEQ ID NO: 214267 - DNA, 3087 bp, Zea Mays
tccttttttatgataccagaaggagaatgatgagaaagacaggagtgctgtaataaagatttttcaagatatgctggaggttgtaacaagagatatatttgacgaccaccttagtattttagagtcaagtcatggaggctcatatcaaaagcatgatggcacaaccacgtgggataaagagtatcagttgtttcaaccatctggagctatcaagtttcctctacaagtcacgaccacagatgcttggctagaaaagataaaaaggctggaactgctacttacggtgaaggaatctgctatggatgttccttcaaacctagaagccagaaggcgtcttacattttttaccaactccttatttatggatatgcctgatgcacccaaagtccgaaacatgctctcgttttccgcattgaccccttattacaatgaaccagttcttttctctataaaagaacttgaggaagaaaatgaagatggagtttccaccctattctacctgcaaaaaatttatccagatgaatggaaaaactttaaggaaagggttggattggaggaagaacttaaagagagcgaagaaagcgaagaactaaaggaggaacttcgtctatgggcctcatacagaggccaaacactagctcgaacagatctcatggaaggatacaaagcagccgagtcagtaaatgatgaacaatggaagatacaccagaggtccttatttgctcaatgtgaagcagtggctgatatgaaattcacctatgttgtttcatgccagcagtatggaaatgataagcgtgctgcacttgctaatgcccaagacatattgcagctaatgaggaacatattattctactttggttaaggttgctctaactaaggattctgaatctgcagaccccactcaaaatcttgatcaggttatctatcggataaaacttccaggccctgcaattctgggagaaggaaagcccgaaaaccaaaaccatgcaataattttcacccgtggtgaaggtttgcagaccatagatatgaaccaggacaactatttggaagaatcccttaaaatgagaaacctgctccaagagttccttacggagcatggagtgcggcgtccatctatacttggagttagagagcacatttttactggcagtgtatcctcccttgcatggttcatgtcaaatcaggagcacagttttgtgactattgggcagcgtctccttgcaaaccctctgaaggtccggttccactatgggcatcctgatgtatttgatagacttttccatctgacaacgggtggtgtcagtaaggcatcaaagagtatcaatttaagtgaagacatttttgcaggttataactcaactcttcgtggaggcaatgtaacacaccatgaatatgtacaagttggtaagggaagagacgtcggattaaatcagatctctaagtttgaggctaaaatagcaaatggaaatggtgaacagactcttagtcgtgatatctaccggcttggacaccgctttgattttttcaggatgctttcatgctacttcacaaccgtggggttttatttcagtacactgttgacggttgttacagtttatgtatttctgtatggacgcctttatcttgctctcagtggacttgaagaggggctatcgcagggaagattgattcataatcatccccttcaaattgctcttgcctcacaatctcttgttcaacttggttttctgatggctcttccaatgatgatggaaattggtcttgaaagaggatttggtcaggcactaagtgatctaatcatgatgaacttgcaattggctactgtctttttcacattttcccttggcactaagactcactactatggaagaatgttgcttcatggaggtgctcagtacagaggtactggcaggggatttgtcgtctttcatgctaagtttgcagagaattatagactctattctcgcagccactttgttaaagggattgagctgatgattctgctcattgtataccaactatttggtcaatcttatcgctcaacaattgcctatatttttattaccttctctatgtggcttctggtattgacatggctatttgcaccctttctgttcaacccctcgggatttgagtgggcaaaaattgttgatgattggtctgattggaacaagtggatcagcaatcgtggtgggattggtgtgtcaccagacaagagctgggaatcttggtgggaagtggagcaggatcatctaaaatattcaggaacaataggacgctttgttgagataatcttggctatacgttttttcatataccagtatggccttgtttaccacttacatgtcacacataacaaaagcatcttggtatatttaatttcttggctcgtaattgtggcggttctgctcgttatgaagactgtgtcggtgggaaggcggacattcagtgcagatttccagctattcttccgtctgatcaagtttttgatatttgttgctttcattgctattttgattgtcttgatagtattacttcatatgacctttcgcgatatatttgtgtgctttctagcattcttgcccacaggatgggggatacttctgattgcacaagcttgcaagcctcttgctcgacatgtaggattatggggatctgttcgtgcccttgcacgggcctatgagataattatgggggtgcttctctttagtccagttgctatattggcatggttcccctttgtgtccgagttccaaacgcggatgctgtttaatcaagcgttcagtagaggactgcaaatttctcgaattcttggtggtcaaaagaaggaacgctccgctcgtaacaaagattgattagtcttctttcatgtgtgttccaatatgcacttgtaaatatttgttactgtctcacggggtatagtgtgtttttatgattacaatatgtaaatatcagatcaaggtgtcataattgtattcgttagattactgtgtgtgtttctattgtaatagtctttgatccagcacatgtacttttactacatatatacgcaaagtctactctaatcagggtttccaacatgat

SEQ ID NO: 214268 - DNA, 3143 bp, Zea Mays
tccttttttatgataccagaaggagaatgatgagaaagacaggagtgctgtaataaagatttttcaagatatgctggaggttgtaacaagagatatatttgacgaccaccttagtattttagagtcaagtcatggaggctcatatcaaaagcatgatggcacaaccacgtgggataaagagtatcagttgtttcaaccatctggagctatcaagtttcctctacaagtcacgaccacagatgcttggctagaaaagataaaaaggctggaactgctacttacggtgaaggaatctgctatggatgttccttcaaacctagaagccagaaggcgtcttacattttttaccaactccttatttatggatatgcctgatgcacccaaagtccgaaacatgctctcgttttccgcattgaccccttattacaatgaaccagttcttttctctataaaagaacttgaggaagaaaatgaagatggagtttccaccctattctacctgcaaaaaatttatccagatgaatggaaaaactttaaggaaagggttggattggaggaagaacttaaagagagcgaagaaagcgaagaactaaaggaggaacttcgtctatgggcctcatacagaggccaaacactagctcgaacagttagaggcatgatgtactacaagaaagctttgaatcttgaagcatttctagacatggccaaacgtgaagatctcatggaaggatacaaagcagccgagtcagtaaatgatgaacaatggaagatacaccagaggtccttatttgctcaatgtgaagcagtggctgatatgaaattcacctatgttgtttcatgccagcagtatggaaatgataagcgtgctgcacttgctaatgcccaagacatattgcagctaatgaggaactacccttctctccgtgtagcatatattgatgaggtggaagatagagtaggagacaagaaaatggagacagcatattattctactttggttaaggttgctctaactaaggattctgaatctgcagaccccactcaaaatcttgatcaggttatctatcggataaaacttccaggccctgcaattctgggagaaggaaagcccgaaaaccaaaaccatgcaataattttcacccgtggtgaaggtttgcagaccatagatatgaaccaggacaactatttggaagaatcccttaaaatgagaaacctgctccaagagttccttacggagcatggagtgcggcgtccatctatacttggagttagagagcacatttttactggcagggtccggttccactatgggcatcctgatgtatttgatagacttttccatctgacaacgggtggtgtcagtaaggcatcaaagagtatcaatttaagtgaagacatttttgcaggttataactcaactcttcgtggaggcaatgtaacacaccatgaatatgtacaagttggtaagggaagagacgtcggattaaatcagatctctaagtttgaggctaaaatagcaaatggaaatggtgaacagactcttagtcgtgatatctaccggcttggacaccgctttgattttttcaggatgctttcatgctacttcacaaccgtggggttttatttcagtacactgttgacggttgttacagtttatgtatttctgtatggacgcctttatcttgctctcagtggacttgaagaggggctatcgcagggaagattgattcataatcatccccttcaaattgctcttgcctcacaatctcttgttcaacttggttttctgatggctcttccaatgatgatggaaattggtcttgaaagaggatttggtcaggcactaagtgatctaatcatgatgaacttgcaattggctactgtctttttcacattttcccttggcactaagactcactactatggaagaatgttgcttcatggaggtgctcagtacagaggtactggcaggggatttgtcgtctttcatgctaagtttgcagagaattatagactctattctcgcagccactttgttaaagggattgagctgatgattctgctcattgtataccaactatttggtcaatcttatcgctcaacaattgcctatatttttattaccttctctatgtggcttctggtattgacatggctatttgcaccctttctgttcaacccctcgggatttgagtgggcaaaaattgttgatgattggtctgattggaacaagtggatcagcaatcgtggtgggattggtgtgtcaccagacaagagctgggaatcttggtgggaagtggagcaggatcatctaaaatattcaggaacaataggacgctttgttgagataatcttggctatacgttttttcatataccagtatggccttgtttaccacttacatgtcacacataacaaaagcatcttggtatatttaatttcttggctcgtaattgtggcggttctgctcgttatgaagactgtgtcggtgggaaggcggacattcagtgcagatttccagctattcttccgtctgatcaagtttttgatatttgttgctttcattgctattttgattgtcttgatagtattacttcatatgacctttcgcgatatatttgtgtgctttctagcattcttgcccacaggatgggggatacttctgattgcacaagcttgcaagcctcttgctcgacatgtaggattatggggatctgttcgtgcccttgcacgggcctatgagataattatgggggtgcttctctttagtccagttgctatattggcatggttcccctttgtgtccgagttccaaacgcggatgctgtttaatcaagcgttcagtagaggactgcaaatttctcgaattcttggtggtcaaaagaaggaacgctccgctcgtaacaaagattgattagtcttctttcatgtgtgttccaatatgcacttgtaaatatttgttactgtctcacggggtatagtgtgtttttatgattacaatatgtaaatatcagatcaaggtgtcataattgtattcgttagattactgtgtgtgtttctattgtaatagtctttgatccagcacatgtacttttactacatatatacgcaaagtctactctaatcagggtttccaacatgat

SEQ ID NO: 214269 - DNA, 923 bp, Zea Mays
aaccatcaaggaactactggtttaagaattgcctacaacagagtgatgagactcctatggtttgggagatccttctctacatgtatgtcctctattcaccggactggcactacaggagcacaatgccaactttcctgttcctgtatggtgctgcctttgccgtagtacatttctttgcccggttccaagtcgtattcaagctgcattacgttggcctctgcttgctctgcatcccccggatgtacaagtactacatacagacgaaagacgtgggtgcgaagcggctcgcaaaactgtgggtccttacactgacccttgggaccctctgctggctggttgatcgcgtcttctgcaagaagctttcgcattggtacgtcaacccgcaggggcacgcgtggtggcacgtgcttatgggcctcaactcgtactatgcaaacacgttcctgatgttctgccgggctcagcagcgcgggtgggagccgcggatcacgcacctccttggattcttgccgtatgtcaaggtccagaaaccagagaagagggaatgatttctgtctctgcttgaaaactgatgatattcagtcggccaccagtaagctaatgcccccaatgtgtgctcagacaagtccgtggcactcttgtatatgggcgcccaaatgattacggacttcaaatgttctgatgtcgcattagattttgtatcatacttaaatcatcgaacagagattgtcctagttttggccacctttcttttggtttcttcgcaattaccgtttggtggtaaattaggactgagttatttatttatttgtttgtcgttgaatggagtccagttgtactagttaccactgcacaagaagatacattcatccacatgatgacatgttaattatttggcttgtgttgctgccaatagacaactc

SEQ ID NO: 214270 - DNA, 4118 bp, Zea Mays
tggctcatctctctccccgcgtgtccgtccgggtttccgcctgtgcgttgcctgctgcctctgatccactgatcagtggcctcgcctccccgtgttccgctcccccctcccgccccctgatcccgcgatcggcggggcgcccgccctctctctctccgtgagtgtagcagatccggcgacccgcaggccctccgccggccgccccgccggacgatctagatccaggggaagcatctgctatcattttgttttcttcgaagtaatccaagaaaagttgcttccagatgtcaactgcaaaagtgttagatcctgcttttcaaggggctggccaaaaagttgggacagaaatatggcggattgaagattttaagccagttccgctgccaaaatctgattatggtaaattctactgtggagattcatacatagttctgcagacgacctgtactaaaggtggtgcctatctatatgatatccacttctggattgggaaagattcgagtcaagatgaagctgggactgcagcaatcaagacagttgaacttgatgccatccttgggggtcgtgcaatccaacatagggaactccaaggttatgaatctgacaaattcttgtcatacttcaagccttgcattatacctttggagggtggtttcgcctctgggttcaaaaagcctgaagaggagaagtttgaaacacggttgtatatttgcagagggaagagagctattcgggttaaagaggttcccttcgcccggtcatcattaaaccatgatgatgtgtttgtcttagatgctgaaaataagatataccagtttaatggtgctaactccaatatccaagaaagggccaaagcgttggaagtaatccaacatttaaaggagaagtaccatgggggtgtttgcgatgttgcgatcgttgatgatgggaaattacaggcagagtcagactctggtgaattctgggtcctttttggaggttttgcaccaattgggaaaaaaaccgtgagtgatgatgatgttgtacttgaaactacagcaccaaggctgtacagcatcaatgatggccaattgaagctggaagaaacagctcttacaaaagccgtgcttgaaaataccaaatgtttcttacttgactgtggggctgaaatatatgtatgggttggccgggtaacacaaatggaggatagaaaatctgccactaaagcagttgaggaatttcttattaatcaaaagcgtccaaagacaacgagggtaactcaagtgattcaaggttatgagagtcatgctttcaagtccaagtttgaatcatggccagtgggtaatgctactgggagccctggcgcagaggaagggcggggaaaagttgcagctttattgaagcaacaaggtgttgatctcaaaggagctgcaaaaagcaccactccagtaaatgaggaagttcctcctttgcttgaaggcggtggaaagcttgaggtatggtgtgttgatggcaacgctaagactgctctgccaaaagaggatattggaaagttttacagtggagactgttatatcattctctatacgtatcattcgggcgacaagaaagaagaatactatctcagctactggattgggaaggatagcttggtggacgatcaagtgtcggcatctcaaataactaatacagtgtggaattcattgaaaggacggccagttctgggtcgtatataccaagggaaggagccaccacagtttgttgcacttttccagcccatgattatcttgaagggtggaattggatctggatacaagaagctcatagaagaaaagggtgcgacgggtgagacttatactactgaaggcatagctctaattcgagtatctgggacatctatccacaacaacaagactcttcaagtcgatacggtggcaacatctttaagctcaatggagtgtttcatactgcaatctggaaatgctatgtttacatggtttggcaattctagcacatatgagcaacagcagtgggcagcaaaagttgctgaatttttgaagcctggcgttgcagtgaagcactgcaaggaggggacagagagttcaggtttctggtttgctcttggaggaaaacagagttatacaaataaaaatgctcctcaggatattattactagagagcctcacttgtatgcattctcattcaagaacgggcttattcaggtaactgagatcttcaacttttcccaagatgatttgttaactgaagacatgatgatacttgacacacatggtgaggttttcatttggattggtcagtgcgtggaatcaaaagagaaacagaaggcatttgatattggccagaaatacgtggagcatgcaaattctattgatgatctttctccatatgcaccactatataaagttatggaagggaatgagccatgcttcttcaagacatatttctcttgggataacacaaaatctttggttcatggaaattccttccagaagaaactctcactgctttttggattgcgttctgagggtgcatctaggagctctggtaatggtggaccaactcaaagggcatctgcattagcagctctatcatctgcattcaatccatcgtctcaacaaaggctctctaatgagaggcctaaaagcacaggcgatggacccactcaacgcgcctcagcactggctgccctatctaatgcattcaattcatccttaaaacccaaaacaccacctccatctcgctcaggtcaaggttcccaaagagcagctgccgtagctgcactatcctctgtgctgactgctgagcaatctggatcttcagaaaatctacgagccaaagctagcagcacaggagataagactggtagagatgggccttccttttcattttatcattcgttaaaatatattgccaattgtacttttgattggggggggggggggttcttattttctttgaattttcgaatttgtatccttctccagtttgtcattatttatgcattttgagttctctgatctgtattcctcgtttcttcggaatgttttctttatgtagtcttcaccttttttccctttgcaaatgtagccctggaagattagaatcatgtttatttgattttgttggtacacctttgccttttttatagtcatgactaatgtgatgcacataggtgaaggccactaccactttgctggcctatttttcacttcaaagtttgataccttcgatcaatgcagatgtcgataggcctgtcataactccagctggaccatctggtccatcttctcctcagtctgaagctggggagtccaatgtgtttcgccaggaaaaagatgctgcagtagatggggcaccatctgacactgatggagcagtggctgagacccgagaggaagaaacgacagagaatgttggtgaagcgacatttagctatgaccgcttgatatctaaatctaccgatccagtccgtgggatagattacaaacgcagagaggcatacttatctgatagtgagttccaaagtgtttttggcatgaccaaggatgcattctaccgacagccaaattggaagcaagaactacagaagcgaaaagcagatctcttctaaagagaacacgccttgtctcaagcgcctgctagaaaatgcgaccctctcgtcgtgaatggtcggtcccatgagagtaagtctcaatatattgctggttatttctgaggacgggctactggtggctttgctcggttgttttttttttgcaaccaattttataggccgattcttttatttgtacatggcctgggttgtgctgcttgcgaggtcctaagatgctcatagctttgtgttgtgactgtccatatgtgtatatcgttttttttcatcagtttgttacgtatgggcatatcctggtaggttgtcaattgtattgtcattcagatgtattgcacacgaaatacttgtgctgtctgtttgttgttgatggttggcagttgttttgtttgggatttgaaacacttgattggatttctctgcccgcacaagttttcgtgtggctttgcattcccccctcccttttcatagacaagcaacatgcaatgcttgtgacctgtcaagagaacat

SEQ ID NO: 214271 - DNA, 788 bp, Zea Mays
cttatgctaaattctctaggctataatggctgaaggaaaacaacacgccctggcaattggatatacaaagatgtcagcaaaagacataaggaccatcaacaaaggaattggtgttgacaatatgcactatctaaatgatggcctatggaagatggaacggctcgaatgagtagaattctctgaggggttcataacttgcggcagatcgtattgatggacatatgaaaccagcaggaccctatttgcacagctggtatcgttttaaagatgaagtactaagaagctttatttacctgaggcaacttgagcttactccgaccctttggtgtggagtgcatgtcagaaacaggattatgaatgctgtgttcagtgcttttcacaaattgttgtattttcaccagaacaatttgccctcaattggaagtgaggaaatccataacgatctataagttatttgatcttacagtttgttgtgtgtaacttatctaattggtaggattgcggatcctactagggatctccctaggctaaggatgaacagctaagcgagggagatgggggcggcgatactgggtgccgtggctgacctaggctgtgcgggtaagagagattgattccaactcctagctcccttagggaagcttaattctatagatgatctcttacaagtatttatatcctagctgatgtttatctgatctaagaataagagctatgagatctcttctaatccttatccaactaactagagataatatcttctttttattagctaatccttatctaat

SEQ ID NO: 214272 - DNA, 1198 bp, Zea Mays
gaattaagatgcttgtagtatgtcatgttttataacatcactggtgacaagactgcaggttctcttcagaagatatatctggacagaatcaagttaaggcttctgtacaacgaaagattcggcaaataccccagccttgaacctttgctagatgacttgctcccaaaaaagtcacctatgattgttgttaaatgccaaaatcatcttaatcttgtagtggtgaataatgttcctctatttttcaatatacgtgatggtccttacatgccaaccctgcgtcttcttcatcagtatcctgatatcatgaaaaagttccaagtggatagaggtgctatcaaatttgttctatctggcgcaaacataatgtgtcctgggttgacttcacctggtggtgccttagacgacgaagtcgaggaggaaacaccagtggctataatggctgaaggaaaacaacacgccctggcaattggatatacaaagatgtcagcaaaagacataaggaccatcaacaaaggaattggtgttgacaatatgcactatctaaatgatggcctatggaagatggaacggctcgaatgagtagaattctctgaggggttcataacttgcggcagatcgtattgatggacatatgaaaccagcaggaccctatttgcacagctggtatcgttttaaagatgaagtactaagaagctttatttacctgaggcaacttgagcttactccgaccctttggtgtggagtgcatgtcagaaacaggattatgaatgctgtgttcagtgcttttcacaaattgttgtattttcaccagaacaatttgccctcaattggaagtgaggaaatccataacgatctataagttatttgatcttacagtttgttgtgtgtaacttatctaattggtaggattgcggatcctactagggatctccctaggctaaggatgaacagctaagcgagggagatgggggcggcgatactgggtgccgtggctgacctaggctgtgcgggtaagagagattgattccaactcctagctcccttagggaagcttaattctatagatgatctcttacaagtatttatatcctagctgatgtttatctgatctaagaataagagctatgagatctcttctaatccttatccaactaactagagataatatcttctttttattagctaatccttatctaat

SEQ ID NO: 214273 - DNA, 1409 bp, Zea Mays
acccatagtataaaccatagtgagtccagaataacatcccgtacatggtatccagacaagccgggattggctccgttgacagatcctgatccagtgtgatatttgggctgctcacagcacaattgggtccaataaagcccagccgggacgcagaggaagaagacccggagctgcgtcttccttccgtttcagcaccgcgcgcaatcggcctctcatcccctcttcctatcgcccgccgccgccgccgccgccgcccgtccgcttcagtacgacgtcgagcaaggggaggtaaaagttcgtttggcgtgcgccatgtttaagaagttctcttcagaagatatatctggacagaatcaagttaaggcttctgtacaacgaaagattcggcaaagtatcgctgatgagccaaaatcatcttaatcttgtagtggtgaataatgttcctctatttttcaatatacgtgatggtccttacatgccaaccctgcgtcttcttcatcagtatcctgatatcatgaaaaagttccaagtggatagaggtgctatcaaatttgttctatctggcgcaaacataatgtgtcctgggttgacttcacctggtggtgccttagacgacgaagtcgaggaggaaacaccagtggctataatggctgaaggaaaacaacacgccctggcaattggatatacaaagatgtcagcaaaagacataaggaccatcaacaaaggaattggtgttgacaatatgcactatctaaatgatggcctatggaagatggaacggctcgaatgagtagaattctctgaggggttcataacttgcggcagatcgtattgatggacatatgaaaccagcaggaccctatttgcacagctggtatcgttttaaagatgaagtactaagaagctttatttacctgaggcaacttgagcttactccgaccctttggtgtggagtgcatgtcagaaacaggattatgaatgctgtgttcagtgcttttcacaaattgttgtattttcaccagaacaatttgccctcaattggaagtgaggaaatccataacgatctataagttatttgatcttacagtttgttgtgtgtaacttatctaattggtaggattgcggatcctactagggatctccctaggctaaggatgaacagctaagcgagggagatgggggcggcgatactgggtgccgtggctgacctaggctgtgcgggtaagagagattgattccaactcctagctcccttagggaagcttaattctatagatgatctcttacaagtatttatatcctagctgatgtttatctgatctaagaataagagctatgagatctcttctaatccttatccaactaactagagataatatcttctttttattagctaatccttatctaat

SEQ ID NO: 214274 - DNA, 1071 bp, Zea Mays
acgaggcctgccaaagcaggccttgaccttgaaaagtcatggtggaagtgatggtctacatggatatgtgcaatctcttgaccacgctgtcaatgacttgaaaatgtacctcaagaaagtgtcagccgagaaccctggtcttccatgcttctgcttcggccattcgacgggtgggggtatcattctgaagacgtagaaacgctcatcagcggtgttgtcctgacatcaccagctgtccgtgttcagcctgcccacccaatcatagcggccatggcaccgatttttgccctgatcgcgccaaggtaccagttgacggcgtcgcacaggaacggcccgccggtgtcgcgcgacccggaagccctgcgggccaaatacgcggaccagctggtgttcacgggcgccatccgcgtgaggacgggctacgagatcctccgcctgacgtcgtacctgcagccgcacctgcagcgggtcgcggtgccgctgctggtgatgcacggcgccgacgacctggtgacggaccccgagggctcgagggcgctgtacgagcgggcctcgtccgcggacaagtccctcaggctctaccacgggctgctgcacgacctcctgatcgagcccgagaaggacagggtgatggacgacatcgtggcgtggctgagccgcagggtgtgatgcgttgcggtgctggccgtaggtttcgcgcggcttcgatcgtctgctgagcgcggaggacctgcaggcggaagacgaagacgcctcgcctctggacggtgatgacgcggtctggtcggctgcggaggtagggagggagagccggtgtgcgtccttgctgccttagcgcggtgatgatccgagagcggcacaggagtatggagtactagtactacctacggtgatggcttcactcgcgcctcccgggtgtatcctgagatttttgtcggggatacgtacgaattttgtaaaaatccgacgactgaacgaagatgagagcatctccaacaacgtgacctataaaaatgccttataatttaaaaataagtaaattttatagaatttagggcaccaacaaaacac

SEQ ID NO: 214275 - DNA, 1099 bp, Zea Mays
caacttctcactaggatgaaatgcacacttttagggccccttggaatgtcatggtggaagtgatggtctacatggatatgtgcaatctcttgaccacgctgtcaatgacttgaaaatgtacctcaagaaagtgtcagccgagaaccctggtcttccatgcttctgcttcggccattcgacgggtgggggtatcattctgaaggctgcacttgatccagacgtagaaacgctcatcagcggtgttgtcctgacatcaccagctgtccgtgttcagcctgcccacccaatcatagcggccatggcaccgatttttgccctgatcgcgccaaggtaccagttgacggcgtcgcacaggaacggcccgccggtgtcgcgcgacccggaagccctgcgggccaaatacgcggaccagctggtgttcacgggcgccatccgcgtgaggacgggctacgagatcctccgcctgacgtcgtacctgcagccgcacctgcagcgggtcgcggtgccgctgctggtgatgcacggcgccgacgacctggtgacggaccccgagggctcgagggcgctgtacgagcgggcctcgtccgcggacaagtccctcaggctctaccacgggctgctgcacgacctcctgatcgagcccgagaaggacagggtgatggacgacatcgtggcgtggctgagccgcagggtgtgatgcgttgcggtgctggccgtaggtttcgcgcggcttcgatcgtctgctgagcgcggaggacctgcaggcggaagacgaagacgcctcgcctctggacggtgatgacgcggtctggtcggctgcggaggtagggagggagagccggtgtgcgtccttgctgccttagcgcggtgatgatccgagagcggcacaggagtatggagtactagtactacctacggtgatggcttcactcgcgcctcccgggtgtatcctgagatttttgtcggggatacgtacgaattttgtaaaaatccgacgactgaacgaagatgagagcatctccaacaacgtgacctataaaaatgccttataatttaaaaataagtaaattttatagaatttagggcaccaacaaaacac

SEQ ID NO: 214276 - DNA, 2015 bp, Zea Mays
ctcttgccgcctccgcctcccccacccggcgggcggggctgcgactgcgagagcgcgggctataagatgaaaacttcgcctccactccccccattcgcgaagccctgctcagcttctcctccttttctcaccaccggccccactcgtcttcgttgcgtacgacaccagaacccggttcgagaatcgccggcggccggctaaaggagagagggtgataataaatcgataaaaggacgggcacgactttttttttcggagggtgtcgttgaacaggactgcgctgggcctgggacgaatccatttttagggcggtgccggcgcgatcgttccgggatcggcagctttatcggggggcgagggatcacggcagcggcggcggcgacgaccgaccgaccgacccaacccgccaccagtgccccgcggcccgcgccgaggaagaaggaagggataaggagacggagccggtggtcgcagtcgcagggatggccgggagcatgcaggcggcggacgcggcgggccggctgagcgcgctgctctcgctgctcgcgctgcgccggctcctcgccgtgctgcagccgctggccctgctcctgctcctgcccttccggtggcgctcgcgcccgggggccggggccgcggcctccgcgccgggggctagcgggaagaaggggaagtcggcgtcgtcgtcgtcgtcgtcgtcgtcggtggttctgcgggtgccggccgggtcgcccatggtcgccgcgcggaggcaggcttccgcgcggagggaggtagccatgcgccgggcgcgggaggccgggcgggagtacgagctcatccccaccgctcgcggcgagacgctcttcacgcagtgctggtggccgcgcccgtcctccaccgttaaaccaagtgggaggtacgatcatttagcgaggcgattgaatgatatcggcatcaaggtgtacgggatggactggactggtcatggtggaagtgatggtctacatggatatgtgcaatctcttgaccacgctgtcaatgacttgaaaatgtacctcaagaaagtgtcagccgagaaccctggtcttccatgcttctgcttcggccattcgacgggtgggggtatcattctgaaggctgcacttgatccagacgtagaaacgctcatcagcggtgttgtcctgacatcaccagctgtccgtgttcagcctgcccacccaatcatagcggccatggcaccgatttttgccctgatcgcgccaaggtaccagttgacggcgtcgcacaggaacggcccgccggtgtcgcgcgacccggaagccctgcgggccaaatacgcggaccagctggtgttcacgggcgccatccgcgtgaggacgggctacgagatcctccgcctgacgtcgtacctgcagccgcacctgcagcgggtcgcggtgccgctgctggtgatgcacggcgccgacgacctggtgacggaccccgagggctcgagggcgctgtacgagcgggcctcgtccgcggacaagtccctcaggctctaccacgggctgctgcacgacctcctgatcgagcccgagaaggacagggtgatggacgacatcgtggcgtggctgagccgcagggtgtgatgcgttgcggtgctggccgtaggtttcgcgcggcttcgatcgtctgctgagcgcggaggacctgcaggcggaagacgaagacgcctcgcctctggacggtgatgacgcggtctggtcggctgcggaggtagggagggagagccggtgtgcgtccttgctgccttagcgcggtgatgatccgagagcggcacaggagtatggagtactagtactacctacggtgatggcttcactcgcgcctcccgggtgtatcctgagatttttgtcggggatacgtacgaattttgtaaaaatccgacgactgaacgaagatgagagcatctccaacaacgtgacctataaaaatgccttataatttaaaaataagtaaattttatagaatttagggcaccaacaaaacac

SEQ ID NO: 214277 - DNA, 2118 bp, Zea Mays
cgtgggcccgtgctaggccacgaccctccgccgcggctccggctcgccaagagaccatccgttcggttctgtctcccgctctcttgccgcctccgcctcccccacccggcgggcggggctgcgactgcgagagcgcgggctataagatgaaaacttcgcctccactccccccattcgcgaagccctgctcagcttctcctccttttctcaccaccggccccactcgtcttcgttgcgtacgacaccagaacccggttcgagaatcgccggcggccggctaaaggagagagggtgataataaatcgataaaaggacgggcacgactttttttttcggagggtgtcgttgaacaggactgcgctgggcctgggacgaatccatttttagggcggtgccggcgcgatcgttccgggatcggcagctttatcggggggcgagggatcacggcagcggcggcggcgacgaccgaccgaccgacccaacccgccaccagtgccccgcggcccgcgccgaggaagaaggaagggataaggagacggagccggtggtcgcagtcgcagggatggccgggagcatgcaggcggcggacgcggcgggccggctgagcgcgctgctctcgctgctcgcgctgcgccggctcctcgccgtgctgcagccgctggccctgctcctgctcctgcccttccggtggcgctcgcgcccgggggccggggccgcggcctccgcgccgggggctagcgggaagaaggggaagtcggcgtcgtcgtcgtcgtcgtcgtcgtcggtggttctgcgggtgccggccgggtcgcccatggtcgccgcgcggaggcaggcttccgcgcggagggaggtagccatgcgccgggcgcgggaggccgggcgggagtacgagctcatccccaccgctcgcggcgagacgctcttcacgcagtgctggtggccgcgcccgtcctccaccgttaaaccaagggcgctagttgttgtcatgcacgggctaaacgagcacagtgggaggtacgatcatttagcgaggcgattgaatgatatcggcatcaaggtgtacgggatggactggactggtcatggtggaagtgatggtctacatggatatgtgcaatctcttgaccacgctgtcaatgacttgaaaatgtacctcaagaaagtgtcagccgagaaccctggtcttccatgcttctgcttcggccattcgacgggtgggggtatcattctgaagacgtagaaacgctcatcagcggtgttgtcctgacatcaccagctgtccgtgttcagcctgcccacccaatcatagcggccatggcaccgatttttgccctgatcgcgccaaggtaccagttgacggcgtcgcacaggaacggcccgccggtgtcgcgcgacccggaagccctgcgggccaaatacgcggaccagctggtgttcacgggcgccatccgcgtgaggacgggctacgagatcctccgcctgacgtcgtacctgcagccgcacctgcagcgggtcgcggtgccgctgctggtgatgcacggcgccgacgacctggtgacggaccccgagggctcgagggcgctgtacgagcgggcctcgtccgcggacaagtccctcaggctctaccacgggctgctgcacgacctcctgatcgagcccgagaaggacagggtgatggacgacatcgtggcgtggctgagccgcagggtgtgatgcgttgcggtgctggccgtaggtttcgcgcggcttcgatcgtctgctgagcgcggaggacctgcaggcggaagacgaagacgcctcgcctctggacggtgatgacgcggtctggtcggctgcggaggtagggagggagagccggtgtgcgtccttgctgccttagcgcggtgatgatccgagagcggcacaggagtatggagtactagtactacctacggtgatggcttcactcgcgcctcccgggtgtatcctgagatttttgtcggggatacgtacgaattttgtaaaaatccgacgactgaacgaagatgagagcatctccaacaacgtgacctataaaaatgccttataatttaaaaataagtaaattttatagaatttagggcaccaacaaaacac

SEQ ID NO: 214278 - DNA, 4412 bp, Zea Mays
ccctttctttgcctctctctctctccctgggtattggggctctctccgttctcgcgtacgcacaccaccacctcgaatatgctgaccccagccgcgccggccgcgccctgacagcccccacccgatgcgccttccccgcctccgccgccgctgccacgccgctgccggatccgctcccgctcggccgccgtccgctctcggcggcgacgggtcccgctgacctcatcgtgcttgccccgcctccatctcgcgccggcgtgggttgcggcgacggccagtagggttccggggcttccgcctcgcggtcccctcccccgaggatccgcgccttcccctacggggcgcgcgttgcgcttagggtgtgggttgccttggtcttctcagcttggttgcggtcgcgcggtttcgaggagctccacggaagcttgatttgtcaggggggcttttcgaggcagaggcaccgatctgcggctgccggcgccgcggcattgggccacttcctaagcccccgagcgcccggagcttcgttcggatcggctggtctgggagctgggccgcaacaaatcagctcttcttcggcctcactgtaagcatttcttcgcagaggttctcgctcgtttctgggctagttgatattggagggaaacatgccggagaacattgatctggtgcttgagttcctgcggaagaaccggttcgccaaggcagaggcagctctccgtggggagctcaccggctgcgccgattcgaacggcatgaccgtgcagaggtgtgtcgctgagctgaaagaagacgacgagcaggaggacttggtgagctccaatggagggcccaacggtgctgtgacagagaggagtgcggactcatcgagggagttcatcgtgaaggaggttgatgttggagccctgccgaacggtttggatggaaagaagggctccgggattggccagcctcaggagaacaacgtgggggatctgtatccttggaccttcagcatagcaaacagcacggcagaacagctagctgagctgctggtgtcggaggaggtgccaagacataggcgtgctgcgatgttggcagagaagagggatcgaggcgttgggactgaacagcctggcccattgctggagcaaaaagtctcttctggaagagggaaaggaaaagttgatgctgctgggagaactgcaatcaatgaacagggtcattccagggataaaaatctagtaccagaaaaggaggagatgttaaatggttgcacagttaagacagtgcttccattccctggggaaaacccgtcatctagttacaatagcacgcaccatgaaaacgagaggaaagaggtaaggaggagcattaatgcagatggtgttggaaaaggggcaaaaggacatttcgacgaggggaacagacaaaattacttcgaaaaatccctagatacagatcaggtgtctgaccgatgcttcgatttacagcttgttggagataatcagcgtgaggagcttccaaagttacctcctgtgaggctcaagtccgaagataagctagtcaacatgaactgggaggacaagatcaatcaccatggatctggagccaagcaatctagtgctgatcatgcctttatgattgggtcttatctcgatgttcccattgggcaagacataacatcttcaggtggaaggcgtacaattggcagtagttggctgtctgtcagtcagggtattacagaagatacctcgggttttgcaagacttgatgatgattcacttgaatatccaattggtgaatactgggattccgatgagtatgatgacgatgacgatgtaggctacacccgacaaccaattgaggatgaaacctggtttttagcacatgagattgattatcctagcgacaatgagaaggcaaccgaccacacaagagggcctgatcgtcatgatcgccctacaaaggatgaagatgatgaccagtcatttgttgaggaagattcctacatatccggtgagcaatattttcatggaaagaatattgcacaaataggtacttctgagggtccaatggtcaatgggattcctgataatgatatgatagctcagtatgatgggcaacttttagatcctgaagagcttaatttgatgcattctgaaccagcctggcagggctttgtattgcagaacagtgaactaggtatgttagggaatgggaaattccttaatgattctgaacgacctcatcctgatgacccttttgtggaggatgatcagcatggctctgttaggtcaattggtgttgggataagcagtgatgctgctgacattggcagtgaggtgcgagaaagtctgattggaggtagtagtgagggggatattgaatatttcaatgagagcagcttgagtgttagtggaaagagacattctcagcaggatcctgaaaagaagagagtaggtgctaaaggagtaaaacatgaccaaatcaattacgctgctggtatccagaagggtaatctactgccaggagcggctgatggtggattttcttttcctccacctttgcattctgtgaaaaatcatgactctgatactaaaactttgtggtcaaagaaggatgaaatgtattgcattaacgatctggatgattgccaaaatggcgtggcatcagatgatatgcttgctacatggaagaaaaagaatagtgagtcttctcttaggagctctagagatgaaatgacatctgatgttgttagatcaagaaattcaagtccatcgtatggcgaaacagaggacacaacgaatgttcggcgtcacaaactagatgacgcacaagaagacactggaaccaacttggatgatgaggaagcagcagcattgcaagagcaagtcaggcagataaaggtgcaggaggaagagtttgaaactttcaatcttaagattgtgcatagaaaaaacagaactggctttgaagaagacaaaaatttccatgttgttctcaattctgtcattgctgggcgttatcatgtatcagagtatttggggtcagctgctttcagcaaagccatccaggcacatgatttgcacacaggaatggatgtatgtgttaaaattataaaaaataacaaagattttttcgaccagagccttgatgagatcaagcttctgaagtatgttaacaagcatgatcctggtgacaagtaccaccttttgcgtctgtatgattacttctactatcgggcaaatctgtacgagtttcagaaattcaacagagaatcagggggtgaggtttacttcacaatgccaagactgcagctattcagtgtctggaggcgctgcagtttctgcatggtctcggtctaatccactgtgatttgaagccagaaaacatattggtaaagagctacagcagatgtgaaataaaagtaattgatcttgggagcagctgttttgagactgatcatctatgttcatatgtgcaatcacgatcttaccgtgcacctgaggttatactgggcttgccttatgacaaaaagatagatatatggtcacttggttgtatattagcagaactttgcactggaaatgttcttttccaaaacgattcgcctgcaacattacttgctcgtgtgatgggcatcattggcgccatagaacaagctatgcttgcacagggacgggacaccttcaaatatttcactaagaaccacatgttatatgaaagaaatcaggaaagtaacaggcttgaatacttgattccgaaaaagacatccttgcggtaccgcttgcccatggctgatcaagggtttatcgagttcgttgcgtgccttctagaggtgaacccgaagaagcgcccaagtgcctcagaagcattgaaacatccatggctttcttttccttacgagccaatatcttcatgacacaaattgctattggatcctgggtggcttaacatatgcgacaacacctaagcaccatgaaattttggtagatcaaggcgaaagattttctaccacggctgagccatggcaaacccagattcggtttgatcacgcgtggtgccacaatcagctggtctttgacgctgtgtgcaatcaatccatgccctgtgttgcgcttgtaatataactttattttttttttctctttctagccccgatgtaacaggccattttgttttttaggtactttgtgatgcatttttagcaatagggctgtcatgttgtacatggtgtgatcattgttgaactccgtgccatgctgtgcacatgttagggttctaacccaagcccagaatgtcattcattgcattgccaggtctttaggagattgccttccgtgcttgtctgtgaaacagcttacaagttttacttgccttttctggttgacatcttgccatctagagtttatatatacgatgtatctggg

SEQ ID NO: 214279 - DNA, 969 bp, Zea Mays
ctgcaatccaaacacgtcattaaggggagggggaagcagaaggagggatggcggagaacccgcagctgtttgggaatgggatgccggtgccgttctacagtgagatgttcgtcctcgcccgggatggcgtcgagttccacgtcgacaagatcccatcagctcctggtggtcatgtgaaaacaaaaggcacaatttacctgtctaatataaggatggtgtttgttgccaacaagcatgttggcaacttctttgcttttgatatgccactgttgtttgtgcacggtcagaagttcaatcagccaatatttcactgcaacaacatctctggattcgttgagccagttgttccagacaaccagaacagggccctgtactcaactcacaccttcaaggtcttgttcaaggacggcggctgtggtactttcgttcctctgttcctcaacctgactgcatctgtgcggcgctacaaccagtttgaaacccagtctgctgctagcatggcacctcgtgtggaccctctgcaagctgtgcagactcctgttgatgacatgatgcgtcatgcgtatgttgacccaaacgatcctaccaagatcttccttcagcaacctgcgccagaatcgcagctgaggaggaggaactaccacggcccagctgatgcaaattagcgcttggctggattggcagaactcatgctcaattaagtgctgtgtccatttgagcatttcacctatccttgtcgtttaccacaactgacttcaatattcgggtacccctgggtcctgtgaccttacatatatagtacataatgttgcgagttctcgcaatatgtaatgtacataagtggcgtgttcatatattattgctggagcctggagggtcaacttggatgtgggttgcttggatattgctgatctgctggtgctgcatgtttctctgaatctatcattgttcttgttcggggcttgtggg

SEQ ID NO: 214280 - DNA, 1505 bp, Zea Mays
aaaaaaactatacaactgaaaacagttcaaaaccctcggccgaatagtaaggcaaagccgcaaaggcttatccttccgagtttccaccctttacaatggcgagcgctcccgccggctttgcccccaccgtcgctgcttccacaagcttcggcttcagccgcttcactatcgtggcatgccccttcccctcgcgcactcatcttccagcggcctcctccgttggggttcgcaatcagcagcgcgcgtccactgccaccgcctgcctgccgccgccgaatacctcccatggcgccgccaccaggctgtacgtcagcggtctttcgttccgcacaaccgaacggagcctccgggacgcgttcgagaagtttggtgaccttacggaagtttgtctcgtgatggatagagtagcgaagcgaccgagaggtttcgctttcctttcttacaccggggaggaggaagccaggggcgccatggaagggatgcacgggaagttcctggatggcagagtgatctttgtcgaggttgcgaaacgaagagctgaagcctgaaggatcgcgcccaaatattgctaaaaaaaaacttgattgttggttccagcaaagtccctgatgagacacacattgatgcaggcaaggtttaggtgaagtttagatgtgaacagaggaaccgaagaaaccttagggcttgtttgggtaaccttggattagaatggattgagggggtataaggtgtattgaagtgtaatatgaactaatttctctttcaatccctaaaatacacttcaatccacttcaatccctctttatccaaacaaggccttagcaacattcggtcgtgtagctgttgtcatttcattgttttacaaaacaacattcgtaatttacatatataggtcatacaatatggtctcctactacaactattacactgcttgctgcattgtcttgaactatacaaatgacagacaggaaccacagccagtcagtcacctccatcccttttgtggaaggctgcttcaccagtgtcaatctgcctctcataagtaacagcagaacgcctgaatggccgtcctgcaaaacatcagcactgctgtactgtacagtcatacgtcttcaatatcagcaaaaaaatatatatatccagagcagcggtggctggcgagggcgcaaaaattttacaggcacagccttgtcatctctctatctgcctccccaggtgcctctgactgcagcagcatcttgctctgaggcgtgcgcttgcacggtgcaaaacctcgaaggcagtctggaactacgctcgcgcatttccttgaacctggaacaggtgccactttgtctccgtcgttgtttactttcgtggattctacagaatctgaattctgagctgtttcaaccacgctgctggaggaggttgtgacggacggctccgtccacgatccttgtgccctcgtgacctcgcagtctgctgcggcttgagacgctcaggggtcggcaagcagaatgcac

SEQ ID NO: 214281 - DNA, 4232 bp, Zea Mays
cccacaaggcccccgctatttatgcgcacttgcttgccgggagactgggagagttgtgtcgccggcggaggtgggcgtccgtcctcccgttccaccagagctcactgcttcgctccacccaccggccaccaccccttaagcaggagtggtacctggtgtttttttgtttttcaaaaagaagacagaaatgtcttcctcgaggcctgcccactcttcaagttcatccagcaggactcgccagagctcccgggcaaggatattagcacaaacaacccttgatgctgaactcaatgcagagtacgaagaatctggtgattcctttgattactccaagttggttgaagcacagcggagcactccacctgagcagcaagggcgatcgggaaaggtcatagcctacttgcagcatattcaaagaggaaagcttatccaaccatttggttgcctgttggcccttgacgagaagagcttcagggtcattgcattcagtgagaatgcacctgaaatgcttacaacggtcagccatgctgtgccgaacgttgatgatcccccgaagctaggaattggcaccaatgtgcgatcccttttcactgaccctggtgctacagcactgcagaaggcacttggatttgctgatgtttctttgctgaatcctatcctggttcagtgcaagacctcaggcaagccattctatgccattgttcatagggcaactggttgtctggtggtagattttgagcctgtgaagcctacagaatttcctgccactgctgctggggctttgcagtcctacaagcttgctgccaaggcaatctccaagatccagtcactaccaggtggaagcatggaggccttatgcaataccgtggttaaggaagtctttgacctgacaggttatgacagggttatggcttacaagttccatgaagatgagcatggggaggtcttcgctgagatcaccaaacctggtattgagccctatataggcctgcactatccagccactgatatccctcaagctgccaggtttctcttcatgaagaacaaagtcagaatgatctgtgattgccgtgcaagatccgtgaagattattgaagatgaggcactctccattgatattagcttgtgtggttcaactcttagagcaccacatagctgtcaccttaagtatatggagaacatgaactcgattgcatcccttgtcatggctgttgtggtcaatgaaaatgaagaggatgatgaacccgagcctgaacaaccaccacaacagcagaagaagaagaggctgtggggtctcattgtttgccaccatgagagccccagatatgtccctttcccactgcggtatgcctgtgaattcttggcccaagtgtttgctgtccatgtaaacaaggagtttgaattggagaagcagatacgagagaaaaacattctgcgaatgcaaacaatgctctctgacatgctgttcaaggaatcatctcccttgagtatcgtgtctgggagtccaaatatcatggacctagttaagtgtgatggcgctgctcttttgtatggggacaaagtatggcggcttcaaacggctccaaccgagtctcagattcgtgatattgccttctggctttcagaagttcatggggattccactggcttgagtactgatagcctccaggatgctggatatccaggagctgcttcccttggtgacatgatttgtggaatggcagtggccaagatcacgtccaaggacattcttttctggttcaggtcacatacagctgctgaaatcaaatggggaggtgcaaagcatgatccatctgataaggatgacaacagaaggatgcaccctaggttatcctttaaggctttccttgaggttgtcaagacgaagagtttgccatggagtgactacgagatggatgctattcactcattgcagcttattcttagaggtacactgaatgatgcctcgaagccggcccaggcatctggtttagataaccagatcggtgatctaaaacttgatgggcttgctgaattgcaagcagtgacaagtgaaatggtccgcctgatggaaacagcaactgttccgatcttggcagtagatggcaatggattggtcaatggatggaaccaaaaggtagcggagttgtcagggctgagagttgatgaggctataggaagacacatacttacacttgtggaggattcttctgtatcacttgttcagaggatgctatatttagctctgcaaggcagagaagagaaggaagttcgatttgagctgaaaacacatggctccaagagggatgatggccctgttatcttggtcgtaaatgcttgtgccagtcgtgatcttcatgaccatgttgttggggtgtgctttgtagcccaggacatgactgttcacaagttggtcatggacaaatttactcgggtcgagggggactacaaggcaatcatccacaacccgaacccactcattcctcctatatttggtgctgaccagtttggatggtgctctgagtggaatgcagccatgaccaagcttaccgggtggcacagagatgaagtggttgataagatgctccttggcgaggtttttaacagcagcaatgcttcctgccttctgaagagcaaagatgcctttgtacgtctttgcattgtcatcaacagcgcattagctggtgaagaggcagaaaaggcttcattcggcttctttgaccgcaatgagaaatatgtcgaatgccttctgtcggtgaacaggaaagtaaatgcagatggtgttgtcactggagtgttctgtttcatccatgttcctagtgatgacctgcagcatgcgctacatgtgcagcaagcctctgagcagacagcacaaagaaagttgaaggctttctcgtacatgcgacatgccatcaacaaacctctctcaggtatgctttattctagggaaacactcaagagcacaggtctgaatgaagagcagatgaggcaggttcgcgtcggagacaattgccatcgccagctaaacaagatacttgccgacttggatcaagataacatcactgacaagtcaagctgcttggatttggatatggctgaatttgtgttgcaagatgtggtggtgtctgctgtaagtcaagtgctgataggttgccaggctaaaggtatcagagttgcttgcaacctgccagagagatccatgaagcaaaaggtttacggggatggtatccgactccagcagatcgtctctgacttcctatttgtttcggtgaagttctctcctgctggtggctctgttgacatctcttccaagctgactaagaacagcattggggaaaaccttcacctcatagacttcgaacttaggatcaagcaccgaggagcaggagtcccagcggaaatattgtcgcaaatgtatgaggaggacaataaagagcagtcagaggagggcttcagccttgctgtttctagaaaccttctgaggctcatgaatggtgacattcgtcacctcagggaagctggcatgtcaaccttcattctcactgctgaacttgctgctgctccttcagcagttggacgatgagggcaaactgcaacaagtgtcaaatgctctctcagagttcattcggaaagccacggtggtttgcggagaatgagaaatgttggagcggcgtgtaggatcaccgaatgcatagtatttgcaaattgcaactctctagctgcacaaaggaatcggcgacaggtgcggcttgcgaccaagcatttcacagatttagcaagaaggtatccaaggggagggcatccgtaccatatgcgcaggccggaaccagagctcgaagactcggagctgtctcagtagctagcggtagcaggcggcctccaccctcccgccacctccatgccgtcgctgcggtgcatctcccctgttggatctctcaagtctcacattcttcgcattcccgtgcggagctaggggacggcgaagccgttggtggtttactgctggatacgctgacgtcgctgcggcggtgtcataaaggcggattcggccctcggatgaccgccgccgccccgcaaccgtcaggcgccagcagaaccggccacggtgaggagtcttttggggaaaaaaatacacaccgaggatttttttaagcctagttagaaacccatttttacatgttatttccatttttttaacggagcctttagacccatttattttaaagtaattg

SEQ ID NO: 214282 - DNA, 3987 bp, Zea Mays
cgtcgacttgctgctgctcactcgcactcgtcgcggtggcccacgcccacaaggcccccgctatttatgcgcacttgcttgccgggagactgggagagttgtgtcgccggcggaggtgggcgtccgtcctcccgttccaccagagctcactgcttcgctccacccaccggccaccaccccttaagcaggagtggtacctggtgtttttttgtttttcaaaaagaagacagaaatgtcttcctcgaggcctgcccactcttcaagttcatccagcaggactcgccagagctcccgggcaaggatattagcacaaacaacccttgatgctgaactcaatgcagagtacgaagaatctggtgattcctttgattactccaagttggttgaagcacagcggagcactccacctgagcagcaagggcgatcgggaaaggtcatagcctacttgcagcatattcaaagaggaaagcttatccaaccatttggttgcctgttggcccttgacgagaagagcttcagggtcattgcattcagtgagaatgcacctgaaatgcttacaacggtcagccatgctgtgccgaacgttgatgatcccccgaagctaggaattggcaccaatgtgcgatcccttttcactgaccctggtgctacagcactgcagaaggcacttggatttgctgatgtttctttgctgaatcctatcctggttcagtgcaagacctcaggcaagccattctatgccattgttcatagggcaactggttgtctggtggtagattttgagcctgtgaagcctacagaatttcctgccactgctgctggggctttgcagtcctacaagcttgctgccaaggcaatctccaagatccagtcactaccaggtggaagcatggaggccttatgcaataccgtggttaaggaagtctttgacctgacaggttatgacagggttatggcttacaagttccatgaagatgagcatggggaggtcttcgctgagatcaccaaacctggtattgagccctatataggcctgcactatccagccactgatatccctcaagctgccaggtttctcttcatgaagaacaaagtcagaatgatctgtgattgccgtgcaagatccgtgaagattattgaagatgaggcactctccattgatattagcttgtgtggttcaactcttagagcaccacatagctgtcaccttaagtatatggagaacatgaactcgattgcatcccttgtcatggctgttgtggtcaatgaaaatgaagaggatgatgaacccgagcctgaacaaccaccacaacagcagaagaagaagaggctgtggggtctcattgtttgccaccatgagagccccagatatgtccctttcccactgcggtatgcctgtgaattcttggcccaagtgtttgctgtccatgtaaacaaggagtttgaattggagaagcagatacgagagaaaaacattctgcgaatgcaaacaatgctctctgacatgctgttcaaggaatcatctcccttgagtatcgtgtctgggagtccaaatatcatggacctagttaagtgtgatggcgctgctcttttgtatggggacaaagtatggcggcttcaaacggctccaaccgagtctcagattcgtgatattgccttctggctttcagaagttcatggggattccactggcttgagtactgatagcctccaggatgctggatatccaggagctgcttcccttggtgacatgatttgtggaatggcagtggccaagatcacgtccaaggacattcttttctggttcaggtcacatacagctgctgaaatcaaatggggaggtgcaaagcatgatccatctgataaggatgacaacagaaggatgcaccctaggttatcctttaaggctttccttgaggttgtcaagacgaagagtttgccatggagtgactacgagatggatgctattcactcattgcagcttattcttagaggtacactgaatgatgcctcgaagccggcccaggcatctggtttagataaccagatcggtgatctaaaacttgatgggcttgctgaattgcaagcagtgacaagtgaaatggtccgcctgatggaaacagcaactgttccgatcttggcagtagatggcaatggattggtcaatggatggaaccaaaaggtagcggagttgtcagggctgagagttgatgaggctataggaagacacatacttacacttgtggaggattcttctgtatcacttgttcagaggatgctatatttagctctgcaaggcagagaagagaaggaagttcgatttgagctgaaaacacatggctccaagagggatgatggccctgttatcttggtcgtaaatgcttgtgccagtcgtgatcttcatgaccatgttgttggggtgtgctttgtagcccaggacatgactgttcacaagttggtcatggacaaatttactcgggtcgagggggactacaaggcaatcatccacaacccgaacccactcattcctcctatatttggtgctgaccagtttggatggtgctctgagtggaatgcagccatgaccaagcttaccgggtggcacagagatgaagtggttgataagatgctccttggcgaggtttttaacagcagcaatgcttcctgccttctgaagagcaaagatgcctttgtacgtctttgcattgtcatcaacagcgcattagctggtgaagaggcagaaaaggcttcattcggcttctttgaccgcaatgagaaatatgtcgaatgccttctgtcggtgaacaggaaagtaaatgcagatggtgttgtcactggagtgttctgtttcatccatgttcctagtgatgacctgcagcatgcgctacatgtgcagcaagcctctgagcagacagcacaaagaaagttgaaggctttctcgtacatgcgacatgccatcaacaaacctctctcaggtatgctttattctagggaaacactcaagagcacaggtctgaatgaagagcagatgaggcaggttcgcgtcggagacaattgccatcgccagctaaacaagatacttgccgacttggatcaagataacatcactgacaagtcaagctgcttggatttggatatggctgaatttgtgttgcaagatgtggtggtgtctgctgtaagtcaagtgctgataggttgccaggctaaaggtatcagagttgcttgcaacctgccagagagatccatgaagcaaaaggtttacggggatggtatccgactccagcagatcgtctctgacttcctatttgtttcggtgaagttctctcctgctggtggctctgttgacatctcttccaagctgactaagaacagcattggggaaaaccttcacctcatagacttcgaacttaggatcaagcaccgaggagcaggagtcccagcggaaatattgtcgcaaatgtatgaggaggacaataaagagcagtcagaggagggcttcagccttgctgtttctagaaaccttctgaggctcatgaatggtgacattcgtcacctcagggaagctggcatgtcaaccttcattctcactgctgaacttgctgctgctccttcagcagttggacgatgagggcaaactgcaacaagtgtcaaatgctctctcagagttcattcggaaagccacggtggtttgcggagaatgagaaatgttggagcggcgtgtaggatcaccgaatgcatagtacggctccatacttctgctctgtttctgcctgtaactcaactgtgaaaagttttaaactttcagaaagaaaaaccgtgtgaggtgcaggttcaagttaatatgaataataaagtgttttttattaaaataaaaaacatgatgaaatgtcaaatttagcggcagctttggtgccttctttatgtccatgcgtgtgcatgtggttgtatactggtgtaactgcttggtgggctacccatggctcttgt

SEQ ID NO: 214283 - DNA, 1272 bp, Zea Mays
tgttgttcatcctcgccatgaggatgtcctgaagaataacaatccctgaaatactggaggatgagtggttcaaaaagggctacaagcgcccggagtttgacgagaaatatgacacgccattggatgatgtggatgctgtcttcaatgactcagaagagcaccacgtgacagagaagaaagaagaagaacccgtagctctcaatgcatttgaactgatttcaaggtcagcaggcctaaatcttgggaacctatttgactcggagcaggaattcaaaagagaaacgaggttcacgtcaaaatgtccaccgaaagaaatcattcgcaagattgaggaagctgcaaaacctctaggatttggtgtccagaagaaaaactacaagttgaggctagagaaagtaaaagcagggaggaagggaaacctgaatgttgctacggaggtagtaaaaaacaactcatcaactgtaaacaataatccaagcaaactttcttgtgcctagcatttactaatgtgtttttcatccagatactacaggttgcgccctcccttcatatggtacaagtccggaaagcaaaaggcgacactctggagttccaaaagttctacaagaacctttccaagaccttaaaggacgttgtctggaaatctgaagacctgcaaatgcgagctgcttcttagcatccactagatggcgagatgttcgtacgtgtcagattccattcccgtagcatgatgtgtcgtcagccgtttctgttcactgcactctgcatggtccggtgggcgcgtggcttggcattttcagagaccgcgttgctcgttgcagcccgggatgaaggcgatgcagtaggttttgtggatgtggtgagctctgtatatgcctattgatgagtcatgttgcaagctgtaacgacactatgatccgtgaagtgtagaagcagccaagtatgttctttctatgctgccccatttcccggcagtttccatgcattttgaagaaaaaaatagtggctaactcattgatatttgtatttggtcatcattaataaatcgcctctccatctgtgcatgacccctctatcgttgtaagatttttttacaatcctcatctttctaaggttctgtttttttaccagattatataattcagctcaaataaattaagagacaaacaaacaacatagattatcaaatgaattatataatttagatacctagattatgataatctataagcaagttattagaataatgcataagtgttcatataatttata

SEQ ID NO: 214284 - DNA, 1383 bp, Zea Mays
cgacctaaagccgtcatctcagccgagcgagcggcgaggaccgacgctgggaagctttgggatctcgggcgtactgttccaaatacagttaaatttgctgactagattggtcgaacaaagcagaagaaaattcgtgtgacttcagaataacaatccctgaaatactggaggatgagtggttcaaaaagggctacaagcgcccggagtttgacgagaaatatgacacgccattggatgatgtggatgctgtcttcaatgactcagaagagcaccacgtgacagagaagaaagaagaagaacccgtagctctcaatgcatttgaactgatttcaaggtcagcaggcctaaatcttgggaacctatttgactcggagcaggaattcaaaagagaaacgaggttcacgtcaaaatgtccaccgaaagaaatcattcgcaagattgaggaagctgcaaaacctctaggatttggtgtccagaagaaaaactacaagttgaggctagagaaagtaaaagcagggaggaagggaaacctgaatgttgctacggaggtagtaaaaaacaactcatcaactgtaaacaataatccaagcaaactttcttgtgcctagcatttactaatgtgtttttcatccagatactacaggttgcgccctcccttcatatggtacaagtccggaaagcaaaaggcgacactctggagttccaaaagttctacaagaacctttccaagaccttaaaggacgttgtctggaaatctgaagacctgcaaatgcgagctgcttcttagcatccactagatggcgagatgttcgtacgtgtcagattccattcccgtagcatgatgtgtcgtcagccgtttctgttcactgcactctgcatggtccggtgggcgcgtggcttggcattttcagagaccgcgttgctcgttgcagcccgggatgaaggcgatgcagtaggttttgtggatgtggtgagctctgtatatgcctattgatgagtcatgttgcaagctgtaacgacactatgatccgtgaagtgtagaagcagccaagtatgttctttctatgctgccccatttcccggcagtttccatgcattttgaagaaaaaaatagtggctaactcattgatatttgtatttggtcatcattaataaatcgcctctccatctgtgcatgacccctctatcgttgtaagatttttttacaatcctcatctttctaaggttctgtttttttaccagattatataattcagctcaaataaattaagagacaaacaaacaacatagattatcaaatgaattatataatttagatacctagattatgataatctataagcaagttattagaataatgcataagtgttcatataatttata

SEQ ID NO: 214285 - DNA, 2489 bp, Zea Mays
agacgctccaccgccacatatctgcatctgcaaaatactgcgtgctctcttcttctggttctcctcatcacattcaccgtcgtcgtcatcacataagcttttatctaggcttgcggctacttgcatcggagcaagtcagtcacatctcacagctcagtgagatccagagccaaagggcggggcgtctcccactcccaatcccaagtccagccgccgccgtctcttgctcgctccaaaagccgttttccagagatctttttcagggccagacgccagccgccgtctctcgcttgcctgcatttccgatcctgaggcagtcctcatctcattctcatccaaccgggaggttgggaacgagatcacagctacagttacctgagtagtaggatcctcctcagatcggcttcaaaaatcaaagtgggggggacaacaaggcaggggatgagtgcagctgcaaccaaggtgaagagacgtgtgggcaagtacgagctcggccgaaccataggcgaaggcacattcgccaaggtcaggttcgccaagaacaccgagaccggggagccggtggccgtcaagatcctcgacaaggagaaggtcctcaggcacaagatggccgagcagattaagagggagatttcgaccatgaagctgattaagcaccctaacgttgttcgcatatatgaggtgatgggaagtaaaacaaaggtctacattgtgctggagtatgttaccggcggcgaacttttcgacacaattgctaaccaaggtcgaatgagggaaggcgaggcgaggagttacttccaacaattaatcaacgcagttgattattgccatagcaggggtgtgtaccaccgggatttaaaaccagaaaatctactgcttgactcatatggaaatctgaatgtctctgactttgggctgagcgcgctgtcccagcaaatcaaggatgatggattgctgcacacaacttgtgggactccaaactatgtggcaccagaggtcctagaagatcagggctatgatggtgcaatggctgatctgtggtcatgtggagttatcctgtttgttctgctagctgggtatttaccttttgaggactctaaccttatgacgctgtataagaaaatctcaaatgcagaatacacatttccaccatggacatctttccctgccaagaggttgttgacaagaatccttgatccaaatccgatgacgggttgattttgcgtccatattatagctgagcaactctttcattcctagcagattcatctctccagttccaaatacagttaaatttgctgactagattggtcgaacaaagcagaagaaaattcgtgtgacttcagaataacaatccctgaaatactggaggatgagtggttcaaaaagggctacaagcgcccggagtttgacgagaaatatgacacgccattggatgatgtggatgctgtcttcaatgactcagaagagcaccacgtgacagagaagaaagaagaagaacccgtagctctcaatgcatttgaactgatttcaaggtcagcaggcctaaatcttgggaacctatttgactcggagcaggaattcaaaagagaaacgaggttcacgtcaaaatgtccaccgaaagaaatcattcgcaagattgaggaagctgcaaaacctctaggatttggtgtccagaagaaaaactacaagttgaggctagagaaagtaaaagcagggaggaagggaaacctgaatgttgctacggaggttgcgccctcccttcatatggtacaagtccggaaagcaaaaggcgacactctggagttccaaaagttctacaagaacctttccaagaccttaaaggacgttgtctggaaatctgaagacctgcaaatgcgagctgcttcttagcatccactagatggcgagatgttcgtacgtgtcagattccattcccgtagcatgatgtgtcgtcagccgtttctgttcactgcactctgcatggtccggtgggcgcgtggcttggcattttcagagaccgcgttgctcgttgcagcccgggatgaaggcgatgcagtaggttttgtggatgtggtgagctctgtatatgcctattgatgagtcatgttgcaagctgtaacgacactatgatccgtgaagtgtagaagcagccaagtatgttctttctatgctgccccatttcccggcagtttccatgcattttgaagaaaaaaatagtggctaactcattgatatttgtatttggtcatcattaataaatcgcctctccatctgtgcatgacccctctatcgttgtaagatttttttacaatcctcatctttctaaggttctgtttttttaccagattatataattcagctcaaataaattaagagacaaacaaacaacatagattatcaaatgaattatataatttagatacctagattatgataatctataagcaagttattagaataatgcataagtgttcatataatttata

SEQ ID NO: 214286 - DNA, 1222 bp, Zea Mays
aaacacgcaaaacgtgcttctgtccctctcctgttataatttcgtcttcttccctctcccaccggtgtcctcgcctcgcctatccgatctgccacctcgccgtctcgcacgttcctttccccaactccccagcgcctctccgcgccgcgatccagatccaggttgttcagcatgggtctggtgaaggaaggcgtcgacatggaggagggaaccctagagatcggcatggagtacaggactgtatctggtgtggccgggcctctggttatcttggataaagtaaagggcccaaagtaccaagaaattgtaaacatccgacttggagatggcaccactcgccgtggtcaagtccttgaagttgatggagaaaaagctgttgtgcaggtttttgaaggaacttctggaatagacaacaaatacacaaccgtgcagtttacaggcgaggttttgaaaactcctgtctcactcgatatgcttgggcgcatttttaatggttctggaaaacctattgacaatggccccccgatattacctgaagcctacttggatatctctggaagttctattaatcccagtgagagaacctatccagaggagatgatccaaactgggatatccaccattgatgtgatgaactccattgctcgtgggcaaaaaatccccctattttctgctgctggactccctcacaatgaaattgctgctcagatctgtcgtcaggctggccttgtgaagacattggagaaaggaaagcatgcagagggtggtgaagatgacaactttgctattgtgtttgctgctatgggagtgaacatggaaacagctcaattcttcaaacgtgattttgaagagaacggttccatggaacgggtcaccctttttctgaatctggctaatgatcccaccattgaacgtattatcacccctcggattgctctaacaacagcagaatatttggcatatgaatgtgggaagcatgtacttgtcatcttgacagatatgagctcttatgcagacgcacttcgtgaggtttctgcagcccgagaagaggtgccaggtaggcgtggttatcctggatatatgtatactgatctggcaacaatatatgagcgtgctgggcgtattgaaggaagaacagggtccattacccaaattcctattctgacaatgcctaatgatgcaggggaaggcttgcccaccagttcagatggtccttttttaa

SEQ ID NO: 214287 - DNA, 7363 bp, Zea Mays
aagctagttacaggcggcgagctgcttttgcaagctctgatgcttctgccgcagagttgacaagtatgtctctggtgcaagtgtgctgaagatgaaggagaggagctctttatgtgaaagtgcagccgatggaaactggggtttgaaatataaaaggaaaagaagcaagttaaccgttagcccatctaatgagaatgaggctacctcaccaacatctgactctccaatgagccatggttccaccaaaaagaagttgaagcatgacactaacatttctccatcagccaagaagataagaggacacgatgggtatttttttgagtgtgtagaatgtgatcttggtggcaatttgctatgttgtgatagctgtcctcgtgtttaccacttggaatgcctcaatcctcctcttaagcgtctaccccctgggaagtggcaatgtccaagatgccgtccgaaaaaaggtagcttgaagatgttaggtaatgcagaggttggcacttctaaacatgaaaaaagtacaaggacatatgcaggtacgacatcaggtagtccaccttcgcatacaaaagtctcctttaagaccaggaactccacacaagacaaaactggatcaaaagaacaaggaaaacagtcatctggtggcacaatgatgggtggtgacccgaataatgaagttgagaaaaagaacacattgatattacatttgaagaagcactcaatgaaggaattatcagagaatgctaaacctttgaagtcaaaatttgttggagagccttcagaagagaaaattgttaaacatggaagtgtcttgaaactcaagaaacattcagaccgtatggacttgtctccaaataaatctaaaagcagggggcaaaatagtcagagagagagtaaaaggcctggcacaaaaaagcttaaatattcaatgtctgatgatgacagtgtttcctcatcagaaccatcgacatctcttgataacaatgaaccaccaccaaaaagaaaaccctcagatggaaaagcaccttcatccagtaccaagaaagggaaaaagaaagtgaagttcattgagaaaaggcactctgaggaacagtgtgtggtaggagacaaaacaacgacttcccaggaggatcagcaggtcgatcgcattctaggctgtcggcttcaaacaaacaaaatcaacccactgtcccatgcttcattcaagcagtttgaatcagctaatctccaggtggaagatatggctcttccgcttgcttccgctggcattcctaataaatctcatgatggaactgagtcttctagaaatggtacagtcgaggatatatgtgctgatgaatcagccaatcatagtggtcacagtttggaaatgcagaaggataggaacagtaaatcccatgaaaacgagtcatgtaaacgagaacaaggcaataatatattgtcaatatgttttgttgatgagaccagtataatgaaagatgatcaagtaggcagagagaatgttgcagcttccaaaaagggtgaagatgcgacatatgatttacctgcagaaaaggatgataccaaactaccagtcactagagctgatgcaatgaccaggaccaatcaagagcatacagatgagagcaaacagcatgggaaaataaagcaaataacagataaagactacaatgatgctggatatgagttcttgatcaagtgggttggaaaatcaaatatccacaacacctgggtttctgaatccgaggtaaaaatattagcaaaaaggaaactagaaaactacaaaacgaagtatggaacgagtttgataaacatttgcaaggaacagtggtgccagccacaacgagttattgctcttcgagcatctgtagatgaagtggaagaggctttaatcaaatggtgtggtctttcttatgatgaatgcacttgggaaagattagatgaacctacactgatgaaatatagccacttggtcactcagttcaagaattttgagtgccaggctttggataaagatgtggtaaaagattatgcaaacacaaggaaccgacatgagcttaatgtgttagctgatcagccaaaagaacttaagggcggcatgctcttccctcatcaactagaagcattgaactggctacgtaaatgctggcacaagtccaaaaatgttatccttgctgatgagatgggtcttggaaagacagtgtcagcttgtgcttttctatcatccttatgttgtgaatttaaaattaatttgccatgtcttgtcttggttcctctttctacaatgcccaattggatggctgaatttgcatcttgggctcctcatttaaatgttgtggaatatcatggttctgcaaggtcaagatctatcattcgccagtatgagtggcatgcgggcgattcaagccagattggcaaaacaaagagatcgtacaagttaaatgttttgcttaccacttacgaaatggtgcttgttgatgctgcatatcttcgttctgtctcatgggaagttcttgtagttgatgagggacatcgccttaagaattctagcagcaaactctttagtttacttaattcgttatcatttcagcacagagttttgttgactggaactcctttacagaacaacattggtgaaatgtacaacttattgaacttcttacagcctacttctttcccttctctgtcatcatttgaggagaaatttaatgaccttacaacagcagaaaaagtagaggagctgaagaaacttgtagctcctcacatgcttcggaggttgaaaaaagatgcaatgcaaaacatccctccaaagacagagcgaatggtacctgttgaactgacatcaatccaggctgaatactaccgtgctatgcttacaaagaactatcaagtactgcgcaacattggaaaaggtggcgctcaccagtctttattgaacatagtaatgcagcttcggaaagtctgcaaccatccttatcttattcatggaactgaacctgaatctggttcacctgaatttttgcatgagatgcgcataaaggcctcagcgaagctaactttgttgcactctatgctaaaaatattacacaaggaaggccaccgtgtccttatattctctcagatgacaaaacttcttgacatccttgaagattatctgactttagaatttggccctaaaacatttgaaagagttgatggctcagtatctgtggcagagcgccaggcggcgattgctcgctttaatcaggataagacacgttttgttttcttgctgtctacacgatcatgtggacttggtattaatttggcaactgcagatactgttatcatatatgattcagatttcaacccacatgctgatatacaggcgatgaacagggcacacagaattggacaatcgaatagactcctggtttacaggcttgtggtacgtgctagtgttgaagagcgtatcttgcaattagccaagaagaaactgatgcttgatcaacttttcgttaacaaatcagaatcacagaaagaagtggaagatatcattcgctggggtacagaagaactctttgggagtagtgacagtgtggatggtaaagatagcaatgaagcctcaggttctgttgctgatgttgaatttaagcatagaagaaaaaccggtggcctaggtgatgtttatgaggacaaatgtattggtggttctaccaaacttgtttgggatgaaaatgctattttgaagctgcttgatagatcaaaccttccatcatcagtggccgaaagcactgatggggatctggacaatgatatgcttggtactgtgaagtcaatagactggaatgatgagctgaatgaccaccctggtaccaatgaggatattgcacctattgataatgatgggagtgagttggcatctgaatcaaagcaaggtgctactaatcgtttagaagaaaatgaatgggataaacttttacgtgtcagatgggagcaatatcaaatagaggaggaggcatctcttggtcgaggtaaacgtttaaggaaggctgtttcttacagagagacatttgcaacacttcctaatgaagcattaagtgagggctctgatgagggagatgaaccaaagagagaatatacagcagctggactggtcttgaaggaaaaatatggaaagcttcgagctagacaaaaggaaaggattgcgcagcgacacattatcaagaactatgctgttgataatcttgaggagttcatgactccatatatctctattgctaatgaacctgctgaaaatcctttgataatcgtagaagacccaagttcttcacagctatgtggtgctaaatgtttcagtgaatcaactggagaaatgaggcaatcctccaagaaatcaaggagatattctgaaatccctcaagatctttatgccagaattcctgataacgctgcttcatccaaggacaactcaaaggccaccgatgtcttcaatccagggaccccaaatcacctgctacctgtacttggcctttgtgctccaaatgctgatcaggtgaactcatacaaaaactcaatttgtgcaccaagcataaaggagcataaaagggccagtggtgacgtagtcaacaaacaactgtcaactcccgctgaccattctaatgagcttagaaacgaagttcaatcagcttctgataaggtcatctttcctggtgcatctgaggaagctttgcgaaggataagtaacatgatcccagataattattttcccttcagtcatattcctcctatatcagggaaggcggttgatcctgttgaatatattggagcttcgaatgcatcatttcaagggaaactgggtcttccaaacttcagtctggaagacaacactccacttaagcatattaagcctatacctgatatatttccttacctgtcactgggtgctcataaggattatattcgtagttctgtcccagagttgccagatagttcattattaccaaacttcatggcagatattgctggtacttcaaagcaaaaatcattcatgtctggtccacttcctgggctgggtcttagcccaggacaaccaatccatttgactatgcctgataatcacaagaaagtcttggacaacataatgatgcgtgctcagtatgcctcaaacaaattcttgaagaagagatcaaaactagattattggtcagaggatgaacttgatgctctgtggataggagttcgtaggcatggaaggggaaattgggatgctatgcttagagatccaaagttaaagtttttgaacaaccgaactagtgaagagctggcctcgagatggattttggaggagcaaaagattatagatgaacctatgtctgcagccacaagacgttctaactcaacagcatttcctggaatatctgatgcaatgatgtctcgggcgctcaatgaaagtaatttatctaagatgaggatggagcagcctaaattgcagtcccacgtaactgatattcagttaggttcgagtgatatcctatccagatttcctcatgttgaggctcctaattacattaactcaggggagggtggcccacctcagataccatggcaggatttcaagcatagatcaagttatggtggtgattttcctggcggtgcatttgacaagttggagaaacctgatgttggactgatcccgccatttatgcctaatcctttcatgactgatagcattgattcacttcccataaacagaaaaaacaatagttccattccgcgtagtgaaatcagatcaagttctcgtgagaacattcttttttctggtgtttcggatggacaaatcaacttgcttcatgagatgcagcgtcatgtgaggtcaggcaaacaacccattgagataaagctcaaccacatagaccactcaaatcctcagcttggtaatgctagtgacctcggaggtttaaaatcaaacaagttacctcattggcttcaggaggctgtacgtgctcctgcttcatctaagccacctgaacgtgggctaccagcaactgtctcagcaattgctcagtccatgtgccttcttcttggagaacaagaaccatcaatacctccattcttgatcctgggaacccctctttctcccccaaaagatccaaggattaattcaaagaagaggaaactccgcaaagctcatcaatctacctctcatgtaggtgattgcatcgctacccaagcacccccatccgttaaagcttcagctgctcctcttgctgtcgattgcaatgatggtgcgccttcactcaacttgaactctgcattgctgtcatcttcagctgtaagcaagaagctagatgagttacctcccacatttaaagaatcaaaccaaaccatggatggttcagaagctgttgcaggcaagttggaggctcctgaaattggttgtcaggtaactggttcctctccagtagatgacaaagctagagaatcttcaggatcaccagtgaaggatactcctgatgctggagtcagattgcaaggatcagataactcagctatggcattttctgcactcccacttgaagcacctgtgacaagcagcagagcagagcctgtggcatgtgatggcagtgacatgaaagaggatattccactagacgctgaaagcaacgggaacctggaggagcgatgaactggctcctcttgtgaacatggatgcatcacatcaagtatctgctaaaacgtcaacggagattggatgaaatgttctcagatgagcattagacttgagccagttagctcgacattcctttctcttccgttgagcagaatactgggattttccctctcccaatgtttccagtgttgatgatctcatgttgtgtaatgctttagtgcagagtgcagataggataaaattcaacgacaagtggtgcttcttagcagtagttgggcactagtccgtcgggagcaactcttggaaacctgtatacaagaaatgtatatttttgctaacatggtgttggttgggtgtgtagactgtagaccgctattcatttatttatgcgtatatggttcagtaatttgccgtctgtctagcggtcgctgtaagagtagacatggtgatgataatacctcgccttgagtggtggcctgatagaacatgaaactcactttccccagctgttattgtttgataattgtagcggatgcctttatggttggactaaagagaaagctgagatgttgtgtttacttcgcaaaggagagtttttactgtttttgtgggaaaccctatccctcacaaggggttgtgtaatgtatatatagactgagttagatgagtcaggcttattacacaggggtgacacggtaaatacacgtggtaaac

SEQ ID NO: 214288 - DNA, 7002 bp, Zea Mays
gttatcaacacgagaactacgaaaaattgagtatttttttgagtgtgtagaatgtgatcttggtggcaatttgctatgttgtgatagctgtcctcgtgtttaccacttggaatgcctcaatcctcctcttaagcgtctaccccctgggaagtggcaatgtccaagatgccgtccgaaaaaaggtagcttgaagatgttaggtaatgcagaggttggcacttctaaacatgaaaaaagtacaaggacatatgcaggtacgacatcaggtagtccaccttcgcatacaaaagtctcctttaagaccaggaactccacacaagacaaaactggatcaaaagaacaaggaaaacagtcatctggtggcacaatgatgggtggtgacccgaataatgaagttgagaaaaagaacacattgatattacatttgaagaagcactcaatgaaggaattatcagagaatgctaaacctttgaagtcaaaatttgttggagagccttcagaagagaaaattgttaaacatggaagtgtcttgaaactcaagaaacattcagaccgtatggacttgtctccaaataaatctaaaagcagggggcaaaatagtcagagagagagtaaaaggcctggcacaaaaaagcttaaatattcaatgtctgatgatgacagtgtttcctcatcagaaccatcgacatctcttgataacaatgaaccaccaccaaaaagaaaaccctcagatggaaaagcaccttcatccagtaccaagaaagggaaaaagaaagtgaagttcattgagaaaaggcactctgaggaacagtgtgtggtaggagacaaaacaacgacttcccaggaggatcagcaggtcgatcgcattctaggctgtcggcttcaaacaaacaaaatcaacccactgtcccatgcttcattcaagcagtttgaatcagctaatctccaggtggaagatatggctcttccgcttgcttccgctggcattcctaataaatctcatgatggaactgagtcttctagaaatggtacagtcgaggatatatgtgctgatgaatcagccaatcatagtggtcacagtttggaaatgcagaaggataggaacagtaaatcccatgaaaacgagtcatgtaaacgagaacaaggcaataatatattgtcaatatgttttgttgatgagaccagtataatgaaagatgatcaagtaggcagagagaatgttgcagcttccaaaaagggtgaagatgcgacatatgatttacctgcagaaaaggatgataccaaactaccagtcactagagctgatgcaatgaccaggaccaatcaagagcatacagatgagagcaaacagcatgggaaaataaagcaaataacagataaagactacaatgatgctggatatgagttcttgatcaagtgggttggaaaatcaaatatccacaacacctgggtttctgaatccgaggtaaaaatattagcaaaaaggaaactagaaaactacaaaacgaagtatggaacgagtttgataaacatttgcaaggaacagtggtgccagccacaacgagttattgctcttcgagcatctgtagatgaagtggaagaggctttaatcaaatggtgtggtctttcttatgatgaatgcacttgggaaagattagatgaacctacactgatgaaatatagccacttggtcactcagttcaagaattttgagtgccaggctttggataaagatgtggtaaaagattatgcaaacacaaggaaccgacatgagcttaatgtgttagctgatcagccaaaagaacttaagggcggcatgctcttccctcatcaactagaagcattgaactggctacgtaaatgctggcacaagtccaaaaatgttatccttgctgatgagatgggtcttggaaagacagtgtcagcttgtgcttttctatcatccttatgttgtgaatttaaaattaatttgccatgtcttgtcttggttcctctttctacaatgcccaattggatggctgaatttgcatcttgggctcctcatttaaatgttgtggaatatcatggttctgcaaggtcaagatctatcattcgccagtatgagtggcatgcgggcgattcaagccagattggcaaaacaaagagatcgtacaagttaaatgttttgcttaccacttacgaaatggtgcttgttgatgctgcatatcttcgttctgtctcatgggaagttcttgtagttgatgagggacatcgccttaagaattctagcagcaaactctttagtttacttaattcgttatcatttcagcacagagttttgttgactggaactcctttacagaacaacattggtgaaatgtacaacttattgaacttcttacagcctacttctttcccttctctgtcatcatttgaggagaaatttaatgaccttacaacagcagaaaaagtagaggagctgaagaaacttgtagctcctcacatgcttcggaggttgaaaaaagatgcaatgcaaaacatccctccaaagacagagcgaatggtacctgttgaactgacatcaatccaggctgaatactaccgtgctatgcttacaaagaactatcaagtactgcgcaacattggaaaaggtggcgctcaccagtctttattgaacatagtaatgcagcttcggaaagtctgcaaccatccttatcttattcatggaactgaacctgaatctggttcacctgaatttttgcatgagatgcgcataaaggcctcagcgaagctaactttgttgcactctatgctaaaaatattacacaaggaaggccaccgtgtccttatattctctcagatgacaaaacttcttgacatccttgaagattatctgactttagaatttggccctaaaacatttgaaagagttgatggctcagtatctgtggcagagcgccaggcggcgattgctcgctttaatcaggataagacacgttttgttttcttgctgtctacacgatcatgtggacttggtattaatttggcaactgcagatactgttatcatatatgattcagatttcaacccacatgctgatatacaggcgatgaacagggcacacagaattggacaatcgaatagactcctggtttacaggcttgtgaatcacagaaagaagtggaagatatcattcgctggggtacagaagaactctttgggagtagtgacagtgtggatggtaaagatagcaatgaagcctcaggttctgttgctgatgttgaatttaagcatagaagaaaaaccggtggcctaggtgatgtttatgaggacaaatgtattggtggttctaccaaacttgtttgggatgaaaatgctattttgaagctgcttgatagatcaaaccttccatcatcagtggccgaaagcactgatggggatctggacaatgatatgcttggtactgtgaagtcaatagactggaatgatgagctgaatgaccaccctggtaccaatgaggatattgcacctattgataatgatgggagtgagttggcatctgaatcaaagcaaggtgctactaatcgtttagaagaaaatgaatgggataaacttttacgtgtcagatgggagcaatatcaaatagaggaggaggcatctcttggtcgaggtaaacgtttaaggaaggctgtttcttacagagagacatttgcaacacttcctaatgaagcattaagtgagggctctgatgagggagatgaaccaaagagagaatatacagcagctggactggtcttgaaggaaaaatatggaaagcttcgagctagacaaaaggaaaggattgcgcagcgacacattatcaagaactatgctgttgataatcttgaggagttcatgactccatatatctctattgctaatgaacctgctgaaaatcctttgataatcgtagaagacccaagttcttcacagctatgtggtgctaaatgtttcagtgaatcaactggagaaatgaggcaatcctccaagaaatcaaggagatattctgaaatccctcaagatctttatgccagaattcctgataacgctgcttcatccaaggacaactcaaaggccaccgatgtcttcaatccagggaccccaaatcacctgctacctgtacttggcctttgtgctccaaatgctgatcaggtgaactcatacaaaaactcaatttgtgcaccaagcataaaggagcataaaagggccagtggtgacgtagtcaacaaacaactgtcaactcccgctgaccattctaatgagcttagaaacgaagttcaatcagcttctgataaggtcatctttcctggtgcatctgaggaagctttgcgaaggataagtaacatgatcccagataattattttcccttcagtcatattcctcctatatcagggaaggcggttgatcctgttgaatatattggagcttcgaatgcatcatttcaagggaaactgggtcttccaaacttcagtctggaagacaacactccacttaagcatattaagcctatacctgatatatttccttacctgtcactgggtgctcataaggattatattcgtagttctgtcccagagttgccagatagttcattattaccaaacttcatggcagatattgctggtacttcaaagcaaaaatcattcatgtctggtccacttcctgggctgggtcttagcccaggacaaccaatccatttgactatgcctgataatcacaagaaagtcttggacaacataatgatgcgtgctcagtatgcctcaaacaaattcttgaagaagagatcaaaactagattattggtcagaggatgaacttgatgctctgtggataggagttcgtaggcatggaaggggaaattgggatgctatgcttagagatccaaagttaaagtttttgaacaaccgaactagtgaagagctggcctcgagatggattttggaggagcaaaagattatagatgaacctatgtctgcagccacaagacgttctaactcaacagcatttcctggaatatctgatgcaatgatgtctcgggcgctcaatgaaagtaatttatctaagatgaggatggagcagcctaaattgcagtcccacgtaactgatattcagttaggttcgagtgatatcctatccagatttcctcatgttgaggctcctaattacattaactcaggggagggtggcccacctcagataccatggcaggatttcaagcatagatcaagttatggtggtgattttcctggcggtgcatttgacaagttggagaaacctgatgttggactgatcccgccatttatgcctaatcctttcatgactgatagcattgattcacttcccataaacagaaaaaacaatagttccattccgcgtagtgaaatcagatcaagttctcgtgagaacattcttttttctggtgtttcggatggacaaatcaacttgcttcatgagatgcagcgtcatgtgaggtcaggcaaacaacccattgagataaagctcaaccacatagaccactcaaatcctcagcttggtaatgctagtgacctcggaggtttaaaatcaaacaagttacctcattggcttcaggaggctgtacgtgctcctgcttcatctaagccacctgaacgtgggctaccagcaactgtctcagcaattgctcagtccatgtgccttcttcttggagaacaagaaccatcaatacctccattcttgatcctgggaacccctctttctcccccaaaagatccaaggattaattcaaagaagaggaaactccgcaaagctcatcaatctacctctcatgtaggtgattgcatcgctacccaagcacccccatccgttaaagcttcagctgctcctcttgctgtcgattgcaatgatggtgcgccttcactcaacttgaactctgcattgctgtcatcttcagctgtaagcaagaagctagatgagttacctcccacatttaaagaatcaaaccaaaccatggatggttcagaagctgttgcaggcaagttggaggctcctgaaattggttgtcaggtaactggttcctctccagtagatgacaaagctagagaatcttcaggatcaccagtgaaggatactcctgatgctggagtcagattgcaaggatcagataactcagctatggcattttctgcactcccacttgaagcacctgtgacaagcagcagagcagagcctgtggcatgtgatggcagtgacatgaaagaggatattccactagacgctgaaagcaacgggaacctggaggagcgatgaactggctcctcttgtgaacatggatgcatcacatcaagtatctgctaaaacgtcaacggagattggatgaaatgttctcagatgagcattagacttgagccagttagctcgacattcctttctcttccgttgagcagaatactgggattttccctctcccaatgtttccagtgttgatgatctcatgttgtgtaatgctttagtgcagagtgcagataggataaaattcaacgacaagtggtgcttcttagcagtagttgggcactagtccgtcgggagcaactcttggaaacctgtatacaagaaatgtatatttttgctaacatggtgttggttgggtgtgtagactgtagaccgctattcatttatttatgcgtatatggttcagtaatttgccgtctgtctagcggtcgctgtaagagtagacatggtgatgataatacctcgccttgagtggtggcctgatagaacatgaaactcactttccccagctgttattgtttgataattgtagcggatgcctttatggttggactaaagagaaagctgagatgttgtgtttacttcgcaaaggagagtttttactgtttttgtgggaaaccctatccctcacaaggggttgtgtaatgtatatatagactgagttagatgagtcaggcttattacacaggggtgacacggtaaatacacgtggtaaac

SEQ ID NO: 214289 - DNA, 1413 bp, Zea Mays
gagaaaataataattaaaaaaaagcagtgaaccttctcgcgctcggcagttggcagtcctgtcctgtggaccgtatgacgtgtttatttatgggcggcgccttcgtctccactccccaccggaggaaggaagcgagaagaccagaaggtgagaagagagagagagagtgtgtgtgatcggtacaaggatcaccgctgtgcctgcgcgtgctgcttcaccgaatcgagtcagatcctgtccgaatccgagctaagggatggcaaccggtagtgaagcctcgaaggcagctgaggctgtggttgactggcataaacacgacagcaagaggatgctccatgcggtttaccgtgttggggatctggaccgcacaatcaagtactacacggaatgctttgggatgaaactgctgaggaaaagggatgttcctgatgagaagtacaccaatgccttccttggctttgggccagagaacaccaactttgcagttgaattgacatacaactatggcgttgacaagtatgacattggaacgggctttgggcatttcgcaattgctaatgatgatgtgtacaagttagctgagaatatcaaatccaagggtggtaagatcacccgcgaacctggtcctgtcaagggaggatccactgttattgccttcgcacaggatcctgatggctacatgtttgagcttatccagagggctgacacacctgagcctctttgccaggtcatgcttcgtgttggtgaccttgagcgttctatcaagttttatgagaaggccctagggatgaagctcctaaggaagaaggatgtacctgattacaagtataccattgccatgttgggctatgctgatgaggacaagacaactgttctggagctgacgtacaactatggagtcacagaatacagcaagggcaatgcatatgctcaggttgccattggcaccaatgatgtgtacaagagcgccgaggcggttgatctggcgaccaaagaactaggtggcaagattttgcggcagccagggcctctacctgggatcaacactaagatcgcctcttttgttgatccagatggctggaaagtggttctggttgacaacaccgacttcctcaaggaactccactgaaggctcgggatacccagaggttgtgcttctgccagtgaggtttgggatttgctatgtaactgtgcctgcgggctccgattctggcgctgttcgtacactgtagaagccagtgaatcccaataaacccagcttcacaggctcctcttatcccgtagaccctagttgtttttgggtggagctggagccactgaccctagtcctttttttttacccgtttcatctcatgcatccacattcaataggaggtagcagacttacccattgcctgcttattgatgctaaac

SEQ ID NO: 214290 - DNA, 1710 bp, Zea Mays
ctagggttttgcttcgagaccgctcccaccgctcatataagctcatataacaacatccgtcgccgccgtttccatcccattttctctcctctctccgtcgccgcctcgggccaaaccctacgcagggagttgattgatcgattgcagccatgagtaagttgcattccgagcttctcaaggattgcatctcccagatagttcaggatgccaagaagaataggaagttcactgagactgttgagcttcagattagtctgaagaattatgatccacaaaaggacaagcgtttcagtggctctgttaagttgcctcacatccctcgtccaaagatgaaggtgtgcatgcttggtgatgcccagcacgttgaggaggtaaacaggcagttgatgatgcacttgaaaatgtacttatttatatgttgaacatgcttgcagtagtaaatctgcaaaaacaccaatgcttcgagttactcaactgtggctggcatgtattagtcagtccaagcccgcacttgattccatttgcaattaaatctgcttatacaaatcctgctcaactgcatggaagattgaaagttttgctaagataatgcaagtgcccttcctatctggatcaacttttctccacacaaaccattttactgcattctcaggctgagaagatgggacttgactacatggatgttgaggccctcaagaaaatgaacaagaacaagaagcttgttaagaagcttgccaagaagtaccatgcttttttggcatcagagaccatcatcaagcaaattccccgtctccttggtcctggtctcaacaaggcaggcaagttccccactctggtcactcaccaggaatccctggaatccaaggtgaatgagacgaaggctacagtcaagtttcaactgaagaaagtcctttgcatgggtgtcgcggtcggtaacctgtctatggaggagaagcagatccaacagaacatccagatgagcatcaacttcctcgtgtctcttctgaagaagaactggcagaatgtaagatgtctctacatcaagagcaccatggggaaaccattcaggattttctaagtctgtttttttgtgaagtctgctctttatgatatttggtttttgaaccgaggttgtcttgaactaaaactcttgttagatcatgtttggttggtaggatatttgagtctgggcaggtgtcttactcttgcgccatgtctttgtaatctctctatataagttttttgagaggctcagtataatatgcgtattatacgttatacccaatcgtttctgttactgtggaaaatgagtttccgccattgctgctgcgcccttgggtagcgcccctctacttacgggatagagccttgtaggaagtttttggtcactaatctggctgctattactagacattttgtgtaaagcgcaggcctagtgtcttaggttcttacgtgagttgggttaggagaagggattaacctggtgcttttgagtccaggtgctaggatttgaagggtcagtgaggtttggatagcctagtgtctgatggctatacatactatatttataaaaatattgtgtgatgactatacaaagtatctctataaaaatattaaaaaaccaactgtgccggtccagtctgacctgtgatgtaataggcagaaaaaccatatttggttttatatttttattcggatgtaataatacgc

SEQ ID NO: 214291 - DNA, 2910 bp, Zea Mays
gggagtctggcaggccggcattgcccgcatcacgcagcatgccgggcgccggcaaggcagcaacgaatcctggcagcggcaccccgcagccttctgcttgaacagctcgctaataataatctatgatgcttattcaggagtgaatcccataatagagatatgggttctctcactgacattggagtttctgcgggactaaacatactatctgcagtgggtttccttcttgcatttgctgttctcaggatacaacctattaacgatcgggtgtactttcctaaatggtaccttaaagggacaagaagcagcccaaggcagttgggaaatgttttcttgaagtttgtgaatgcagatttctcaacatatatccggtttctaaactggatgcctgcagcactgaaaatgccagaacctgaacttattgaacatgcgggacttgactctgcggtatacgtccgcatctatcttcttggtttgaaaatatttgtgccaattgcgctactagcatttgctgttctagttcctgtcaattggactagtggaacattggaaaatgaaaagggactaagttatgaccagattgataagctttcaatatcaaatcttggaaaaggttcgaaaaggttttgggcacacatagcgatgtcctatgtgtttacattttggacgttctttgtgttgtatcatgagtataaggttgtgacaacaatgaggttgcgctttcttgctaatcaaaatcgtcgacctgatcaatacacagttcttgtgcgaaatgtacctccagacccagatgaatcagttagtgagcacgttgagcacttctttgctgtgaatcaccgtgatcattaccttagtcaccagattgtatacaatgcaaaccacctttctggcttggttgagaagaaaaaaggcctgcaaaactggttaatctactacgaaaacaaacatgctaaaaaccctgcaaaaaggccaaaaataaagacaggactgtggggtctttggggacaaagagtggatgctatagaatactaccaaaaagaaattgaggatttatgtaaacaggaggatgaggagagacaaaaggtggtcaatgatccaaattatatcatgccagcagcatttgtgtctttcaaaacacagtggggggctgctgtttgtgctcaaacacagcagacaagtaatccaaccgtgtggttaactgagtgggctccagaacctcgtgatgttttctgggctaatctcgcaatcccttttgttgagctctcagttaggaggcttattgtagctgttgccttcttctttctgacctttttcttcatgataccaattgctattgttcagtccttggcaaacctagatgatatcgtcaaggtgcttcctttcttgaaacctataatcgaaaggtgtactgattagtgattactattggtccattttcgtaaagtgttgccagatcgtatcactaaatgaatgacaattgtgttcaatgtgcaagaaatttttgcttgacgatttacaaaaatgcattactggttgcagaaattctcttaagtcagttatccaaggcttcttgccaggaatcatattgaaaatctttcttatacttctcccaacaattctaatggccatgagcaagattgaaggacacacatcgctctctggattggacaggaaaacagcaacgaagtactacattttccttttcgtaaatgtattcttggggagtgtaataactggaacagcattccaacaactagacaacttcatacatcagtccgcaaataaaggttgttggagagtccattcctatgaaggcagcatttttcatgacatacataatggttgatggctggtctggtatagctgctgaagttcttcggttgaaggcattagtcatattccatataaagaatgcgttcttggtcagaacggagcacgaccgtgagcaggccatggatcctggaagcctggatttttacaactgtgaaccacgattacagctgtattttctgcttgggcttgtatatgcagttgtcacgccaatgcttcttcccttcatcatagtgttcttcagccttgcatatcttgttttcagacatcagataattaacgtatatactcagcactacgaaagtggtgcacaattctggccagatgttcacatgcgactaattatagcgctgatagtatcacaaatcctcctactggggctgctgagtacacaggaggcagagaagtctactgttgcccttctcccgcttcctgtcctctccatttggttccactatgtttgcaagggccggtttgaaccagcgtttgtgaagttccccttgcaggatgctatggtaaaggacacattggaacgggcgcatgacccgactttaaatttgagagagtacctaaagggtgcttatgtgcatccagtcttccagaaaaatgatatctacaaggttatcgccgtcgacgaggaagagaagaaccccatggttgtgacaaagaggcaatctcgcatgaacgcaccggccggaagctaattgaattccagttctggtggtactaacgaaggggaattcagttggatgcctcctacctaaagcctgattctttcatgagcaaatagcccagtaatcttgtaaatgtttggggaaaatggaaatacaggaggcagtaggatagtgaaacaggctgtattatatatgatccacaatttattaatttcattagtgattacaattattaataaaaacaaatttacaattatttttttgtttctttgtaattccatacttctatattccttgaagaaaaagtgtaaaaggcaggaacaaaagctgacgaaaggattagtaattctgccagtgcggtgcaaagttttttttaaaaaaaaaattaaacttgtgttaatgtttg

SEQ ID NO: 214292 - DNA, 2815 bp, Zea Mays
cgtccttgtgcgggggcaggacagcagaggcggccacggtgctcgtgcttgacggggccacagaggcgggaggaggataacgggagtctggcaggccggcattgcccgcatcacgcagcatgccgggcgccggcaaggcagcaacgaatcctggcagcggcaccccgcaggagtgaatcccataatagagatatgggttctctcactgacattggagtttctgcgggactaaacatactatctgcagtgggtttccttcttgcatttgctgttctcaggatacaacctattaacgatcgggtgtactttcctaaatggtaccttaaagggacaagaagcagcccaaggcagttgggaaatgttttcttgaagtttgtgaatgcagatttctcaacatatatccggtttctaaactggatgcctgcagcactgaaaatgccagaacctgaacttattgaacatgcgggacttgactctgcggtatacgtccgcatctatcttcttggtttgaaaatatttgtgccaattgcgctactagcatttgctgttctagttcctgtcaattggactagtggaacattggaaaatgaaaagggactaagttatgaccagattgataagctttcaatatcaaatcttggaaaaggttcgaaaaggttttgggcacacatagcgatgtcctatgtgtttacattttggacgttctttgtgttgtatcatgagtataaggttgtgacaacaatgaggttgcgctttcttgctaatcaaaatcgtcgacctgatcaatacacagttcttgtgcgaaatgtacctccagacccagatgaatcagttagtgagcacgttgagcacttctttgctgtgaatcaccgtgatcattaccttagtcaccagattgtatacaatgcaaaccacctttctggcttggttgagaagaaaaaaggcctgcaaaactggttaatctactacgaaaacaaacatgctaaaaaccctgcaaaaaggccaaaaataaagacaggactgtggggtctttggggacaaagagtggatgctatagaatactaccaaaaagaaattgaggatttatgtaaacaggaggatgaggagagacaaaaggtggtcaatgatccaaattatatcatgccagcagcatttgtgtctttcaaaacacagtggggggctgctgtttgtgctcaaacacagcagacaagtaatccaaccgtgtggttaactgagtgggctccagaacctcgtgatgttttctgggctaatctcgcaatcccttttgttgagctctcagttaggaggcttattgtagctgttgccttcttctttctgacctttttcttcatgataccaattgctattgttcagtccttggcaaacctagatgatatcgtcaaggtgcttcctttcttgaaacctataatcgaaagaaattctcttaagtcagttatccaaggcttcttgccaggaatcatattgaaaatctttcttatacttctcccaacaattctaatggccatgagcaagattgaaggacacacatcgctctctggattggacaggaaaacagcaacgaagtactacattttccttttcgtaaatgtattcttggggagtgtaataactggaacagcattccaacaactagacaacttcatacatcagtccgcaaataaaattccagaggttgttggagagtccattcctatgaaggcagcatttttcatgacatacataatggttgatggctggtctggtatagctgctgaagttcttcggttgaaggcattagtcatattccatataaagaatgcgttcttggtcagaacggagcacgaccgtgagcaggccatggatcctggaagcctggatttttacaactgtgaaccacgattacagctgtattttctgcttgggcttgtatatgcagttgtcacgccaatgcttcttcccttcatcatagtgttcttcagccttgcatatcttgttttcagacatcagataattaacgtatatactcagcactacgaaagtggtgcacaattctggccagatgttcacatgcgactaattatagcgctgatagtatcacaaatcctcctactggggctgctgagtacacaggaggcagagaagtctactgttgcccttctcccgcttcctgtcctctccatttggttccactatgtttgcaagggccggtttgaaccagcgtttgtgaagttccccttgcaggatgctatggtaaaggacacattggaacgggcgcatgacccgactttaaatttgagagagtacctaaagggtgcttatgtgcatccagtcttccagaaaaatgatatctacaaggttatcgccgtcgacgaggaagagaagaaccccatggttgtgacaaagaggcaatctcgcatgaacgcaccggccggaagctaattgaattccagttctggtggtactaacgaaggggaattcagttggatgcctcctacctaaagcctgattctttcatgagcaaatagcccagtaatcttgtaaatgtttggggaaaatggaaatacaggaggcagtaggatagtgaaacaggctgtattatatatgatccacaatttattaatttcattagtgattacaattattaataaaaacaaatttacaattatttttttgtttctttgtaattccatacttctatattccttgaagaaaaagtgtaaaaggcaggaacaaaagctgacgaaaggattagtaattctgccagtgcggtgcaaagttttttttaaaaaaaaaattaaacttgtgttaatgtttg

SEQ ID NO: 214293 - DNA, 2940 bp, Zea Mays
gccaattgctaaaagtttgcggagaacgcgaggaggggagatagctggggctaccattttggtgcagctggaggcgccggccgaagaaggattcacggcccacgccttctctctcctctcgccctgaaatgcaggcgtagatacgcgcgcgatgatcgtgagcccctccgcgcccctccgtcgcacctgtctcgcgttggcctctcctctcggctctcacgtgcaaacctaggcgccggcgccggcgtgctcctagcgctagcgtgagtgcacacggccagagcgagggaccggcgggcggtggcacgcgccgtccttgtgcgggggcaggacagcagaggcggccacggtgctcgtgcttgacggggccacagaggcgggaggaggataacgggagtctggcaggccggcattgcccgcatcacgcagcatgccgggcgccggcaaggcagcaacgaatcctggcagcggcaccccgcagccttctgcttgaacagctcgctaataataatctatgatgcttattcaggagtgaatcccataatagagatatgggttctctcactgacattggagtttctgcgggactaaacatactatctgcagtgggtttccttcttgcatttgctgttctcaggatacaacctattaacgatcgggtgtactttcctaaatggtaccttaaagggacaagaagcagcccaaggcagttgggaaatgttttcttgaagtttgtgaatgcagatttctcaacatatatccggtttctaaactggatgcctgcagcactgaaaatgccagaacctgaacttattgaacatgcgggacttgactctgcggtatacgtccgcatctatcttcttggtttgaaaatatttgtgccaattgcgctactagcatttgctgttctagttcctgtcaattggactagtggaacattggaaaatgaaaagggactaagttatgaccagattgataagctttcaatatcaaatcttggaaaaggttcgaaaaggttttgggcacacatagcgatgtcctatgtgtttacattttggacgttctttgtgttgtatcatgagtataaggttgtgacaacaatgaggttgcgctttcttgctaatcaaaatcgtcgacctgatcaatacacagttcttgtgcgaaatgtacctccagacccagatgaatcagttagtgagcacgttgagcacttctttgctgtgaatcaccgtgatcattaccttagtcaccagattgtatacaatgcaaaccacctttctggcttggttgagaagaaaaaaggcctgcaaaactggttaatctactacgaaaacaaacatgctaaaaaccctgcaaaaaggccaaaaataaagacaggactgtggggtctttggggacaaagagtggatgctatagaatactaccaaaaagaaattgaggatttatgtaaacaggaggatgaggagagacaaaaggtggtcaatgatccaaattatatcatgccagcagcatttgtgtctttcaaaacacagtggggggctgctgtttgtgctcaaacacagcagacaagtaatccaaccgtgtggttaactgagtgggctccagaacctcgtgatgttttctgggctaatctcgcaatcccttttgttgagctctcagttaggaggcttattgtagctgttgccttcttctttctgacctttttcttcatgataccaattgctattgttcagtccttggcaaacctagatgatatcgtcaaggtgcttcctttcttgaaacctataatcgaaagaaattctcttaagtcagttatccaaggcttcttgccaggaatcatattgaaaatctttcttatacttctcccaacaattctaatggccatgagcaagattgaaggacacacatcgctctctggattggacaggaaaacagcaacgaagtactacattttccttttcgtaaatgtattcttggggagtgtaataactggaacagcattccaacaactagacaacttcatacatcagtccgcaaataaaattccagaggttgttggagagtccattcctatgaaggcagcatttttcatgacatacataatggttgatggctggtctggtatagctgctgaagttcttcggttgaaggcattagtcatattccatataaagaatgcgttcttggtcagaacggagcacgaccgtgagcaggccatggatcctggaagcctggatttttacaactgtgaaccacgattacagctgtattttctgcttgggcttgtatatgcagttgtcacgccaatgcttcttcccttcatcatagtgttcttcagccttgcatatcttgttttcagacatcaggatgctatggtaaaggacacattggaacgggcgcatgacccgactttaaatttgagagagtacctaaagggtgcttatgtgcatccagtcttccagaaaaatgatatctacaaggttatcgccgtcgacgaggaagagaagaaccccatggttgtgacaaagaggcaatctcgcatgaacgcaccggccggaagctaattgaattccagttctggtggtactaacgaaggggaattcagttggatgcctcctacctaaagcctgattctttcatgagcaaatagcccagtaatcttgtaaatgtttggggaaaatggaaatacaggaggcagtaggatagtgaaacaggctgtattatatatgatccacaatttattaatttcattagtgattacaattattaataaaaacaaatttacaattatttttttgtttctttgtaattccatacttctatattccttgaagaaaaagtgtaaaaggcaggaacaaaagctgacgaaaggattagtaattctgccagtgcggtgcaaagttttttttaaaaaaaaaattaaacttgtgttaatgtttg

SEQ ID NO: 214294 - DNA, 1328 bp, Zea Mays
gttgagctatggttgtggaaaggggaatagaagagtattttgctctggaggtgatattgctcaatgtgcccggtgtttatataatggaaactggaaatgggtcgatgatttcttccaaaatgaatatttgctaaattacatcattgcgacttacataaaacctcaggtttccattcttagtggaattgtcatgggtggaggagctggtgtttcaatacatggaagatttcgagttgccactgataacacgatttttgcaatgccagaaacagctctaggcctctttccagatgtaggggcctcttattttctatctcggctaccagggttctatggagaatatgttggtctaactggtgccagattggatggtgcggaaatgcttgcctgtggcctggcaactcattttgtcccgtcaaagaggttgccattgcttgaggaatcgcttaaaaagctggacacgtccagtacttttgctgtgtcgggtattatcgaccagttttcacagaggccattagtgaaagatagcagctctttaaataggatggaaaccatcaacaaatgcttctccaaaaggacagttgaagaaatcatagatgctcttgaacaagaaatctcaaatgtttcagacaaatgggttgctgcaacaatcaagtccctgaaaaaggcttcccccaccagcctaaaaatttctctgagatcgataagagaagggagaacacaaactcttggggagtgcctgcgtcgggaatatagagtggtttgccatgtcctgcgtggcaccttcagccgagacttgtctgagggatttagggctgtgctactagaaaaagacaacaagccagagtggattcctccaaggttggaacaagttcctgacgaggcagttgagcaatatttcttgagaattgatgatccccagtgggaagatctgaacctgcctgcgagacttccccaccgaagaaatattgagtccaagatttgattgaggtcttggacgaagagtgagcctcggtcaggataactcgtcaactcatgtttgaagttgtgtgcggaatgttgacgacgattgataaataataaacgcggactgaatatatgtcttataagttcacgtttatcgctaaataatttttgttgcttttgtgtgaagttgtacctgttagccttgttcggttacagggatgaaattctaccatagatataattcgggtctagattggatgaatcgatacctcacccaatcatatggtaagattaaatccatcatttaatacatacacctcccaaaactagttattcttttcatttatggattctaatataaa

SEQ ID NO: 214295 - DNA, 4501 bp, Zea Mays
ccgagtcgcagggatttttttctactgctactgcgaagtgcattctctccccttccgttcctggctccggccttcccttccttccttcctccgctcgctcgcttccgcttcctcctcctcctgctcgccgcggctcgcgagggaagttccaggcttccagcggagtcgtcctcgcgggagtgcggagccccggcacggcccggcggcgccacctcggcgccggaggagggacgtttgcgctgctcccgagggccgaggcccggatcgccggattcctccacgggctcgctcggatcgaggaggcgcggaggacgaaaggtgacgaggaggtgcgctgacgcttttgctcggctccggttttggctgccggcggagtcgcaatctcggctagatttgccgagctgcggcggtgtcgcaatcccggctagatttgccgcgctgcggcggatgcttcgacgcgcaccggatctccaccgttcctgcggcgcggagtgaaggtacggttcccgaccggattttgggaagatggtgccgtcggggcagcacaacccgatgggcccgggccagcaggtgggcgcgtcgctgctccggactagctccagcctccttggcggcggcgccggcgccggcgccggtggccagccggggatggggatgggcgtcggggtgctcccgtcgcagtcgcccttctcgtccctcgtctcgccgcgcacgcagtatggcggtgttggcggcgggaacggcttgctggcgggcgcgtccagtgtcgcgtccatgctcagcagacagcagtcctatgggaatgggggaactggggtaatgccgggcagcggcgctgggctcccgatcggtgggctgcagcacagaggcggccttgatggcgttggtgacttggttggcactggagggccggattccatggcgttctcttcctcgggccctggtagcttgggcaatcaacttggcgtggacagcttgcagcagcagcagcagctggatgcaccacaagattcacaaaatcagcaagagcatcaacagcaaatgtcaatgacatataatcagcagcatatgatgtcacaaactcagcagcagcagcagcctgcagtgaagttggagaatggaggcgtccttggtggggtcaaactggagcagcagatggggcagcctgatcagagtgtttccgcacagatgctgcgcagttcgagtggtggtgtgaagctcgagccacagttgcaagcgttgaggagcttgggtgctatcaagatggagcaccaaagctcagacccatctgttttactacagcagcagcaacatatgttgcagctgtctaagcagaacccccaggctgcagctactcagttgagcctcctacaacaacagcagcgtttcttacaactgcagcagcagcaacaacagcagcagattctcaagaacctgcctttgcagagaaaccaattgcagcagcagcaacaacagcaacaacaacaacagcaacagcagttgcttcgtcaacaaagtctaaatatgagaaccggtaaatcagctgcttatgaaccaggaacctgtgcaaagaggttgacacattacatgtatcaccagcaaaacaggccacaggacaataacatcgagtactggagaaactttgtcaatgaatactttgccccaagtgccaagaagaggtggtgcgtttctctgtatggcaatggccgtcaaactaccggagttttccctcaggatgtttggcattgtgagatatgcaataggaagccagggcgaggttttgaaacaacggttgaggtcttgccacggttgtgccaaatcaaatatgccagtggtacactcgaggagcttctgtatgttgatatgccgagagagtcccagaattcatctggacagattgttttggactataccaaagcaatccaggagagtgtctttgagcaactgcgtgtagtccgtgaggggcatctaagaattgtattcaaccaagacttgaagattgcatcgtgggagttctgtgcccggcgtcacgaggaacttattcctcggagatcaatcataccacaggtcagtcaacttggtgctgtagtgcagaagtaccagtcttctgttcaaagttcagcatcactatcaagtcaggacttgcaaaacaattgtaactcgtttgtcgcatgtgctcgccagttggctaaggcactggaagtgccattggtaaatgatttaggatacacaaaaagatatgttcgctgcctccagattgcagaggtggttaattgtatgaaagatttgatcgatcatagcaggcagactgggtctggtccaatagagagcttacataaattccctaggagagggaattctggggttagttctgttcaagcccagcagcaatctgaggagcagaagcctgttccacagaattctaaccagagtggtcaaaattctgctcccgcaactggaatgcaagtctctgcctctggaaatggcgatgctacatcaaacaattcactcaattttgcaccatctacttcggcaccatcttcatctgttgttggtctccttcaaggctcagtaaattgcagacaagaccatccaacaagcagcggcaatggtctgtataatggtggaaacagtggtccggttgctaaggccaactcaacaaactccatgcaatcaaatgcaccagcatcgtttcctttgccagcaccctcggcatcaaatggcaatatgatgcctgctcctcagcactcaagccaaatgaattcaccaaccatgtcatcaaacctacctcctatgcaaacacctgcaagccgacctcaggaacccgagccaattgagtctcaaagctcggtccagaggatattgcaagacttgatgatgcaatcccatattaatggtgttggcccagttggcagcgatatgaggagagcaaacacaattactcctggtatgaacggtgtcaactccttagttggtaaccccatgacaaataaccctggaatcaatgggatgggatttgcggccatgggtggccttggtcaacaaatgagaacggcgatggggaacaacgcattggcaatgaatggaaggaccgtgatgaatcacagtgcgcatgacctgacacagttggcccaccagcagcaacagcgcgatttaggaaaccaattgcttgggggccttagagctgcaaacagcttcaataaccttcaatacgactggaagcctgctcagtagagtgagcaggagtcagaaagctcgcacctaatattatacagttatccttgctgggtcggtccatcactgacaacacaaaagttacgcctcaccacaacctgccctccctcagaagcggagtgttcttactgatggtgcatgctacatgttacagcgaatatgaaacatgagcgctgatcggtacatgttacatcaactgtctgtatggctgtctcccattgtgttctgcaaaagtgaggccccgtgaatcagagcctactttcacatgggactcattgtgggtgcaagtgttggcggattccaaactggggcaagatcagggcgtctttctttcccctgtttttccaggttggatgacaacgatttctctcttgcagtctgtactcttgtgtaccatggctctccgtaagttgtgaaagcatgagcacctatttccacctttgatggccaagaatctcattgtagctttgctgtaccatgtataagctgttattaactagtggaaagcagcaggaaaaaaattctgaagggagtgtgaatcttggtgtgtcatctgtgtacctgtgtttctgataaatgctctcgtttaagcaggttgatctttcacatgaccacggcgttcctctcgtttcatttgttggattaaaaatgggttggtagtccggctgtgagtttacgttagtatgtgtcactcgtgagtatttgtattgtgacgggctggtgatgttcagctctggagagtatctgtgtcacaagtctttgttcggtagccagaaggctggatgtgagcagtggctgaagttagcaacgagttgggcaataaataatagtaggagcagtggcaatatgaaactagacccgtttgtttctgattataatctgtgtagattatataatccattgtaaataatcaagatgacaaacaatcaagcagattatgagtagattatacaatttgaagcctagattatgataatcattttatctctcctcaaaaggagcttattagagattcttctatcctccttcacgaacgcacttcttcctccatccgcccgtcgcacttctcccataacctacctacccaccgctactgtatctccatggatgaccatgacgccgacgacaaccagtcgaagcggacactccatcgccggtctcgatctggacaatggcgtggagcactgtccgtcggggcgcaacctcggcacggcgagcgcaggatgtggcattgccactgcagatcacgccgtagatgctgctcgcc

SEQ ID NO: 214296 - DNA, 2900 bp, Zea Mays
ctcccgctgcccaccggctcacctgtccttcatccgccccgatccgaacccattcaattccaaattcacaaccctgccagtggttggcccgccgctgccaaatcgaatcggactccgatccgtgcagcccaccggcgagacggcgagacgccgaagctagcacacttcatgccatctgtctgacgtgatgcgtgtggcctctctgcttttactggatccctagccagctcaggagaaactcagaatagtactatagccaagtccatccagtcctttcgcggcgtcttccttgctcaccgcggctccggcgatgtcggccgccggctcggcggctctacctctccgtctacaactgggtcgtcttctccgtctacaacagccgccatcatggagattcttcatgggcttgtagggttggtgaggtctccagtctctgcaactcttccacaaattggatccagattattcctcacgtgaggtgtcttgtggagttttcccgagacccagtcacatcttcttgctactgccctgatcataagctggtctgtcactgagatcatcaggtactctttctttgcaatgaaggaggcatttggatctgcaccttcctggttatcatggctttggtaaatttggatttttcctccgaatctggagagtaatcctaccacctttgccaaggaaatttcccttgaacgtgtttttgcgtactgatcgtctgcacgtacagcagctttatgctgttctatcctacttgtatctctagtgaagttggtctgatctacatggctttgccttacatgaaggtacaccgatcctactagaaaaccgaagaggtatagtatgcatgctgttcacatctcataactaccatttttaaccgttttttcttgtgggaccacaatttcaagcatcggtcttaggccctgtttgggagggcttcacttcaattattacagctttgattttgcagcttcacaatgaaagcctcaacagattagtcagcggtgttcaagagtgtttggtttgcacatacactctaccttttataatacagtaaatttgtgtgatttttccttaaatatccttgatgattagcgggtgaagaaagagatctaaatcgataagtcatgtaatcaatgtcatgttttttttttaaactatagccggtggaggtaaaatagacttgaaattcttgaagtgaagctctccgagccataagatgcgcaacacatggaacttgtcatacgactacttgtacccatctgttcttgccctcctggtttatgttccaggtaagcctttcccttctctcggctgctgctgtaccgctttacttagatctagcaaacaatgtatgattatcctgtgtccaggaacattttttattatggcagttcatcatgtatgattcttatattgaacttgttttctcttgaaaagatgagatgtgtctcattttattttctctttttttttgtggaaaacgaacatcatctgaggagttggattgcaaaagaccccttcgctaatcggaacaaaaaaaaatcccgttcgccggctcctcccgtcgtgccctcggatatatggccatcgattctgagttctggccacatcaatccccgggatttagaggctgtttgttcgtggctaaatatgtcacactttgattaagcgcttcaatggcggcgggtgacgacgggtcggcggttcggcggctctacctctccgtgtacaactgggttagcttcttcggatggttgcaggtgctgtaccacgtgaccttggcgctgttgggtagcggccatcaggccgtctacgctgctgtcaaactgccactcctgttctcacaaactgctgccctagcagagggctcgtgagatctccaatcagcgcaactcttccacaagttggtgcgaggatatttgttacctggtgcatcgtctggagttttcctgagacacagtcccatgtcctcgttacttccttggtcctaagctggtctatcactgaggtcatcagataccctttctttggcttgagggaggcatttgggatcacaccttcctggctcctatggctcaggtacagcacgttcactgtactctaccctgttgggctgatcagtgagctcggcttaatcttcactgccatgcctcacatgaagggaaggtccttctacatctgcgctgcactgaccactatctacattccagcgttcccgcacatgtacggtcacatgctcgcccagaggaagaagaacctgtccaaggcgaaagccgcatgacgctccagacgagcctaggcctcactgtcccagacggagagtaaccactgtctctaaccacgggatgtcagagtgcactactcttatcaggtggcaataacaccggggttgtaccaaggaatatactggatagctcttccatgggcaaatcaataataaataaaatcaccatttatataagtggatactcttttttttaaaaaaaaatacacatatatcgttggagttcttggtccaagtctatttaccttataattgatccaacccgctctttatagtaatataatagtatggtgcaaaatgtaaataatagaagtggaagaaaaccaatttaaatcgcttaccttttgccactgtatgaaactatgaatagagtcgtaagaagagagtaagctatagttacacgtacgcgcgcgcgcatattattgtgatcggtgatttttctgtctctattttttttgtcaaaattttactttaatttcaacaatatcttgctcattaagttcaggaacgttttatggttgagtaatatcataagatactgttagaatctatactgtataggatcgatttctaagtccctagaataccaatccgtaactgaaagtaaaac

SEQ ID NO: 214297 - DNA, 3942 bp, Zea Mays
ccttcatccgccccgatccgaacccattcaattccaaattcacaaccctgccagtggttggcccgccgctgccaaatcgaatcggactccgatccgtgcagcccaccggcgagacggcgagacgccgaagctagcacacttcatgccatctgtctgacgtgatgcgtgtggcctctctgcttttactggatccctagccagctcaggagaaactcagaatagtactatagccaagtccatccagtcctttcgcggcgtcttccttgctcaccgcggctccggcgatgtcggccgccggctcggcggctctacctctccgtctacaactgggtcgtcttctccgtctacaacagccgccatcatggagattcttcatgggcttgtagggttggtgaggtctccagtctctgcaactcttccacaaattggatccagattattcctcacgtgaggtgtcttgtggagttttcccgagacccagtcacatcttcttgctactgccctgatcataagctggtctgtcactgagatcatcaggtactctttctttgcaatgaaggaggcatttggatctgcaccttcctggttatcatggctttggtaaatttggatttttcctccgaatctggagagtaatcctaccacctttgccaaggaaatttcccttgaacgtgtttttgcgtactgatcgtctgcacgtacagcagctttatgctgttctatcctacttgtatctctagtgaagttggtctgatctacatggctttgccttacatgaaggtacaccgatcctactagaaaaccgaagaggtatagtatgcatgctgttcacatctcataactaccatttttaaccgttttttcttgtgggaccacaatttcaagcatcggtcttaggccctgtttgggagggcttcacttcaattattacagctttgattttgcagcttcacaatgaaagcctcaacagattagtcagcggtgttcaagagtgtttggtttgcacatacactctaccttttataatacagtaaatttgtgtgatttttccttaaatatccttgatgattagcgggtgaagaaagagatctaaatcgataagtcatgtaatcaatgtcatggtaggtaatttttgtgcaacttcatgagaaagtatgaaaacggtgtttttaaagcacccttcgagaagctttaaaaattttatgaaattggtctctggtttcagttttttttttaaactatagccggtggaggtaaaatagacttgaaattcttgaagtgaagctctccgagccataagatgcgcaacacatggaacttgtcatacgactacttgtacccatctgttcttgccctcctggtttatgttccagttggattgcaaaagaccccttcgctaatcggaacaaaaaaaaatcccgttcgccggctcctcccgtcgtgccctcggatatatggccatcgattctgagttctggccacatcaatccccgggatttagaggctgtttgttcgtggctaaatatgtcacactttgattaagaaaggagaatttgctggccatatacttggatttagcgtgggtgcctgggtggtgtactggtgtctggtaaccagtagcggctagcaacagccgtcaaagccaccaccttaaagccatgggcagcagcatctcagggtcttcgtcttcctccctgcagcgcttcaatggcggcgggtgacgacgggtcggcggttcggcggctctacctctccgtgtacaactgggttagcttcttcggatggttgcaggtgctgtaccacgtgaccttggcgctgttgggtagcggccatcaggccgtctacgctgctgtcaaactgccactcctgttctcacaaactgctgccctagcagaggccgtcggctagtagaagacgctacggattaaaatcaagcgaacaggttagacaataatatataggcagttgtgtttcctttatctccacataaacaatggatctaaacattaaatactaaacacagacaaaatccaataaaagcactatgcaaatatttttactggatcagctacataattttgctagaaagattatatgtgtccaaaggggcacacttagaccccaggccatgttcagttattcctacgccacaggggttaaatgagtttggaagattttagtagaacttttaacctaatgtggatttaaacccactcaattccctcccatctatatctattgagatgaaaacgaacaagttctcaatgaaaatccatctgtttgagttattaatacatgtgataacacttttagaaaaaaaaggaaacattgcatctaatatgtgatgatcatcgacatgaccaggcatgtattggtaaaataggtactaagatagacaagtttccatccgagaccaagccattaaatttaatttttatcaatataatgtatgtatgtttaatgacagtgttggaagagagtttattaacaaataggaagacagtttgtatccaatctttcaatttagttgttattattacacgtagtacccctgtgtggtcctacaagaaactttgtggaattccttgtatcatcctagccgtggattatcagtgtttatatttctttgcacatgtactaatttactaagtaattgagtttcactggtgatgctgtctcgctggtagcacagattcttcattctattacaggtaaaagaggttcttctttcttcccaatttatgtttttcgatctttatcaggactgagactttctaaacaatgaaaatatatcctcaaagattccaacttgaaaaatatatatattttttaaaaaaaattgactctcttgcattggttttcttttaatttaaaaaaaaactacgcaacgatgatatgttgaactgctaaaagggctcgtgagatctccaatcagcgcaactcttccacaagttggtgcgaggatatttgttacctggtgcatcgtctggagttttcctgagacacagtcccatgtcctcgttacttccttggtcctaagctggtctatcactgaggtcatcagataccctttctttggcttgagggaggcatttgggatcacaccttcctggctcctatggctcaggtacagcacgttcactgtactctaccctgttgggctgatcagtgagctcggcttaatcttcactgccatgcctcacatgaagggaaggtccttctacatctgcgctgcactgaccactatctacattccagcgttcccgcacatgtacggtcacatgctcgcccagaggaagaagaacctgtccaaggcgaaagccgcatgacgctccagacgagcctaggcctcactgtcccagacggagagtaaccactgtctctaaccacgggatgtcagagtgcactactcttatcaggtggcaataacaccggggttgtaccaaggaatatactggatagctcttccatgggcaaatcaataataaataaaatcaccatttatataagtggatactcttttttttaaaaaaaaatacacatatatcgttggagttcttggtccaagtctatttaccttataattgatccaacccgctctttatagtaatataatagtatggtgcaaaatgtaaataatagaagtggaagaaaaccaatttaaatcgcttaccttttgccactgtatgaaactatgaatagagtcgtaagaagagagtaagctatagttacacgtacgcgcgcgcgcatattattgtgatcggtgatttttctgtctctattttttttgtcaaaattttactttaatttcaacaatatcttgctcattaagttcaggaacgttttatggttgagtaatatcataagatactgttagaatctatactgtataggatcgatttctaagtccctagaataccaatccgtaactgaaagtaaaac

SEQ ID NO: 214298 - DNA, 3044 bp, Zea Mays
caattccaaattcacaaccctgccagtggttggcccgccgctgccaaatcgaatcggactccgatccgtgcagcccaccggcgagacggcgagacgccgaagctagcacacttcatgccatctgtctgacgtgatgcgtgtggcctctctgcttttactggatccctagccagctcaggagaaactcagaatagtactatagccaagtccatccagtcctttcgcggcgtcttccttgctcaccgcggctccggcgatgtcggccgccggctcggcggctctacctctccgtctacaactgggtcgtcttctccgtctacaacagccgccatcatggagattcttcatgggcttgtagggttggtgaggtctccagtctctgcaactcttccacaaattggatccagattattcctcacgtgaggtgtcttgtggagttttcccgagacccagtcacatcttcttgctactgccctgatcataagctggtctgtcactgagatcatcaggtactctttctttgcaatgaaggaggcatttggatctgcaccttcctggttatcatggctttggtaaatttggatttttcctccgaatctggagagtaatcctaccacctttgccaaggaaatttcccttgaacgtgtttttgcgtactgatcgtctgcacgtacagcagctttatgctgttctatcctacttgtatctctagtgaagttggtctgatctacatggctttgccttacatgaaggtacaccgatcctactagaaaaccgaagaggtatagtatgcatgctgttcacatctcataactaccatttttaaccgttttttcttgtgggaccacaatttcaagcatcggtcttaggccctgtttgggagggcttcacttcaattattacagctttgattttgcagcttcacaatgaaagcctcaacagattagtcagcggtgttcaagagtgtttggtttgcacatacactctaccttttataatacagtaaatttgtgtgatttttccttaaatatccttgatgattagcgggtgaagaaagagatctaaatcgataagtcatgtaatcaatgtcatggtaggtaatttttgtgcaacttcatgagaaagtatgaaaacggtgtttttaaagcacccttcgagaagctttaaaaattttatgaaattggtctctggtttcagttttttttttaaactatagccggtggaggtaaaatagacttgaaattcttgaagtgaagctctccgagccataagatgcgcaacacatggaacttgtcatacgactacttgtacccatctgttcttgccctcctggtttatgttccaggtaagcctttcccttctctcggctgctgctgtaccgctttacttagatctagcaaacaatgtatgattatcctgtgtccaggaacattttttattatggcagttcatcatgtatgattcttatattgaacttgttttctcttgaaaagatgagatgtgtctcattttattttctctttttttttgtggaaaacgaacatcatctgaggagttggattgcaaaagaccccttcgctaatcggaacaaaaaaaaatcccgttcgccggctcctcccgtcgtgccctcggatatatggccatcgattctgagttctggccacatcaatccccgggatttagaggctgtttgttcgtggctaaatatgtcacactttgattaagaaaggagaatttgctggccatatacttggatttagcgtgggtgcctgggtggtgtactggtgtctggtaaccagtagcggctagcaacagccgtcaaagccaccaccttaaagccatgggcagcagcatctcagggtcttcgtcttcctccctgcagcgcttcaatggcggcgggtgacgacgggtcggcggttcggcggctctacctctccgtgtacaactgggttagcttcttcggatggttgcaggtgctgtaccacgtgaccttggcgctgttgggtagcggccatcaggccgtctacgctgctgtcaaactgccactcctgttctcacaaactgctgccctagcagagattcttcattctattacagggctcgtgagatctccaatcagcgcaactcttccacaagttggtgcgaggatatttgttacctggtgcatcgtctggagttttcctgagacacagtcccatgtcctcgttacttccttggtcctaagctggtctatcactgaggtcatcagataccctttctttggcttgagggaggcatttgggatcacaccttcctggctcctatggctcagggaaggtccttctacatctgcgctgcactgaccactatctacattccagcgttcccgcacatgtacggtcacatgctcgcccagaggaagaagaacctgtccaaggcgaaagccgcatgacgctccagacgagcctaggcctcactgtcccagacggagagtaaccactgtctctaaccacgggatgtcagagtgcactactcttatcaggtggcaataacaccggggttgtaccaaggaatatactggatagctcttccatgggcaaatcaataataaataaaatcaccatttatataagtggatactcttttttttaaaaaaaaatacacatatatcgttggagttcttggtccaagtctatttaccttataattgatccaacccgctctttatagtaatataatagtatggtgcaaaatgtaaataatagaagtggaagaaaaccaatttaaatcgcttaccttttgccactgtatgaaactatgaatagagtcgtaagaagagagtaagctatagttacacgtacgcgcgcgcgcatattattgtgatcggtgatttttctgtctctattttttttgtcaaaattttactttaatttcaacaatatcttgctcattaagttcaggaacgttttatggttgagtaatatcataagatactgttagaatctatactgtataggatcgatttctaagtccctagaataccaatccgtaactgaaagtaaaac

SEQ ID NO: 214299 - DNA, 4037 bp, Zea Mays
ctgccagtggttggcccgccgctgccaaatcgaatcggactccgatccgtgcagcccaccggcgagacggcgagacgccgaagctagcacacttcatgccatctgtctgacgtgatgcgtgtggcctctctgcttttactggatccctagccagctcaggagaaactcagaatagtactatagccaagtccatccagtcctttcgcggcgtcttccttgctcaccgcggctccggcgatgtcggccgccggctcggcggctctacctctccgtctacaactgggtcgtcttctccgtctacaacagccgccatcatggagattcttcatgggcttgtagggttggtgaggtctccagtctctgcaactcttccacaaattggatccagattattcctcacgtgaggtgtcttgtggagttttcccgagacccagtcacatcttcttgctactgccctgatcataagctggtctgtcactgagatcatcaggtactctttctttgcaatgaaggaggcatttggatctgcaccttcctggttatcatggctttggtaaatttggatttttcctccgaatctggagagtaatcctaccacctttgccaaggaaatttcccttgaacgtgtttttgcgtactgatcgtctgcacgtacagcagctttatgctgttctatcctacttgtatctctagtgaagttggtctgatctacatggctttgccttacatgaaggtacaccgatcctactagaaaaccgaagaggtatagtatgcatgctgttcacatctcataactaccatttttaaccgttttttcttgtgggaccacaatttcaagcatcggtcttaggccctgtttgggagggcttcacttcaattattacagctttgattttgcagcttcacaatgaaagcctcaacagattagtcagcggtgttcaagagtgtttggtttgcacatacactctaccttttataatacagtaaatttgtgtgatttttccttaaatatccttgatgattagcgggtgaagaaagagatctaaatcgataagtcatgtaatcaatgtcatgttttttttttaaactatagccggtggaggtaaaatagacttgaaattcttgaagtgaagctctccgagccataagatgcgcaacacatggaacttgtcatacgactacttgtacccatctgttcttgccctcctggtttatgttccagttggattgcaaaagaccccttcgctaatcggaacaaaaaaaaatcccgttcgccggctcctcccgtcgtgccctcggatatatggccatcgattctgagttctggccacatcaatccccgggatttagaggctgtttgttcgtggctaaatatgtcacactttgattaagaaaggagaatttgctggccatatacttggatttagcgtgggtgcctgggtggtgtactggtgtctggtaaccagtagcggctagcaacagccgtcaaagccaccaccttaaagccatgggcagcagcatctcagggtcttcgtcttcctccctgcagcgcttcaatggcggcgggtgacgacgggtcggcggttcggcggctctacctctccgtgtacaactgggttagcttcttcggatggttgcaggtgctgtaccacgtgaccttggcgctgttgggtagcggccatcaggccgtctacgctgctgtcaaactgccactcctgttctcacaaactgctgccctagcagaggtaaactggtcttaagcctagtcgcatgttttatcgaacgtattaatgtgataattttagcgaagatcacaggtctaggactctaggatttgaaactctctcgtctcgtcgattgttttgaaatggatgtagaggtgtttggtttatcgagactaaattttagtttctctattttatttattttaattcctaaattataaacaaacgtttttgccccgcatcaccctcttgcatgtgcggcagcaggccgtcggctagtagaagacgctacggattaaaatcaagcgaacaggttagacaataatatataggcagttgtgtttcctttatctccacataaacaatggatctaaacattaaatactaaacacagacaaaatccaataaaagcactatgcaaatatttttactggatcagctacataattttgctagaaagattatatgtgtccaaaggggcacacttagaccccaggccatgttcagttattcctacgccacaggggttaaatgagtttggaagattttagtagaacttttaacctaatgtggatttaaacccactcaattccctcccatctatatctattgagatgaaaacgaacaagttctcaatgaaaatccatctgtttgagttattaatacatgtgataacacttttagaaaaaaaaggaaacattgcatctaatatgtgatgatcatcgacatgaccaggcatgtattggtaaaataggtactaagatagacaagtttccatccgagaccaagccattaaatttaatttttatcaatataatgtatgtatgtttaatgacagtgttggaagagagtttattaacaaataggaagacagtttgtatccaatctttcaatttagttgttattattacacgtagtacccctgtgtggtcctacaagaaactttgtggaattccttgtatcatcctagccgtggattatcagtgtttatatttctttgcacatgtactaatttactaagtaattgagtttcactggtgatgctgtctcgctggtagcacagattcttcattctattacaggtaaaagaggttcttctttcttcccaatttatgtttttcgatctttatcaggactgagactttctaaacaatgaaaatatatcctcaaagattccaacttgaaaaatatatatattttttaaaaaaaattgactctcttgcattggttttcttttaatttaaaaaaaaactacgcaacgatgatatgttgaactgctaaaagggctcgtgagatctccaatcagcgcaactcttccacaagttggtgcgaggatatttgttacctggtgcatcgtctggagttttcctgagacacagtcccatgtcctcgttacttccttggtcctaagctggtctatcactgaggtcatcagataccctttctttggcttgagggaggcatttgggatcacaccttcctggctcctatggctcaggtacagcacgttcactgtactctaccctgttgggctgatcagtgagctcggcttaatcttcactgccatgcctcacatgaagggaaggtccttctacatctgcgctgcactgaccactatctacattccagcgttcccgcacatgtacggtcacatgctcgcccagaggaagaagaacctgtccaaggcgaaagccgcatgacgctccagacgagcctaggcctcactgtcccagacggagagtaaccactgtctctaaccacgggatgtcagagtgcactactcttatcaggtggcaataacaccggggttgtaccaaggaatatactggatagctcttccatgggcaaatcaataataaataaaatcaccatttatataagtggatactcttttttttaaaaaaaaatacacatatatcgttggagttcttggtccaagtctatttaccttataattgatccaacccgctctttatagtaatataatagtatggtgcaaaatgtaaataatagaagtggaagaaaaccaatttaaatcgcttaccttttgccactgtatgaaactatgaatagagtcgtaagaagagagtaagctatagttacacgtacgcgcgcgcgcatattattgtgatcggtgatttttctgtctctattttttttgtcaaaattttactttaatttcaacaatatcttgctcattaagttcaggaacgttttatggttgagtaatatcataagatactgttagaatctatactgtataggatcgatttctaagtccctagaataccaatccgtaactgaaagtaaaac

SEQ ID NO: 214300 - DNA, 2299 bp, Zea Mays
ccgctgccaaatcgaatcggactccgatccgtgcagcccaccggcgagacggcgagacgccgaagctagcacacttcatgccatctgtctgacgtgatgcgtgtggcctctctgcttttactggatccctagccagctcaggagaaactcagaatagtactatagccaagtccatccagtcctttcgcggcgtcttccttgctcaccgcggctccggcgatgtcggccgccggctcggcggctctacctctccgtctacaactgggtcgtcttctccgtctacaacagccgccatcatggagattcttcatgggcttgtagggttggtgaggtctccagtctctgcaactcttccacaaattggatccagattattcctcacgtgaggtgtcttgtggagttttcccgagacccagtcacatcttcttgctactgccctgatcataagctggtctgtcactgagatcatcaggtactctttctttgcaatgaaggaggcatttggatctgcaccttcctggttatcatggctttggtaaatttggatttttcctccgaatctggagagtaatcctaccacctttgccaaggaaatttcccttgaacgtgtttttgcgtactgatcgtctgcacgtacagcagctttatgctgttctatcctacttgtatctctagtgaagttggtctgatctacatggctttgccttacatgaaggtacaccgatcctactagaaaaccgaagaggtatagtatgcatgctgttcacatctcataactaccatttttaaccgttttttcttgtgggaccacaatttcaagcatcggtcttaggccctgtttgggagggcttcacttcaattattacagctttgattttgcagcttcacaatgaaagcctcaacagattagtcagcggtgttcaagagtgtttggtttgcacatacactctaccttttataatacagtaaatttgtgtgatttttccttaaatatccttgatgattagcgggtgaagaaagagatctaaatcgataagtcatgtaatcaatgtcatggtaggtaatttttgtgcaacttcatgagaaagtatgaaaacggtgtttttaaagcacccttcgagaagctttaaaaattttatgaaattggtctctggtttcagttttttttttaaactatagccggtggaggtaaaatagacttgaaattcttgaagtgaagctctccgagccataagatgcgcaacacatggaacttgtcatacgactacttgtacccatctgttcttgccctcctggtttatgttccagttggattgcaaaagaccccttcgctaatcggaacaaaaaaaaatcccgttcgccggctcctcccgtcgtgccctcggatatatggccatcgattctgagttctggccacatcaatccccgggatttagaggctgtttgttcgtggctaaatatgtcacactttgattaagaaaggagaatttgctggccatatacttggatttagcgtgggtgcctgggtggtgtactggtgtctggtaaccagtagcggctagcaacagccgtcaaagccaccaccttaaagccatgggcagcagcatctcagggtcttcgtcttcctccctgcagcgcttcaatggcggcgggtgacgacgggtcggcggttcggcggctctacctctccgtgtacaactgggttagcttcttcggatggttgcaggtgctgtaccacgtgaccttggcgctgttgggtagcggccatcaggccgtctacgctgctgtcaaactgccactcctgttctcacaaactgctgccctagcagagcaggccgtcggctagtagaagacgctacggattaaaatcaagcgaacaggttagacaataatatataggcagttgtgtttcctttatctccacataaacaatggatctaaacattaaatactaaacacagacaaaatccaataaaagcactatgcaaatatttttactggatcagctacataattttgctagaaagattatatgtgtccaaaggggcacacttagaccccaggccatgttcagttattcctacgccacaggggttaaatgagtttggaagattttagtagaacttttaacctaatgtggatttaaacccactcaattccctcccatctatatctattgagatgaaaacgaacaagttctcaatgaaaatccatctgtttgagttattaatacatgtgataacacttttagaaaaaaaaggaaacattgcatctaatatgtgatgatcatcgacatgac

SEQ ID NO: 214301 - DNA, 2168 bp, Zea Mays
ccgctgccaaatcgaatcggactccgatccgtgcagcccaccggcgagacggcgagacgccgaagctagcacacttcatgccatctgtctgacgtgatgcgtgtggcctctctgcttttactggatccctagccagctcaggagaaactcagaatagtactatagccaagtccatccagtcctttcgcggcgtcttccttgctcaccgcggctccggcgatgtcggccgccggctcggcggctctacctctccgtctacaactgggtcgtcttctccgtctacaacagccgccatcatggagattcttcatgggcttgtagggttggtgaggtctccagtctctgcaactcttccacaaattggatccagattattcctcacgtgaggtgtcttgtggagttttcccgagacccagtcacatcttcttgctactgccctgatcataagctggtctgtcactgagatcatcaggtactctttctttgcaatgaaggaggcatttggatctgcaccttcctggttatcatggctttggtaaatttggatttttcctccgaatctggagagtaatcctaccacctttgccaaggaaatttcccttgaacgtgtttttgcgtactgatcgtctgcacgtacagcagctttatgctgttctatcctacttgtatctctagtgaagttggtctgatctacatggctttgccttacatgaaggtacaccgatcctactagaaaaccgaagaggtatagtatgcatgctgttcacatctcataactaccatttttaaccgttttttcttgtgggaccacaatttcaagcatcggtcttaggccctgtttgggagggcttcacttcaattattacagctttgattttgcagcttcacaatgaaagcctcaacagattagtcagcggtgttcaagagtgtttggtttgcacatacactctaccttttataatacagtaaatttgtgtgatttttccttaaatatccttgatgattagcgggtgaagaaagagatctaaatcgataagtcatgtaatcaatgtcatgttttttttttaaactatagccggtggaggtaaaatagacttgaaattcttgaagtgaagctctccgagccataagatgcgcaacacatggaacttgtcatacgactacttgtacccatctgttcttgccctcctggtttatgttccagttggattgcaaaagaccccttcgctaatcggaacaaaaaaaaatcccgttcgccggctcctcccgtcgtgccctcggatatatggccatcgattctgagttctggccacatcaatccccgggatttagaggctgtttgttcgtggctaaatatgtcacactttgattaaggccgtcaaagccaccaccttaaagccatgggcagcagcatctcagggtcttcgtcttcctccctgcagcgcttcaatggcggcgggtgacgacgggtcggcggttcggcggctctacctctccgtgtacaactgggttagcttcttcggatggttgcaggtgctgtaccacgtgaccttggcgctgttgggtagcggccatcaggccgtctacgctgctgtcaaactgccactcctgttctcacaaactgctgccctagcagagattcttcattctattacagggctcgtgagatctccaatcagcgcaactcttccacaagttggtgcgaggatatttgttacctggtgcatcgtctggagttttcctgagacacagtcccatgtcctcgttacttccttggtcctaagctggtctatcactgaggtcatcagataccctttctttggcttgagggaggcatttgggatcacaccttcctggctcctatggctcaggtacagcacgttcactgtactctaccctgttgggctgatcagtgagctcggcttaatcttcactgccatgcctcacatgaaggtgagtgagctgaagaaacctgcaggagcccatgcatgctgctcatcagtgtgaggctcatcagctgggcagcgagtttgacctagtcttggcaacaactttgcagggaaggtccttctacatctgcgctgcactgaccactatctacattccaggatcaggatctgacatgacatggcgcgctctgctgcatgctgcttctttttggctctcag

SEQ ID NO: 214302 - DNA, 329 bp, Zea Mays
gggtgggcttccagatccagcggcctcaccatcaccacccgacacgaggacacgcgacgactgactaggcgaggggagcagtcggcgggcgatggtcggcggcggcgcacatggcggcaccacctacaaaggctacaccatcccgcacaacaagcgctggcacaccgtcgccggcaagggcctctgcgctgtgatgtggttctgggtcttctacagggctaagcaggatggtgctacgctcttgggtttgcgtcatccttgggatgggcatgatgaccactctcatggtcatggacatgggaatgagacatagctgttagcagcaaagt

SEQ ID NO: 214303 - DNA, 247 bp, Zea Mays
ccagatccagcggcctcaccatcaccacccgacacgaggacacgcgacgactgactaggcgaggggagcagtcggcgggcgatggtcggcggcggcgcacatggcggcaccacctacaaaggctacaccatcccgcacaacaagcgctggcacaccgtcgccggcaagggcctctgcgctgtgatgtggttctgggtcttctacagggctaagcaggatggtgctacgctcttgttaaagtgaaatg

SEQ ID NO: 214304 - DNA, 1901 bp, Zea Mays
ctttgacacgcagtcacgccctccgcaaaactcccccactccacgcccggccgcacctctcctatcttgctccaagcagcaagttccaactcgagtagattcacttcgccactccgttgccctctcctccgccgcccgatcctttccccgtctgagatggcatctccggcatcggcgtcgcttaaggaagccgtgggcagcctcgaccgcgacggctttgttggtctcctctccaacctcatcggcgagaccgcacacctgcagaacgacccgccgacctacaggcctcaggaggagcgcgtggcgcagcacgtagtcgacgtgctccgcccggtgtccgcggacaccgggggcggccccctccttgtgcggaagataagctacgccgagggcaggagcaacgtcatcgttgaataccccggcaccgtcccaggccgcgttgtctccttcgtcggcatgcacatggacgtcgtccctgccaacggcagcgagactttgatcctttctcactaacctttgatagcgaggataaggacaaacttcggggacgtgggacaaccgactgtcttggacatgtcgcactggtggctcagctaatgcggcggcttggtgaggtcaagccacccctgaaacattctgtcattgctgtgttcattgccaatgaggagaactcatctgtcactggcattggtgttgatggcctcgtgaaggatggattacttgacaagctcaaaacaggacccttgttttggatagatacagctgataagcagccatgcattggcactggtggaatgattccatggcatctcaaggcaacagggaagctgttccacagtggccttgcacataaggccataaatgcaatggagatgaacatggaagcactaaaggtaatccaaaaacggttttacactgacttccctccacatgagaaagagaaggtctataaatttgctactccatctacaatgaagccaactaaatggagctatcctggcggggggcttaatcaaattccgggagaatgcacaatttcaggggatgtaaggttgactcctttctatagcacttcgcatgtcatggagaagttgaaggaatatgtagaggacatcaatgagagatttgaaacagtacttgatactcgtggtcctgtgtccaaatatattcttcctgatgaaaatctacaaggaaggcttgaaatcacttttgatggagatgtgatgaatggggtggcttgcaatctggagtctcgaggctatcatgcattatgcaaagcaaccaaggaaatagttggccacgtggagccatattccatcaccgggagtctacctctaatccgggaattacaggacgagggatttgatgttcaaacagctggatatggcttactgaagacgtaccatgcgaagaacgagtactgtctgttttcagacatggcccagggctttcaggtgtttctgagcatcatttcacagctggaagaagaggtctgagccttcttgatgggatagaccaatactccctccgtttcgttttagttgtcgctggatagtgcaaaattgaactatccagcgacaactaaaaagaaacggagggagtacctccaatttacattactcgttgctcagtgatctgtttaatacctccaatttacatcactggttgctcagttgtctgtttacaactcttttcaagattccgggacacggacatctaacaagccttcgaggttgtctgtcacccgttgaaaacggagccatttcaccgcagtgttctcgtgggcataaaacctttgtgctacaacttggcataaaatctttgtgctacaactctacgtaggcattacaactcgttgtatgaacttgaaattaatatatctcccatttccaaaaaaaaaa

SEQ ID NO: 214305 - DNA, 1796 bp, Zea Mays
cgcagtcacgccctccgcaaaactcccccactccacgcccggccgcacctctcctatcttgctccaagcagcaagttccaactcgagtagattcacttcgccactccgttgccctctcctccgccgcccgatcctttccccgtctgagatggcatctccggcatcggcgtcgcttaaggaagccgtgggcagcctcgaccgcgacggctttgttggtctcctctccaacctcatcggcgagaccgcacacctgcagaacgacccgccgacctacaggcctcaggaggagcgcgtggcgcagcacgtagtcgacgtgctccgcccggtgtccgcggacaccgggggcggccccctccttgtgcggaagataagctacgccgagggcaggagcaacgtcatcgttgaataccccggcaccgtcccaggccgcgttgtctccttcgtcggcatgcacatggacgtcgtccctgccaacggcagcgagtgggactttgatcctttctcactaacctttgatagcgaggataaggacaaacttcggggacgtgggacaaccgactgtcttggacatgtcgcactggtggctcagctaatgcggcggcttggatggattacttgacaagctcaaaacaggacccttgttttggatagatacagctgataagcagccatgcattggcactggtggaatgattccatggcatctcaaggcaacagggaagctgttccacagtggccttgcacataaggccataaatgcaatggagatgaacatggaagcactaaaggtaatccaaaaacggttttacactgacttccctccacatgagaaagagaaggtctataaatttgctactccatctacaatgaagccaactaaatggagctatcctggcggggggcttaatcaaattccgggagaatgcacaatttcaggggatgtaaggttgactcctttctatagcacttcgcatgtcatggagaagttgaaggaatatgtagaggacatcaatgagagatttgaaacagtacttgatactcgtggtcctgtgtccaaatatattcttcctgatgaaaatctacaaggaaggcttgaaatcacttttgatggagatgtgatgaatggggtggcttgcaatctggagtctcgaggctatcatgcattatgcaaagcaaccaaggaaatagttggccacgtggagccatattccatcaccgggagtctacctctaatccgggaattacaggacgagggatttgatgttcaaacagctggatatggcttactgaagacgtaccatgcgaagaacgagtactgtctgttttcagacatggcccagggctttcaggtgtttctgagcatcatttcacagctggaagaagaggtctgagccttcttgatgggatagaccaatactccctccgtttcgttttagttgtcgctggatagtgcaaaattgaactatccagcgacaactaaaaagaaacggagggagtacctccaatttacattactcgttgctcagtgatctgtttaatacctccaatttacatcactggttgctcagttgtctgtttacaactcttttcaagattccgggacacggacatctaacaagccttcgaggttgtctgtcacccgttgaaaacggagccatttcaccgcagtgttctcgtgggcataaaacctttgtgctacaacttggcataaaatctttgtgctacaactctacgtaggcattacaactcgttgtatgaacttgaaattaatatatctcccatttccaaaaaaaaaa

SEQ ID NO: 214306 - DNA, 2979 bp, Zea Mays
cgcggccgtcgtcttctctccccccgcatggtggcccgtcgtccccttccaaccctcctccctcgcctgccggtgtccctttcttcccccgtgtggcggctcgcacccgcacgagatctagactaccttcccaccctcctcccctgcccgctcgcctgtcggcgtccctttcttctccccgtgcggcggcccgcgcccgcacgagatctagactagacgccgagggcacgacgctttgcctgcctcgcctccgtcccctcgtcgcctccacgactccacctctacctcctcggtgagagagagagagagcgggggagagagggcactagaccaccagcaagcatgaggcagaggaggagcgtggcggcgccgctacactctaatccgctggctaccccatcaggagagagagagaggggggagagaaggcaccagacaccgccagtaagcatgaggcagagaaggcaccagacatcgcgctatcctccgcatccgccgcccgtcggcttcgtccgctgcgagaattctcgtgtcgcccatcggcgacaactgtccgggtgctgcaagccaccgacggtgtgcgggtacgcgtacgcgagcccgacggcgtggacgagcccggcggcggacgcggactgcgtggcgtggagcaacgaccccgacctgctctgctacgcctgcgcctcatgcaaggccggcgtgctgggcggcttgcacgagcagtggcgcagggccaccatcgcgctcatcttcgtctacgtcgtcggctgcagcgcgttccgtaacgcgcagaccgaggacctcttccgccgctacaaatggggaaattattaacgatctctcccactgatctactgcgtacgtacgtacacgccgacttgaaacgggaggttacagcggcagcggtggacaatttggctggttggatcttatttgtgcgctcgtattgtatgttttatgcagagtcggaaggacgtggagggtcgctcttagtcatcaagaggtccgtctctttctgacgtgtttgcatacaaacagaaaatcttatagtttgccaatgtcgtttgttctagcaattttctatctactaaatcataaacatattagttgtttggcatagtagatcaaatgcataatctaattactggactagaaaaaatatgatccgttgtgctttgaatggtttctctctgtttcctagatgcagagcatggctcttattctttgcatgtttaaatcgattgtagtgatttgtttagttctgctctgcaaccctttgagagatacatacctgggtttgtatatttgtccatttcagaggtcaatgtattaccttgtcaggcagcttcaagatttctaaaattgacaaaaatggttggaagatcaaacatcgagaattcactttctacaagtggaacaattgcatatgagggcattgatctattgacatgtgcccatatttctatttatttgtcttcaagttctagatatctctcttattctgatttctagatatctctctaaaatttatggttgtgttagatatctctcttattctgatttctagatatccctcttattctgatttctagatgtgcttggtacaggtcagttttacctgatattctgtttttgttccttgtttgtttgaactgaggttgatttaggttgtgaacttgtgatgacaaaaataacatcctgctgataacctcaaatggcctgtctacgagatggaaaatggcctgatgataacctcaaaattttctccattatgggcaacaactattgagcagccaagatatcaacaacgaagaataaccaatttcgaattcacatcaatcaacaataggacctgtccctgatcaacttcaaaagcgcttaggaagacgttttcagctgaaaagaagaaaagtaaaatccggaaggcatgggatggaactaaagtcatttataatgttgcttcatggggcaccactgctgttggggtctacaataatcgagcattacttacgatcgcaactacaacgtttcagacttcctgccgtgtgatatccaagttcctttgaatattgtgtcaactactagggcatgttagaattgcttgcgtgtgtgcttttccattgttcaggtagcataaagtttgagaccatttgtttattctatgctgatgagttcgactgctaattagcaggaccttccagtcaaaagcagcatgtgtattgtataactgtaaatattgccttgatttgaacaaatttgttttttgtgctagaactttatttcacgaacttcatatgatagaccctactttagagtatttctttctcttctcatttcacattattgttatcacttctctttcaatgagaattttctttcttattttattttattttattttatgtagaagtgtagaaccatatagtctctttggctaatttaatatggttttgttatctggaaatcttgactaatatatttatcacatctttaaaagtggtattttgaattattagatcgacatgttaacaactgggtgggggtattctatctactatctttactactataacacactacttttaatagttctagtcgtggtttttgtgcgtcgcgcccccacccgctcgctcgttttccacgctgtgctatccaggagcgtccgtccgctctctgacatccacaaacactatcctttgagcattacatatctttttgaactgatttagttgtgcattaccattttattcaaaattttgtatgccgtcgcaacgcacgggcacttacctagtaataccatatattgacacatacatctaaatccatataaaaattacactgaaacatataataccatatattcactatacctctacactttgagaaatgaggaacaagatatatggttttgtagtcaaggaagaaaaaaaccaacattcgttaattgagaaggtgtttttttcagaaaaaataacaaaa

SEQ ID NO: 214307 - DNA, 3010 bp, Zea Mays
ccgccgcatcctcagatcaataccgcggccgtcgtcttctctccccccgcatggtggcccgtcgtccccttccaaccctcctccctcgcctgccggtgtccctttcttcccccgtgtggcggctcgcacccgcacgagatctagactaccttcccaccctcctcccctgcccgctcgcctgtcggcgtccctttcttctccccgtgcggcggcccgcgcccgcacgagatctagactagacgccgagggcacgacgctttgcctgcctcgcctccgtcccctcgtcgcctccacgactccacctctacctcctcggtgagagagagagagagcgggggagagagggcactagaccaccagcaagcatgaggcagaggaggagcgtggcggcgccgctacactctaatccgctggctaccccatcaggagagagagagaggggggagagaaggcaccagacaccgccagtaagcatgaggcagagaaggcaccagacatcgcgctatcctccgcatccgccgcccgtcggcttcgtccgctgcgagaattctcgtgtcgcccatcggcgacaactgtccgggtgctgcaagccaccgacggtgtgcgggtacgcgtacgcgagcccgacggcgtggacgagcccggcggcggacgcggactgcgtggcgtggagcaacgaccccgacctgctctgctacgcctgcgcctcatgcaaggccggcgtgctgggcggcttgcacgagcagtggcgcagggccaccatcgcgctcatcttcgtctacgtcgtcggctgcagcgcgttccgtaacgcgcagaccgaggacctcttccgccgctacaaatggggaaattattaacgatctctcccactgatctactgcgtacgtacgtacacgccgacttgaaacgggattttcagcaatccggttcaccaagatttgagcccaatgccccatcccattcgtggcgtgtgctcgccaaattggagcacgccagtcggaaggacgtggagggtcgctcttagtcatcaagaggtccgtctctttctgacgtgtttgcatacaaacagaaaatcttatagtttgccaatgtcgtttgttctagcaattttctatctactaaatcataaacatattagttgtttggcatagtagatcaaatgcataatctaattactggactagaaaaaatatgatccgttgtgctttgaatggtttctctctgtttcctagatgcagagcatggctcttattctttgcatgtttaaatcgattgtagtgatttgtttagttctgctctgcaaccctttgagagatacatacctgggtttgtatatttgtccatttcagaggtcaatgtattaccttgtcaggcagcttcaagatttctaaaattgacaaaaatggttggaagatcaaacatcgagaattcactttctacaagtggaacaattgcatatgagggcattgatctattgacatgtgcccatatttctatttatttgtcttcaagttctagatatctctcttattctgatttctagatatctctctaaaatttatggttgtgttagatatctctcttattctgatttctagatatccctcttattctgatttctagatgtgcttggtacaggtcagttttacctgatattctgtttttgttccttgtttgtttgaactgaggttgatttaggttgtgaacttgtgatgacaaaaataacatcctgctgataacctcaaatggcctgtctacgagatggaaaatggcctgatgataacctcaaaattttctccattatgggcaacaactattgagcagccaagatatcaacaacgaagaataaccaatttcgaattcacatcaatcaacaataggacctgtccctgatcaacttcaaaagcgcttaggaagacgttttcagctgaaaagaagaaaagtaaaatccggaaggcatgggatggaactaaagtcatttataatgttgcttcatggggcaccactgctgttggggtctacaataatcgagcattacttacgatcgcaactacaacgtttcagacttcctgccgtgtgatatccaagttcctttgaatattgtgtcaactactagggcatgttagaattgcttgcgtgtgtgcttttccattgttcaggtagcataaagtttgagaccatttgtttattctatgctgatgagttcgactgctaattagcaggaccttccagtcaaaagcagcatgtgtattgtataactgtaaatattgccttgatttgaacaaatttgttttttgtgctagaactttatttcacgaacttcatatgatagaccctactttagagtatttctttctcttctcatttcacattattgttatcacttctctttcaatgagaattttctttcttattttattttattttattttatgtagaagtgtagaaccatatagtctctttggctaatttaatatggttttgttatctggaaatcttgactaatatatttatcacatctttaaaagtggtattttgaattattagatcgacatgttaacaactgggtgggggtattctatctactatctttactactataacacactacttttaatagttctagtcgtggtttttgtgcgtcgcgcccccacccgctcgctcgttttccacgctgtgctatccaggagcgtccgtccgctctctgacatccacaaacactatcctttgagcattacatatctttttgaactgatttagttgtgcattaccattttattcaaaattttgtatgccgtcgcaacgcacgggcacttacctagtaataccatatattgacacatacatctaaatccatataaaaattacactgaaacatataataccatatattcactatacctctacactttgagaaatgaggaacaagatatatggttttgtagtcaaggaagaaaaaaaccaacattcgttaattgagaaggtgtttttttcagaaaaaataacaaaa

SEQ ID NO: 214308 - DNA, 3714 bp, Zea Mays
attttatcctgtggctcggtcaacgcttacaccacgttgtggcgacctccttcgttaaagattgcactcaacgcctctcaagtgatctaaagatcaaacttaagtaccacattattctttcttatatcaaatccctctgtgagaaatctccacaagttggagtctctcacgctttacacgagtgatctcaatcaaagcaaaggagtaaggagggagtagaaacacacataagagtacaagagcagcaacaccacgcatacaagcaaaagtgagaatgcaataatcaaaacgacagagtttctcttaagaaaacactcaattctctatagcatgagtgtgtggttgcattgaatcggagtttaagagtgctcttagtatacttggtaacaactctatgcacctagaggagtcctttagtcatttcttctttgtttggaaggccctggacgccttctgtccgtgggcgcaccgaacagtctggtacacgttggacagtgaacattgcacgatttccttccttttcctgcgaagccaaccgttgccggtcgttactgccattgattatgagaaatcaatataaactctagaacagagctactctacacagagttttggaatagagctgtttttggaatggaatggagccataccaaacatgtccttattaaatgtggggtatgtctaaagcatatctctactactatttatgaacatagtgtaggcgtgcacgattgcatggcgcacggttctgccaactccggacgcgcctgtcgcgccgcgaatcgcggccgccgcatcctcagatcaataccgcggccgtcgtcttctctccccccgcatggtggcccgtcgtccccttccaaccctcctccctcgcctgccggtgtccctttcttcccccgtgtggcggctcgcacccgcacgagatctagactaccttcccaccctcctcccctgcccgctcgcctgtcggcgtccctttcttctccccgtgcggcggcccgcgcccgcacgagatctagactagacgccgagggcacgacgctttgcctgcctcgcctccgtcccctcgtcgcctccacgactccacctctacctcctcggtgagagagagagagagcgggggagagagggcactagaccaccagcaagcatgaggcagaggaggagcgtggcggcgccgctacactctaatccgctggctaccccatcaggagagagagagaggggggagagaaggcaccagacaccgccagtaagcatgaggcagagaaggcaccagacatcgcgctatcctccgcatccgccgcccgtcggcttcgtccgctgcgagaattctcgtgtcgcccatcggcgacaactgtccgggtgctgcaagccaccgacggtgtgcgggtacgcgtacgcgagcccgacggcgtggacgagcccggcggcggacgcggactgcgtggcgtggagcaacgaccccgacctgctctgctacgcctgcgcctcatgcaaggccggcgtgctgggcggcttgcacgagcagtggcgcagggccaccatcgcgctcatcttcgtctacgtcgtcggctgcagcgcgttccgtaacgcgcagaccgaggacctcttccgccgctacaaatggggaaattattaacgatctctcccactgatctactgcgtacgtacgtacacgccgacttgaaacggagtcggaaggacgtggagggtcgctcttagtcatcaagaggtccgtctctttctgacgtgtttgcatacaaacagaaaatcttatagtttgccaatgtcgtttgttctagcaattttctatctactaaatcataaacatattagttgtttggcatagtagatcaaatgcataatctaattactggactagaaaaaatatgatccgttgtgctttgaatggtttctctctgtttcctagatgcagagcatggctcttattctttgcatgtttaaatcgattgtagtgatttgtttagttctgctctgcaaccctttgagagatacatacctgggtttgtatatttgtccatttcagaggtcaatgtattaccttgtcaggcagcttcaagatttctaaaattgacaaaaatggttggaagatcaaacatcgagaattcactttctacaagtggaacaattgcatatgagggcattgatctattgacatgtgcccatatttctatttatttgtcttcaagttctagatatctctcttattctgatttctagatatctctctaaaatttatggttgtgttagatatctctcttattctgatttctagatatccctcttattctgatttctagatgtgcttggtacaggtcagttttacctgatattctgtttttgttccttgtttgtttgaactgaggttgatttaggttgtgaacttgtgatgacaaaaataacatcctgctgataacctcaaatggcctgtctacgagatggaaaatggcctgatgataacctcaaaattttctccattatgggcaacaactattgagcagccaagatatcaacaacgaagaataaccaatttcgaattcacatcaatcaacaataggacctgtccctgatcaacttcaaaagcgcttaggaagacgttttcagctgaaaagaagaaaagtaaaatccggaaggcatgggatggaactaaagtcatttataatgttgcttcatggggcaccactgctgttggggtctacaataatcgagcattacttacgatcgcaactacaacgtttcagacttcctgccgtgtgatatccaagttcctttgaatattgtgtcaactactagggcatgttagaattgcttgcgtgtgtgcttttccattgttcaggtagcataaagtttgagaccatttgtttattctatgctgatgagttcgactgctaattagcaggaccttccagtcaaaagcagcatgtgtattgtataactgtaaatattgccttgatttgaacaaatttgttttttgtgctagaactttatttcacgaacttcatatgatagaccctactttagagtatttctttctcttctcatttcacattattgttatcacttctctttcaatgagaattttctttcttattttattttattttattttatgtagaagtgtagaaccatatagtctctttggctaatttaatatggttttgttatctggaaatcttgactaatatatttatcacatctttaaaagtggtattttgaattattagatcgacatgttaacaactgggtgggggtattctatctactatctttactactataacacactacttttaatagttctagtcgtggtttttgtgcgtcgcgcccccacccgctcgctcgttttccacgctgtgctatccaggagcgtccgtccgctctctgacatccacaaacactatcctttgagcattacatatctttttgaactgatttagttgtgcattaccattttattcaaaattttgtatgccgtcgcaacgcacgggcacttacctagtaataccatatattgacacatacatctaaatccatataaaaattacactgaaacatataataccatatattcactatacctctacactttgagaaatgaggaacaagatatatggttttgtagtcaaggaagaaaaaaaccaacattcgttaattgagaaggtgtttttttcagaaaaaataacaaaa

SEQ ID NO: 214309 - DNA, 2719 bp, Zea Mays
ggctatttttctttgaattatacctggagaaccatctgtttagaagtgtgtgcttcatctctattacaaatagatgcatttgtgtggatgcctgatactctacccggaaaaaatagccactaactgaactaacgctggcacaatgagttggttatgatgattcaactattttatatagatagaaactaagtattcagttagcaatgatgatcaagtcccaactttttttttgtgctgctttgatttatgggtcacatttctataactgttagcatgatgacgatgctgaccctatctcaaaaagtgcatttgtacttattgccttcagaatagaaatgatagttggtttggcagatctgatgatcggatattggatggcagttgaaattgtattaaggttatcccagaaaaaaagagacaattttatttaattatgtagcttggttctgattctgtcttgtgtgttacattacttattctttttttaaagatctctgcttttatcgaaaacaattaaaggttttacagaaccaaagctggggtagccaacaaaagatagctatcctattacatccctcatcgtcaaatttctccaatatctgatgcattgccttccatgggaatgaactcaagtcatatttgctctttgtttttttacattacttattcttagttttcttaatctgtcagtgtattaaaactatctttcttttccagggtttgcaactgagcacaagtccatgttagcaaacgtgatccgaaaagctttccaagaaactgagggctttctttctctagtcatcaaggaatggtctttcaagcctcaaattgcatcaattggctcctgttgccttgttggtgtaatctgtgctgggcctctctatgttgcaaacctgggcgactcgcgtgcagttcttggaaggcttgttaaggcaactggagaggttctggccacgcagttgtcagcggagcacaatgcatgctatgaagaagttagacaagagctgcagtcatcacatcctgatgatccacgtattgtggttctcaaacataacgtttggcgagtgaagggtctcatccaggcacacaaaaatctatactcttgatctggttgctgattttccactttatggtgtaattgtaaggacatggcaaaactggacaacgggattctagcaaaactggctcacattatttcagcaaaactggatagcaggattagattggtgtgtttcagcaaacaaactaaactgaatatatttgtaaaactggcagcaggatttcagcagagttctgctaccttcatataaacagacaatctacaaacattgtgtgttcagaaaaataatcattaaattaatattccagcaaattacattttcagttttcatagttgtcccattataaaaatgagagaaaaatgatgatggaaaatggcctgagagcagtagtgcatacctattgttgattgatgtgaattcgaaattggttattcttcgttgttgatatcttggctgctcaatagttgttgcccataatggagaaaattttgaggaaaagccagatgtgacgtacaatgatgttggtggctgcaaggagcagattgagaaaatgcgtgaagttgttgaacttcctatgcttcacccagaaaagtttgtcaagcttggtattgatcctccaaaaggcgtcctttgctatggcccacctggcactggcaagacacttcttgcaagagctgtagcaaatcggactgatgcttgtttcatccgtgtaattggaagtgagttagttcagaagtatgtcggcgaaggtgctcggatggtcagggaacttttccagatggcccgctcaaagaaagcgtgcattgtattcttcgatgaagttgatgctattggtggtgctcgttttgatgatggggtgggtggcgacaatgaggtgcagcgtacaatgttggaaatagtaaaccagcttgatgggtttgatgcaagagggaacatcaaagttctcatggccactaataggcctgatacattggatcctgcacttctgcgtcctggtcgtctggacagaaaggtagaattcgggctacctgacctggagggccgtacccaaatctttaagatccatacacgcaccatgaactgcgagcgagatattcgtttcgagcttctggcacggctctgccccaactctactggagcggatataaggagcgtctgcacagaagccgggatgtatgccattcgtgcccgcaggaaaacggtgacagagaaggattttctcgatgctgtcaataaggtcatcaagggctaccagaaattcagtgcaacacccaagtatatggtgtacaactagagagtgtcttcatggaatatgttgattttagaactccgggatcttttcggtgattgtgtcatcgtgaggttctatgcaaggattgttgtttgttttgaaatctggatccccagggattgcatcctgtaccacatgtttttaagacaaggttatccgcttggtggttcactgtacctgtggcaattgttgccgacaccgaactgaacataaagtcagaaacaggctacagtgagtgttgaaaaggaagaaatacagtgggtgcctgtttaaatatagcgttgtattactgactgaaaaagaaactgtccacctgaggaacagccgttgaagcgggtttgtagggtaggggcttgagggagttggc

SEQ ID NO: 214310 - DNA, 2573 bp, Zea Mays
caatcaccacagttactgttaatagttcttcctataggtgccggagtggtctgcttggctgttgacattctccctacagaattctctaaagaggcctcccaacattttggaaacatactatctagacttgttgctagtttggcctcagtgaagcaaccggcagaacttccttcctacttgagaagagcttgcattgcacatgctggcagattaactcctttgtatgaatatatccctaggatgagaaatactatgatagatttggcacccgcaaaaacaaatccattgcctgacaagaagtatagcaccctggtatctctcagtgggcacctatttgataagttccttataaatgaagctttggacatcattgagacagctggaggttcatttcacttggttagatgtgaagttggacaaagcacggatgatatgtcatactcagagcttgaagtaggagcagatgatactgccacattggataaaattattgattccttgacttctttagctaatgaacatggtggagatcacgatgccgggcaagaaattgaattagctctgaagataggaaaagtcaatgagtatgaaactgacgtcacaattgataaaggagggccaaagattttaattcttggagctggaagagtctgtcggccagctgctgagtttctggcatcttacccagacatatgtacctatggtgttgatgaccatgatgcagatcaaattcatgttatcgtggcatctttgtatcaaaaagatgcagaagagacagttgatggtattgaaaatacaactgctacccagcttgatgttgctgatattggaagcctttcagatcttgtttctcaggttgaggttgtaattagcttgctgcctgctagttttcatgctgccattgcaggagtatgcatagagttgaagaagcacatggtaacggcaagctatgttgatgaatccatgtcaaacttgagccaagctgccaaagatgcaggtgtaactatactttgtgaaatgggcctagatcctggcatagatcacttgatgtcaatgaagatgattgatgaagctcatgcacgaaagggaaaaataaaggcatttacatcttactgtggtggattgccatctccagctgcagcaaacaatccgcttgcctataaattcagttggaacccagctggtgcactccggtcagggaaaaatcctgcagtctacaaatttcttggtgagacgatccatgtagatggtcataacttgtatgaatcagcaaagaggctcagactacgagagcttccagcttttgctctggaacacttgccaaatcggaattccttgatatatggtgacctttatggtatctccaaagaagcatccaccatatatagggctactcttcgttacgaaggttttagtgagattatggtaaccctttccaaaactgggttctttgatgctgcaaatcatccactgctgcaagatactagtcgtccaacatataagggtttccttgatgaactactgaataatatctccacaattaacacggacttagatattgaagcctctggtggatacgatgatgacctgattgccagactgttgaagctcgggtgttgcaaaaataaggaaatagctgttaagacagtcaaaaccatcaagttcttgggactacatgaagagactcaaatacctaagggttgttcgagcccatttgatgtgatttgccagcgaatggaacagaggatggcctatggccacaatgagcaagacatggtactgctccaccacgaagtcgaggtggaatacccggacgggcaacccgccgaaaagcaccaagcgacgctactggagttcgggaaggttgaaaatggcaggtccaccactgccatggcgctgaccgtcggcattccagcagcaataggggccctgctattgctaaagaataaggtccagacgaaaggagtgatcaggcctctgcaaccggaaatctacgttccagcattggagatcttggagtcgtcgggcatcaagctggttgagaaagtggagacttgaaagttccctgatacacagataaagatagtatgatatagcagggcacatgtatcttttgtattaactccgttctggaatatatatttgtgaactaaaatgtgacaaataaaaagaacgggtggagtatattgtaagagacggcaaagaaacctctgtatatatgacctgtcgatatcaaataatgccgatcagttagttggcttggctcttttgagggtttagtttatactagtaaatgagagcaaccagcgaagcataaacaagatgagacgtcagagcagcaacaacaacctgcgttgcctttggtttatattgcatcggttctccgaatgaactttgcatcctgtgcacatcagacatgtcccagagggatttcattttcattaaattgacatatcagcaaatctgcttatgcgtcgagatatttatgagaggggaagagagcttcatgaaaccaaaccggtcctcacgactacccaggcgatgaaatccccgctaggctgattgcttgatct

SEQ ID NO: 214311 - DNA, 3824 bp, Zea Mays
gtaaaatgggcgaatttcaactagtaatttgttatcgtagctcgtagcaccagattgccatgccgtctttgaactgaggttgtggatttcatgtccgtgatctaggcgccttacttggactcaggtatgggttctgctgctactgagggcaatgacaccttgctgggcaatggagttgttgggattcttgctgagacttgtaatatgtgggaaagaagggcgccgttaactccttcccattgtgcccgccttctgctaggaggaggcaagaacggacctcgagtaaaccggattattgtgcagccaagcacaaggaggatccatcatgacgctcagtatgaggatgcaggatgcgagatttcagaagacctgtcagaatgcggccttatcataggcatcaaacaacccaagctgcagatgattctttcagatagagcgtacgctttcttttcacacacacacaaagcccaaaaagagaatatgccactgttagacaagatccttgaagaaagggtgtccttgtttgattatgagctaattgttggagatgatgggaaaagatcactagcatttgggaaatttgctggtagagctggactgatagatttcttacatggtctcggacagcgatatttgagccttggatactcgactccatttctctctctgggacaatctcatatgtatccttcgctcgctgcagccaaggctgcagtcattgtcgttgcagaagagatagcaacatttggacttccatccggaatttgtccgatagtgtttgtgttcactggagttggaaacgtctctcagggtgcgcaggagatattcaagttattgccccatacctttgttgatgctgagaagcttcccgaaatttttcaggccaggaatctgtctaagcaatctcagtcgaccaagagagtatttcaactttatggttgtgttgtgacctctagagacatggtttctcacaaggatcccaccagacaatttgacaaaggtgactattatgctcatccagaacactacacccctgtttttcatgaaagaattgctccatatgcatctgtcatcgtaaactgtatgtattgggagaagaggtttccaccattactaaatatggatcagttacagcaattgatggagactggttgtcctttagtcggcgtttgtgacataacttgtgatattggaggttccattgaatttatcaacaagagtacatcaatagagaggcctttctttcggtatgatccttctaagaattcataccatgatgatatggaaggtgccggagtggtctgcttggctgttgacattctccctacagaattctctaaagaggcctcccaacattttggaaacatactatctagacttgttgctagtttggcctcagtgaagcaaccggcagaacttccttcctacttgagaagagcttgcattgcacatgctggcagattaactcctttgtatgaatatatccctaggatgagaaatactatgatagatttggcacccgcaaaaacaaatccattgcctgacaagaagtatagcaccctggtatctctcagtgggcacctatttgataagttccttataaatgaagctttggacatcattgagacagctggaggttcatttcacttggttagatgtgaagttggacaaagcacggatgatatgtcatactcagagcttgaagtaggagcagatgatactgccacattggataaaattattgattccttgacttctttagctaatgaacatggtggagatcacgatgccgggcaagaaattgaattagctctgaagataggaaaagtcaatgagtatgaaactgacgtcacaattgataaaggagggccaaagattttaattcttggagctggaagagtctgtcggccagctgctgagtttctggcatcttacccagacatatgtacctatggtgttgatgaccatgatgcagatcaaattcatgttatcgtggcatctttgtatcaaaaagatgcagaagagacagttgatggtattgaaaatacaactgctacccagcttgatgttgctgatattggaagcctttcagatcttgtttctcaggttgaggttgtaattagcttgctgcctgctagttttcatgctgccattgcaggagtatgcatagagttgaagaagcacatggtaacggcaagctatgttgatgaatccatgtcaaacttgagccaagctgccaaagatgcaggtgtaactatactttgtgaaatgggcctagatcctggcatagatcacttgatgtcaatgaagatgattgatgaagctcatgcacgaaagggaaaaataaaggcatttacatcttactgtggtggattgccatctccagctgcagcaaacaatccgcttgcctataaattcagttggaacccagctggtgcactccggtcagggaaaaatcctgcagtctacaaatttcttggtgagacgatccatgtagatggtcataacttgtatgaatcagcaaagaggctcagactacgagagcttccagcttttgctctggaacacttgccaaatcggaattccttgatatatggtgacctttatggtatctccaaagaagcatccaccatatatagggctactcttcgttacgaaggttttagtgagattatggtaaccctttccaaaactgggttctttgatgctgcaaatcatccactgctgcaagatactagtcgtccaacatataagggtttccttgatgaactactgaataatatctccacaattaacacggacttagatattgaagcctctggtggatacgatgatgacctgattgccagactgttgaagctcgggtgttgcaaaaataaggaaatagctgttaagacagtcaaaaccatcaagttcttgggactacatgaagagactcaaatacctaagggttgttcgagcccatttgatgtgatttgccagcgaatggaacagaggatggcctatggccacaatgagcaagacatggtactgctccaccacgaagtcgaggtggaatacccggacgggcaacccgccgaaaagcaccaagcgacgctactggagttcgggaaggttgaaaatggcaggtccaccactgccatggcgctgaccgtcggcattccagcagcaataggggccctgctattgctaaagaataaggtccagacgaaaggagtgatcaggcctctgcaaccggaaatctacgttccagcattggagatcttggagtcgtcgggcatcaagctggttgagaaagtggagacttgaaagttccctgatacacagataaagatagtatgatatagcagggcacatgtatcttttgtattaactccgttctggaatatatatttgtgaactaaaatgtgacaaataaaaagaacgggtggagtatattgtaagagacggcaaagaaacctctgtatatatgacctgtcgatatcaaataatgccgatcagttagttggcttggctcttttgagggtttagtttatactagtaaatgagagcaaccagcgaagcataaacaagatgagacgtcagagcagcaacaacaacctgcgttgcctttggtttatattgcatcggttctccgaatgaactttgcatcctgtgcacatcagacatgtcccagagggatttcattttcattaaattgacatatcagcaaatctgcttatgcgtcgagatatttatgagaggggaagagagcttcatgaaaccaaaccggtcctcacgactacccaggcgatgaaatccccgctaggctgattgcttgatct

SEQ ID NO: 214312 - DNA, 3858 bp, Zea Mays
agcgcagaggcctcgtccgtctccgtttccgtctccctccccgcgccacctcactcgttcgccgcctccgccggcgcccgtgcgccatctccactccagcgcgctctacgccgatcgagctgccaggaggttgtggatttcatgtccgtgatctaggcgccttacttggactcaggtatgggttctgctgctactgagggcaatgacaccttgctgggcaatggagttgttgggattcttgctgagacttgtaatatgtgggaaagaagggcgccgttaactccttcccattgtgcccgccttctgctaggaggaggcaagaacggacctcgagtaaaccggattattgtgcagccaagcacaaggaggatccatcatgacgctcagtatgaggatgcaggatgcgagatttcagaagacctgtcagaatgcggccttatcataggcatcaaacaacccaagctgcagatgattctttcagatagagcgtacgctttcttttcacacacacacaaagcccaaaaagagaatatgccactgttagacaagatccttgaagaaagggtgtccttgtttgattatgagctaattgttggagatgatgggaaaagatcactagcatttgggaaatttgctggtagagctggactgatagatttcttacatggtctcggacagcgatatttgagccttggatactcgactccatttctctctctgggacaatctcatatgtatccttcgctcgctgcagccaaggctgcagtcattgtcgttgcagaagagatagcaacatttggacttccatccggaatttgtccgatagtgtttgtgttcactggagttggaaacggagatattcaagttattgccccatacctttgttgatgctgagaagcttcccgaaatttttcaggccaggaatctgtctaagcaatctcagtcgaccaagagagtatttcaactttatggttgtgttgtgacctctagagacatggtttctcacaaggatcccaccagacaatttgacaaaggtgactattatgctcatccagaacactacacccctgtttttcatgaaagaattgctccatatgcatctgtcatcgtaaactgtatgtattgggagaagaggtttccaccattactaaatatggatcagttacagcaattgatggagactggttgtcctttagtcggcgtttgtgacataacttgtgatattggaggttccattgaatttatcaacaagagtacatcaatagagaggcctttctttcggtatgatccttctaagaattcataccatgatgatatggaaggtgccggagtggtctgcttggctgttgacattctccctacagaattctctaaagaggcctcccaacattttggaaacatactatctagacttgttgctagtttggcctcagtgaagcaaccggcagaacttccttcctacttgagaagagcttgcattgcacatgctggcagattaactcctttgtatgaatatatccctaggatgagaaatactatgatagatttggcacccgcaaaaacaaatccattgcctgacaagaagtatagcaccctggtatctctcagtgggcacctatttgataagttccttataaatgaagctttggacatcattgagacagctggaggttcatttcacttggttagatgtgaagttggacaaagcacggatgatatgtcatactcagagcttgaagtaggagcagatgatactgccacattggataaaattattgattccttgacttctttagctaatgaacatggtggagatcacgatgccgggcaagaaattgaattagctctgaagataggaaaagtcaatgagtatgaaactgacgtcacaattgataaaggagggccaaagattttaattcttggagctggaagagtctgtcggccagctgctgagtttctggcatcttacccagacatatgtacctatggtgttgatgaccatgatgcagatcaaattcatgttatcgtggcatctttgtatcaaaaagatgcagaagagacagttgatggtattgaaaatacaactgctacccagcttgatgttgctgatattggaagcctttcagatcttgtttctcaggttgaggttgtaattagcttgctgcctgctagttttcatgctgccattgcaggagtatgcatagagttgaagaagcacatggtaacggcaagctatgttgatgaatccatgtcaaacttgagccaagctgccaaagatgcaggtgtaactatactttgtgaaatgggcctagatcctggcatagatcacttgatgtcaatgaagatgattgatgaagctcatgcacgaaagggaaaaataaaggcatttacatcttactgtggtggattgccatctccagctgcagcaaacaatccgcttgcctataaattcagttggaacccagctggtgcactccggtcagggaaaaatcctgcagtctacaaatttcttggtgagacgatccatgtagatggtcataacttgtatgaatcagcaaagaggctcagactacgagagcttccagcttttgctctggaacacttgccaaatcggaattccttgatatatggtgacctttatggtatctccaaagaagcatccaccatatatagggctactcttcgttacgaaggttttagtgagattatggtaaccctttccaaaactgggttctttgatgctgcaaatcatccactgctgcaagatactagtcgtccaacatataagggtttccttgatgaactactgaataatatctccacaattaacacggacttagatattgaagcctctggtggatacgatgatgacctgattgccagactgttgaagctcgggtgttgcaaaaataaggaaatagctgttaagacagtcaaaaccatcaagttcttgggactacatgaagagactcaaatacctaagggttgttcgagcccatttgatgtgatttgccagcgaatggaacagaggatggcctatggccacaatgagcaagacatggtactgctccaccacgaagtcgaggtggaatacccggacgggcaacccgccgaaaagcaccaagcgacgctactggagttcgggaaggttgaaaatggcaggtccaccactgccatggcgctgaccgtcggcattccagcagcaataggggccctgctattgctaaagaataaggtccagacgaaaggagtgatcaggcctctgcaaccggaaatctacgttccagcattggagatcttggagtcgtcgggcatcaagctggttgagaaagtggagacttgaaagttccctgatacacagataaagatagtatgatatagcagggcacatgtatcttttgtattaactccgttctggaatatatatttgtgaactaaaatgtgacaaataaaaagaacgggtggagtatattgtaagagacggcaaagaaacctctgtatatatgacctgtcgatatcaaataatgccgatcagttagttggcttggctcttttgagggtttagtttatactagtaaatgagagcaaccagcgaagcataaacaagatgagacgtcagagcagcaacaacaacctgcgttgcctttggtttatattgcatcggttctccgaatgaactttgcatcctgtgcacatcagacatgtcccagagggatttcattttcattaaattgacatatcagcaaatctgcttatgcgtcgagatatttatgagaggggaagagagcttcatgaaaccaaaccggtcctcacgactacccaggcgatgaaatccccgctaggctgattgcttgatct

SEQ ID NO: 214313 - DNA, 3740 bp, Zea Mays
agcgcagaggcctcgtccgtctccgtttccgtctccctccccgcgccacctcactcgttcgccgcctccgccggcgcccgtgcgccatctccactccagcgcgctctacgccgatcgagctgccaggaggttgtggatttcatgtccgtgatctaggcgccttacttggactcaggaggaggcaagaacggacctcgagtaaaccggattattgtgcagccaagcacaaggaggatccatcatgacgctcagtatgaggatgcaggatgcgagatttcagaagacctgtcagaatgcggccttatcataggcatcaaacaacccaagctgcagatgattctttcagatagagcgtacgctttcttttcacacacacacaaagcccaaaaagagaatatgccactgttagacaagatccttgaagaaagggtgtccttgtttgattatgagctaattgttggagatgatgggaaaagatcactagcatttgggaaatttgctggtagagctggactgatagatttcttacatggtctcggacagcgatatttgagccttggatactcgactccatttctctctctgggacaatctcatatgtatccttcgctcgctgcagccaaggctgcagtcattgtcgttgcagaagagatagcaacatttggacttccatccggaatttgtccgatagtgtttgtgttcactggagttggaaacgtctctcagggtgcgcaggagatattcaagttattgccccatacctttgttgatgctgagaagcttcccgaaatttttcaggccaggaatctgtctaagcaatctcagtcgaccaagagagtatttcaactttatggttgtgttgtgacctctagagacatggtttctcacaaggatcccaccagacaatttgacaaaggtgactattatgctcatccagaacactacacccctgtttttcatgaaagaattgctccatatgcatctgtcatcgtaaactgtatgtattgggagaagaggtttccaccattactaaatatggatcagttacagcaattgatggagactggttgtcctttagtcggcgtttgtgacataacttgtgatattggaggttccattgaatttatcaacaagagtacatcaatagagaggcctttctttcggtatgatccttctaagaattcataccatgatgatatggaaggtgccggagtggtctgcttggctgttgacattctccctacagaattctctaaagaggcctcccaacattttggaaacatactatctagacttgttgctagtttggcctcagtgaagcaaccggcagaacttccttcctacttgagaagagcttgcattgcacatgctggcagattaactcctttgtatgaatatatccctaggatgagaaatactatgatagatttggcacccgcaaaaacaaatccattgcctgacaagaagtatagcaccctggtatctctcagtgggcacctatttgataagttccttataaatgaagctttggacatcattgagacagctggaggttcatttcacttggttagatgtgaagttggacaaagcacggatgatatgtcatactcagagcttgaagtaggagcagatgatactgccacattggataaaattattgattccttgacttctttagctaatgaacatggtggagatcacgatgccgggcaagaaattgaattagctctgaagataggaaaagtcaatgagtatgaaactgacgtcacaattgataaaggagggccaaagattttaattcttggagctggaagagtctgtcggccagctgctgagtttctggcatcttacccagacatatgtacctatggtgttgatgaccatgatgcagatcaaattcatgttatcgtggcatctttgtatcaaaaagatgcagaagagacagttgatggtattgaaaatacaactgctacccagcttgatgttgctgatattggaagcctttcagatcttgtttctcaggttgaggttgtaattagcttgctgcctgctagttttcatgctgccattgcaggagtatgcatagagttgaagaagcacatggtaacggcaagctatgttgatgaatccatgtcaaacttgagccaagctgccaaagatgcaggtgtaactatactttgtgaaatgggcctagatcctggcatagatcacttgatgtcaatgaagatgattgatgaagctcatgcacgaaagggaaaaataaaggcatttacatcttactgtggtggattgccatctccagctgcagcaaacaatccgcttgcctataaattcagttggaacccagctggtgcactccggtcagggaaaaatcctgcagtctacaaatttcttggtgagacgatccatgtagatggtcataacttgtatgaatcagcaaagaggctcagactacgagagcttccagcttttgctctggaacacttgccaaatcggaattccttgatatatggtgacctttatggtatctccaaagaagcatccaccatatatagggctactcttcgttacgaaggttttagtgagattatggtaaccctttccaaaactgggttctttgatgctgcaaatcatccactgctgcaagatactagtcgtccaacatataagggtttccttgatgaactactgaataatatctccacaattaacacggacttagatattgaagcctctggtggatacgatgatgacctgattgccagactgttgaagctcgggtgttgcaaaaataaggaaatagctgttaagacagtcaaaaccatcaagttcttgggactacatgaagagactcaaatacctaagggttgttcgagcccatttgatgtgatttgccagcgaatggaacagaggatggcctatggccacaatgagcaagacatggtactgctccaccacgaagtcgaggtggaatacccggacgggcaacccgccgaaaagcaccaagcgacgctactggagttcgggaaggttgaaaatggcaggtccaccactgccatggcgctgaccgtcggcattccagcagcaataggggccctgctattgctaaagaataaggtccagacgaaaggagtgatcaggcctctgcaaccggaaatctacgttccagcattggagatcttggagtcgtcgggcatcaagctggttgagaaagtggagacttgaaagttccctgatacacagataaagatagtatgatatagcagggcacatgtatcttttgtattaactccgttctggaatatatatttgtgaactaaaatgtgacaaataaaaagaacgggtggagtatattgtaagagacggcaaagaaacctctgtatatatgacctgtcgatatcaaataatgccgatcagttagttggcttggctcttttgagggtttagtttatactagtaaatgagagcaaccagcgaagcataaacaagatgagacgtcagagcagcaacaacaacctgcgttgcctttggtttatattgcatcggttctccgaatgaactttgcatcctgtgcacatcagacatgtcccagagggatttcattttcattaaattgacatatcagcaaatctgcttatgcgtcgagatatttatgagaggggaagagagcttcatgaaaccaaaccggtcctcacgactacccaggcgatgaaatccccgctaggctgattgcttgatct

SEQ ID NO: 214314 - DNA, 3913 bp, Zea Mays
cgcctctctattttaagctgacctccctccagataaactccgccagcgcagaggcctcgtccgtctccgtttccgtctccctccccgcgccacctcactcgttcgccgcctccgccggcgcccgtgcgccatctccactccagcgcgctctacgccgatcgagctgccaggaggttgtggatttcatgtccgtgatctaggcgccttacttggactcaggtatgggttctgctgctactgagggcaatgacaccttgctgggcaatggagttgttgggattcttgctgagacttgtaatatgtgggaaagaagggcgccgttaactccttcccattgtgcccgccttctgctaggaggaggcaagaacggacctcgagtaaaccggattattgtgcagccaagcacaaggaggatccatcatgacgctcagtatgaggatgcaggatgcgagatttcagaagacctgtcagaatgcggccttatcataggcatcaaacaacccaagatgattctttcagatagagcgtacgctttcttttcacacacacacaaagcccaaaaagagaatatgccactgttagacaagatccttgaagaaagggtgtccttgtttgattatgagctaattgttggagatgatgggaaaagatcactagcatttgggaaatttgctggtagagctggactgatagatttcttacatggtctcggacagcgatatttgagccttggatactcgactccatttctctctctgggacaatctcatatgtatccttcgctcgctgcagccaaggctgcagtcattgtcgttgcagaagagatagcaacatttggacttccatccggaatttgtccgatagtgtttgtgttcactggagttggaaacgtctctcagggtgcgcaggagatattcaagttattgccccatacctttgttgatgctgagaagcttcccgaaatttttcaggccaggaatctgtctaagcaatctcagtcgaccaagagagtatttcaactttatggttgtgttgtgacctctagagacatggtttctcacaaggatcccaccagacaatttgacaaaggtgactattatgctcatccagaacactacacccctgtttttcatgaaagaattgctccatatgcatctgtcatcgtaaactgtatgtattgggagaagaggtttccaccattactaaatatggatcagttacagcaattgatggagactggttgtcctttagtcggcgtttgtgacataacttgtgatattggaggttccattgaatttatcaacaagagtacatcaatagagaggcctttctttcggtatgatccttctaagaattcataccatgatgatatggaaggtgccggagtggtctgcttggctgttgacattctccctacagaattctctaaagaggcctcccaacattttggaaacatactatctagacttgttgctagtttggcctcagtgaagcaaccggcagaacttccttcctacttgagaagagcttgcattgcacatgctggcagattaactcctttgtatgaatatatccctaggatgagaaatactatgatagatttggcacccgcaaaaacaaatccattgcctgacaagaagtatagcaccctggtatctctcagtgggcacctatttgataagttccttataaatgaagctttggacatcattgagacagctggaggttcatttcacttggttagatgtgaagttggacaaagcacggatgatatgtcatactcagagcttgaagtaggagcagatgatactgccacattggataaaattattgattccttgacttctttagctaatgaacatggtggagatcacgatgccgggcaagaaattgaattagctctgaagataggaaaagtcaatgagtatgaaactgacgtcacaattgataaaggagggccaaagattttaattcttggagctggaagagtctgtcggccagctgctgagtttctggcatcttacccagacatatgtacctatggtgttgatgaccatgatgcagatcaaattcatgttatcgtggcatctttgtatcaaaaagatgcagaagagacagttgatggtattgaaaatacaactgctacccagcttgatgttgctgatattggaagcctttcagatcttgtttctcaggttgaggttgtaattagcttgctgcctgctagttttcatgctgccattgcaggagtatgcatagagttgaagaagcacatggtaacggcaagctatgttgatgaatccatgtcaaacttgagccaagctgccaaagatgcaggtgtaactatactttgtgaaatgggcctagatcctggcatagatcacttgatgtcaatgaagatgattgatgaagctcatgcacgaaagggaaaaataaaggcatttacatcttactgtggtggattgccatctccagctgcagcaaacaatccgcttgcctataaattcagttggaacccagctggtgcactccggtcagggaaaaatcctgcagtctacaaatttcttggtgagacgatccatgtagatggtcataacttgtatgaatcagcaaagaggctcagactacgagagcttccagcttttgctctggaacacttgccaaatcggaattccttgatatatggtgacctttatggtatctccaaagaagcatccaccatatatagggctactcttcgttacgaaggttttagtgagattatggtaaccctttccaaaactgggttctttgatgctgcaaatcatccactgctgcaagatactagtcgtccaacatataagggtttccttgatgaactactgaataatatctccacaattaacacggacttagatattgaagcctctggtggatacgatgatgacctgattgccagactgttgaagctcgggtgttgcaaaaataaggaaatagctgttaagacagtcaaaaccatcaagttcttgggactacatgaagagactcaaatacctaagggttgttcgagcccatttgatgtgatttgccagcgaatggaacagaggatggcctatggccacaatgagcaagacatggtactgctccaccacgaagtcgaggtggaatacccggacgggcaacccgccgaaaagcaccaagcgacgctactggagttcgggaaggttgaaaatggcaggtccaccactgccatggcgctgaccgtcggcattccagcagcaataggggccctgctattgctaaagaataaggtccagacgaaaggagtgatcaggcctctgcaaccggaaatctacgttccagcattggagatcttggagtcgtcgggcatcaagctggttgagaaagtggagacttgaaagttccctgatacacagataaagatagtatgatatagcagggcacatgtatcttttgtattaactccgttctggaatatatatttgtgaactaaaatgtgacaaataaaaagaacgggtggagtatattgtaagagacggcaaagaaacctctgtatatatgacctgtcgatatcaaataatgccgatcagttagttggcttggctcttttgagggtttagtttatactagtaaatgagagcaaccagcgaagcataaacaagatgagacgtcagagcagcaacaacaacctgcgttgcctttggtttatattgcatcggttctccgaatgaactttgcatcctgtgcacatcagacatgtcccagagggatttcattttcattaaattgacatatcagcaaatctgcttatgcgtcgagatatttatgagaggggaagagagcttcatgaaaccaaaccggtcctcacgactacccaggcgatgaaatccccgctaggctgattgcttgatct

SEQ ID NO: 214315 - DNA, 4378 bp, Zea Mays
ccggctcagagtgcagttccctctttggctcttcttcccatccccatcgtgtcgtgtcgtgccgtgcgcttccgagacagctcactccaccagcagggccgtcaccaccacgtcggcgtcgccatccatcgtcctcgtcggagcccaggccagctgagagctgactcctctccccgaaaggctggaaccgtccaaaaaggaagggtgcggatagcgtgtccaaatcgaaatcgagcagagttcctgggcgactgggcgcctctctattttaagctgacctccctccagataaactccgccagcgcagaggcctcgtccgtctccgtttccgtctccctccccgcgccacctcactcgttcgccgcctccgccggcgcccgtgcgccatctccactccagcgcgctctacgccgatcgagctgccaggaggttgtggatttcatgtccgtgatctaggcgccttacttggactcaggtatgggttctgctgctactgagggcaatgacaccttgctgggcaatggagttgttgggattcttgctgagacttgtaatatgtgggaaagaagggcgccgttaactccttcccattgtgcccgccttctgctaggaggaggcaagaacggacctcgagtaaaccggattattgtgcagccaagcacaaggaggatccatcatgacgctcagtatgaggatgcaggatgcgagatttcagaagacctgtcagaatgcggccttatcataggcatcaaacaacccaagctgcagatgattctttcagatagagcgtacgctttcttttcacacacacacaaagcccaaaaagagaatatgccactgttagacaagatccttgaagaaagggtgtccttgtttgattatgagctaattgttggagatgatgggaaaagatcactagcatttgggaaatttgctggtagagctggactgatagatttcttacatggtctcggacagcgatatttgagccttggatactcgactccatttctctctctgggacaatctcatatgtatccttcgctcgctgcagccaaggctgcagtcattgtcgttgcagaagagatagcaacatttggacttccatccggaatttgtccgatagtgtttgtgttcactggagttggaaacgtctctcagggtgcgcaggagatattcaagttattgccccatacctttgttgatgctgagaagcttcccgaaatttttcaggccaggaatctgtctaagcaatctcagtcgaccaagagagtatttcaactttatggttgtgttgtgacctctagagacatggtttctcacaaggatcccaccagacaatttgacaaaggtgactattatgctcatccagaacactacacccctgtttttcatgaaagaattgctccatatgcatctgtcatcgtaaactgtatgtattgggagaagaggtttccaccattactaaatatggatcagttacagcaattgatggagactggttgtcctttagtcggcgtttgtgacataacttgtgatattggaggttccattgaatttatcaacaagagtacatcaatagagaggcctttctttcggtatgatccttctaagaattcataccatgatgatatggaaggtgccggagtggtctgcttggctgttgacattctccctacagaattctctaaagaggcctcccaacattttggaaacatactatctagacttgttgctagtttggcctcagtgaagcaaccggcagaacttccttcctacttgagaagagcttgcattgcacatgctggcagattaactcctttgtatgaatatatccctaggatgagaaatactatgatagatttggcacccgcaaaaacaaatccattgcctgacaagaagtatagcaccctggtatctctcagtgggcacctatttgataagttccttataaatgaagctttggacatcattgagacagctggaggttcatttcacttggttagatgtgaagttggacaaagcacggatgatatgtcatactcagagcttgaagtaggagcagatgatactgccacattggataaaattattgattccttgacttctttagctaatgaacatggtggagatcacgatgccgggcaagaaattgaattagctctgaagataggaaaagtcaatgagtatgaaactgacgtcacaattgataaaggagggccaaagattttaattcttggagctggaagagtctgtcggccagctgctgagtttctggcatcttacccagacatatgtacctatggtgttgatgaccatgatgcagatcaaattcatgttatcgtggcatctttgtatcaaaaagatgcagaagagacagttgatggtattgaaaatacaactgctacccagcttgatgttgctgatattggaagcctttcagatcttgtttctcaggtaagtttcatcctgatacttaaatctgggtgggctccattgttttttaaactaacttcattcacacttaggcaatagcttctatgcggttcaggacattggtttgtgctttctttctggcaaaatatttaacttgtacccctgaatttgttgattacagtactaactagtcagaagattaatgatgcgagctcctcttgcaggttgaggttgtaattagcttgctgcctgctagttttcatgctgccattgcaggagtatgcatagagttgaagaagcacatggtaacggcaagctatgttgatgaatccatgtcaaacttgagccaagctgccaaagatgcaggtgtaactatactttgtgaaatgggcctagatcctggcatagatcacttgatgtcaatgaagatgattgatgaagctcatgcacgaaagggaaaaataaaggcatttacatcttactgtggtggattgccatctccagctgcagcaaacaatccgcttgcctataaattcagttggaacccagctggtgcactccggtcagggaaaaatcctgcagtctacaaatttcttggtgagacgatccatgtagatggtcataacttgtatgaatcagcaaagaggctcagactacgagagcttccagcttttgctctggaacacttgccaaatcggaattccttgatatatggtgacctttatggtatctccaaagaagcatccaccatatatagggctactcttcgttacgaaggttttagtgagattatggtaaccctttccaaaactgggttctttgatgctgcaaatcatccactgctgcaagatactagtcgtccaacatataagggtttccttgatgaactactgaataatatctccacaattaacacggacttagatattgaagcctctggtggatacgatgatgacctgattgccagactgttgaagctcgggtgttgcaaaaataaggaaatagctgttaagacagtcaaaaccatcaagttcttgggactacatgaagagactcaaatacctaagggttgttcgagcccatttgatgtgatttgccagcgaatggaacagaggatggcctatggccacaatgagcaagacatggtactgctccaccacgaagtcgaggtggaatacccggacgggcaacccgccgaaaagcaccaagcgacgctactggagttcgggaaggttgaaaatggcaggtccaccactgccatggcgctgaccgtcggcattccagcagcaataggggccctgctattgctaaagaataaggtccagacgaaaggagtgatcaggcctctgcaaccggaaatctacgttccagcattggagatcttggagtcgtcgggcatcaagctggttgagaaagtggagacttgaaagttccctgatacacagataaagatagtatgatatagcagggcacatgtatcttttgtattaactccgttctggaatatatatttgtgaactaaaatgtgacaaataaaaagaacgggtggagtatattgtaagagacggcaaagaaacctctgtatatatgacctgtcgatatcaaataatgccgatcagttagttggcttggctcttttgagggtttagtttatactagtaaatgagagcaaccagcgaagcataaacaagatgagacgtcagagcagcaacaacaacctgcgttgcctttggtttatattgcatcggttctccgaatgaactttgcatcctgtgcacatcagacatgtcccagagggatttcattttcattaaattgacatatcagcaaatctgcttatgcgtcgagatatttatgagaggggaagagagcttcatgaaaccaaaccggtcctcacgactacccaggcgatgaaatccccgctaggctgattgcttgatct

SEQ ID NO: 214316 - DNA, 4173 bp, Zea Mays
ggcagtccggctcagagtgcagttccctctttggctcttcttcccatccccatcgtgtcgtgtcgtgccgtgcgcttccgagacagctcactccaccagcagggccgtcaccaccacgtcggcgtcgccatccatcgtcctcgtcggagcccaggccagctgagagctgactcctctccccgaaaggctggaaccgtccaaaaaggaagggtgcggatagcgtgtccaaatcgaaatcgagcagagttcctgggcgactgggcgcctctctattttaagctgacctccctccagataaactccgccagcgcagaggcctcgtccgtctccgtttccgtctccctccccgcgccacctcactcgttcgccgcctccgccggcgcccgtgcgccatctccactccagcgcgctctacgccgatcgagctgccaggaggttgtggatttcatgtccgtgatctaggcgccttacttggactcaggtatgggttctgctgctactgagggcaatgacaccttgctgggcaatggagttgttgggattcttgctgagacttgtaatatgtgggaaagaagggcgccgttaactccttcccattgtgcccgccttctgctaggaggaggcaagaacggacctcgagtaaaccggattattgtgcagccaagcacaaggaggatccatcatgacgctcagtatgaggatgcaggatgcgagatttcagaagacctgtcagaatgcggccttatcataggcatcaaacaacccaagctgcagatgattctttcagatagagcgtacgctttcttttcacacacacacaaagcccaaaaagagaatatgccactgttagacaagatccttgaagaaagggtgtccttgtttgattatgagctaattgttggagatgatgggaaaagatcactagcatttgggaaatttgctggtagagctggactgatagatttcttacatggtctcggacagcgatatttgagccttggatactcgactccatttctctctctgggacaatctcatatgtatccttcgctcgctgcagccaaggctgcagtcattgtcgttgcagaagagatagcaacatttggacttccatccggaatttgtccgatagtgtttgtgttcactggagttggaaacgggtgcgcaggagatattcaagttattgccccatacctttgttgatgctgagaagcttcccgaaatttttcaggccaggaatctgtctaagcaatctcagtcgaccaagagagtatttcaactttatggttgtgttgtgacctctagagacatggtttctcacaaggatcccaccagacaatttgacaaaggtgactattatgctcatccagaacactacacccctgtttttcatgaaagaattgctccatatgcatctgtcatcgtaaactgtatgtattgggagaagaggtttccaccattactaaatatggatcagttacagcaattgatggagactggttgtcctttagtcggcgtttgtgacataacttgtgatattggaggttccattgaatttatcaacaagagtacatcaatagagaggcctttctttcggtatgatccttctaagaattcataccatgatgatatggaaggtgccggagtggtctgcttggctgttgacattctccctacagaattctctaaagaggcctcccaacattttggaaacatactatctagacttgttgctagtttggcctcagtgaagcaaccggcagaacttccttcctacttgagaagagcttgcattgcacatgctggcagattaactcctttgtatgaatatatccctaggatgagaaatactatgatagatttggcacccgcaaaaacaaatccattgcctgacaagaagtatagcaccctggtatctctcagtgggcacctatttgataagttccttataaatgaagctttggacatcattgagacagctggaggttcatttcacttggttagatgtgaagttggacaaagcacggatgatatgtcatactcagagcttgaagtaggagcagatgatactgccacattggataaaattattgattccttgacttctttagctaatgaacatggtggagatcacgatgccgggcaagaaattgaattagctctgaagataggaaaagtcaatgagtatgaaactgacgtcacaattgataaaggagggccaaagattttaattcttggagctggaagagtctgtcggccagctgctgagtttctggcatcttacccagacatatgtacctatggtgttgatgaccatgatgcagatcaaattcatgttatcgtggcatctttgtatcaaaaagatgcagaagagacagttgatggtattgaaaatacaactgctacccagcttgatgttgctgatattggaagcctttcagatcttgtttctcaggttgaggttgtaattagcttgctgcctgctagttttcatgctgccattgcaggagtatgcatagagttgaagaagcacatggtaacggcaagctatgttgatgaatccatgtcaaacttgagccaagctgccaaagatgcaggtgtaactatactttgtgaaatgggcctagatcctggcatagatcacttgatgtcaatgaagatgattgatgaagctcatgcacgaaagggaaaaataaaggcatttacatcttactgtggtggattgccatctccagctgcagcaaacaatccgcttgcctataaattcagttggaacccagctggtgcactccggtcagggaaaaatcctgcagtctacaaatttcttggtgagacgatccatgtagatggtcataacttgtatgaatcagcaaagaggctcagactacgagagcttccagcttttgctctggaacacttgccaaatcggaattccttgatatatggtgacctttatggtatctccaaagaagcatccaccatatatagggctactcttcgttacgaaggttttagtgagattatggtaaccctttccaaaactgggttctttgatgctgcaaatcatccactgctgcaagatactagtcgtccaacatataagggtttccttgatgaactactgaataatatctccacaattaacacggacttagatattgaagcctctggtggatacgatgatgacctgattgccagactgttgaagctcgggtgttgcaaaaataaggaaatagctgttaagacagtcaaaaccatcaagttcttgggactacatgaagagactcaaatacctaagggttgttcgagcccatttgatgtgatttgccagcgaatggaacagaggatggcctatggccacaatgagcaagacatggtactgctccaccacgaagtcgaggtggaatacccggacgggcaacccgccgaaaagcaccaagcgacgctactggagttcgggaaggttgaaaatggcaggtccaccactgccatggcgctgaccgtcggcattccagcagcaataggggccctgctattgctaaagaataaggtccagacgaaaggagtgatcaggcctctgcaaccggaaatctacgttccagcattggagatcttggagtcgtcgggcatcaagctggttgagaaagtggagacttgaaagttccctgatacacagataaagatagtatgatatagcagggcacatgtatcttttgtattaactccgttctggaatatatatttgtgaactaaaatgtgacaaataaaaagaacgggtggagtatattgtaagagacggcaaagaaacctctgtatatatgacctgtcgatatcaaataatgccgatcagttagttggcttggctcttttgagggtttagtttatactagtaaatgagagcaaccagcgaagcataaacaagatgagacgtcagagcagcaacaacaacctgcgttgcctttggtttatattgcatcggttctccgaatgaactttgcatcctgtgcacatcagacatgtcccagagggatttcattttcattaaattgacatatcagcaaatctgcttatgcgtcgagatatttatgagaggggaagagagcttcatgaaaccaaaccggtcctcacgactacccaggcgatgaaatccccgctaggctgattgcttgatct

SEQ ID NO: 214317 - DNA, 4151 bp, Zea Mays
cggcagtccggctcagagtgcagttccctctttggctcttcttcccatccccatcgtgtcgtgtcgtgccgtgcgcttccgagacagctcactccaccagcagggccgtcaccaccacgtcggcgtcgccatccatcgtcctcgtcggagcccaggccagctgagagctgactcctctccccgaaaggctggaaccgtccaaaaaggaagggtgcggatagcgtgtccaaatcgaaatcgagcagagttcctgggcgactgggcgcctctctattttaagctgacctccctccagataaactccgccagcgcagaggcctcgtccgtctccgtttccgtctccctccccgcgccacctcactcgttcgccgcctccgccggcgcccgtgcgccatctccactccagcgcgctctacgccgatcgagctgccaggaggttgtggatttcatgtccgtgatctaggcgccttacttggactcagggcaatgacaccttgctgggcaatggagttgttgggattcttgctgagacttgtaatatgtgggaaagaagggcgccgttaactccttcccattgtgcccgccttctgctaggaggaggcaagaacggacctcgagtaaaccggattattgtgcagccaagcacaaggaggatccatcatgacgctcagtatgaggatgcaggatgcgagatttcagaagacctgtcagaatgcggccttatcataggcatcaaacaacccaagctgcagatgattctttcagatagagcgtacgctttcttttcacacacacacaaagcccaaaaagagaatatgccactgttagacaagatccttgaagaaagggtgtccttgtttgattatgagctaattgttggagatgatgggaaaagatcactagcatttgggaaatttgctggtagagctggactgatagatttcttacatggtctcggacagcgatatttgagccttggatactcgactccatttctctctctgggacaatctcatatgtatccttcgctcgctgcagccaaggctgcagtcattgtcgttgcagaagagatagcaacatttggacttccatccggaatttgtccgatagtgtttgtgttcactggagttggaaacgggtgcgcaggagatattcaagttattgccccatacctttgttgatgctgagaagcttcccgaaatttttcaggccaggaatctgtctaagcaatctcagtcgaccaagagagtatttcaactttatggttgtgttgtgacctctagagacatggtttctcacaaggatcccaccagacaatttgacaaaggtgactattatgctcatccagaacactacacccctgtttttcatgaaagaattgctccatatgcatctgtcatcgtaaactgtatgtattgggagaagaggtttccaccattactaaatatggatcagttacagcaattgatggagactggttgtcctttagtcggcgtttgtgacataacttgtgatattggaggttccattgaatttatcaacaagagtacatcaatagagaggcctttctttcggtatgatccttctaagaattcataccatgatgatatggaaggtgccggagtggtctgcttggctgttgacattctccctacagaattctctaaagaggcctcccaacattttggaaacatactatctagacttgttgctagtttggcctcagtgaagcaaccggcagaacttccttcctacttgagaagagcttgcattgcacatgctggcagattaactcctttgtatgaatatatccctaggatgagaaatactatgatagatttggcacccgcaaaaacaaatccattgcctgacaagaagtatagcaccctggtatctctcagtgggcacctatttgataagttccttataaatgaagctttggacatcattgagacagctggaggttcatttcacttggttagatgtgaagttggacaaagcacggatgatatgtcatactcagagcttgaagtaggagcagatgatactgccacattggataaaattattgattccttgacttctttagctaatgaacatggtggagatcacgatgccgggcaagaaattgaattagctctgaagataggaaaagtcaatgagtatgaaactgacgtcacaattgataaaggagggccaaagattttaattcttggagctggaagagtctgtcggccagctgctgagtttctggcatcttacccagacatatgtacctatggtgttgatgaccatgatgcagatcaaattcatgttatcgtggcatctttgtatcaaaaagatgcagaagagacagttgatggtattgaaaatacaactgctacccagcttgatgttgctgatattggaagcctttcagatcttgtttctcaggttgaggttgtaattagcttgctgcctgctagttttcatgctgccattgcaggagtatgcatagagttgaagaagcacatggtaacggcaagctatgttgatgaatccatgtcaaacttgagccaagctgccaaagatgcaggtgtaactatactttgtgaaatgggcctagatcctggcatagatcacttgatgtcaatgaagatgattgatgaagctcatgcacgaaagggaaaaataaaggcatttacatcttactgtggtggattgccatctccagctgcagcaaacaatccgcttgcctataaattcagttggaacccagctggtgcactccggtcagggaaaaatcctgcagtctacaaatttcttggtgagacgatccatgtagatggtcataacttgtatgaatcagcaaagaggctcagactacgagagcttccagcttttgctctggaacacttgccaaatcggaattccttgatatatggtgacctttatggtatctccaaagaagcatccaccatatatagggctactcttcgttacgaaggttttagtgagattatggtaaccctttccaaaactgggttctttgatgctgcaaatcatccactgctgcaagatactagtcgtccaacatataagggtttccttgatgaactactgaataatatctccacaattaacacggacttagatattgaagcctctggtggatacgatgatgacctgattgccagactgttgaagctcgggtgttgcaaaaataaggaaatagctgttaagacagtcaaaaccatcaagttcttgggactacatgaagagactcaaatacctaagggttgttcgagcccatttgatgtgatttgccagcgaatggaacagaggatggcctatggccacaatgagcaagacatggtactgctccaccacgaagtcgaggtggaatacccggacgggcaacccgccgaaaagcaccaagcgacgctactggagttcgggaaggttgaaaatggcaggtccaccactgccatggcgctgaccgtcggcattccagcagcaataggggccctgctattgctaaagaataaggtccagacgaaaggagtgatcaggcctctgcaaccggaaatctacgttccagcattggagatcttggagtcgtcgggcatcaagctggttgagaaagtggagacttgaaagttccctgatacacagataaagatagtatgatatagcagggcacatgtatcttttgtattaactccgttctggaatatatatttgtgaactaaaatgtgacaaataaaaagaacgggtggagtatattgtaagagacggcaaagaaacctctgtatatatgacctgtcgatatcaaataatgccgatcagttagttggcttggctcttttgagggtttagtttatactagtaaatgagagcaaccagcgaagcataaacaagatgagacgtcagagcagcaacaacaacctgcgttgcctttggtttatattgcatcggttctccgaatgaactttgcatcctgtgcacatcagacatgtcccagagggatttcattttcattaaattgacatatcagcaaatctgcttatgcgtcgagatatttatgagaggggaagagagcttcatgaaaccaaaccggtcctcacgactacccaggcgatgaaatccccgctaggctgattgcttgatct

SEQ ID NO: 214318 - DNA, 1319 bp, Zea Mays
acccttcccatgtgtcacgcatgagggtgactcatggccaccttttggttgcactgcgtggcatgttcatgtgtgtacctgtacagctcctcaagattcccagtcatgatcatgatacgagcgacagatcaaggggccggggatttaacaaaagagagagagagagagaaaaaaaaaacccacccggcagactgcgcttagcccttgcgttctccccgttctggcctcgccgcgcccggtcctctcctcttctatatatagcgtcccgggtctcacggcatttgcctcacacaaccaagctcgatcgatctcactctcagctggtcgctcactcttgcagctccacccttcactcagtcttaggctcttagctctaggctctagctagccgcgccactccttcgtgtagccatcagccttctcatcgccaccaatggccactgccgaggtccagaccccgaccgtcgtggcggccgaggaagcgcccgtggtggagaccccgccgccggccgtcgtgcccgaggagtctgcccccgccgaggccgaggccgaggccgaggctgaggctgctgctcctgctgatcccgaggagcttcccgcggccgagcagcaggcagccgccgaggaggaggctgctgctgctcctcctgctggtgccgaggagcccgccgcggccgagccggtcgccgaggcagaggctgctgctcccgaggagctcgccgcggacgagccggaggctcctgctcctgctggtccccaggagccggccgccgaggcggaggaggttgctgctcctgaggagcccgagaaggccagcgagtgaggccgtgcgcacgcagcggcggcggccagggcccaggggatcggcgtgcgcgcgtggcggggtagtcgctcgcgcgcgtacatggcagtatgacacgggattttgctgttcagtacgctacggttattactggcgtctctctctgtgtgtgtgtgtgtctcgtacgtagcccggtacgtagctagcagtgactgtcgcgtggacgtgtccggtgcgggctgcgagtgacgtgggctaaataaagtgtgcgtcgggtggtaatggtggtggggcccggtgtcagtggcgcggtgccccatgcctgccgctgctgcagcttgttgtgtcttgtgttggttggttcctgttctttctgtctatctattctcatgcatggcagtttgggtatggtatgggtcgtcttctttggttacgttccctgcattctgtttgtgtcattgtgtgatgatacgatcttctttatataataatagagccagtcgttcatcagcaaacc

SEQ ID NO: 214319 - DNA, 686 bp, Zea Mays
ctcccactcccacctccagcctccgcaagcatacttcaagtgcgcatatggttgctttgatcggcgccatactcaggaagcgatcagcaactgtgtggagaattgtagtgtgcctgtccttgctgccaacaatatttttgagagtgagatggccaagtttcagggaatgttgaaccggtcattgagggtctgtcaagataagtttgaagctgccaatctccagaagttgaaatcagatgcaactcgggaactggaatcctgtgtcaacagatctattgatgacagcctcagggtccttccgcatgtggtggatcagatcaagtccaccctcaaaatcaattagaggcactattacttttagcaaatgaaccagatatagttgagaatgtttcatattcacattcgctgcataactccacattttcagagctcttaccgatattgatagaacatgatcaccctatcgtagttttttggattctgctcttaccacctagtcctggcatgtcaacagcgtcgacattttgaactctactgagaacacagcttaggcattgaaaggctggatgaacttgttgtgctacatgtacaagaatactcttacgtcttgtgattttttacgttgctgtaaagtacaaattgtatgttgcgacgagacgataaaatgcaaaaaatcatacagacaa

SEQ ID NO: 214320 - DNA, 1949 bp, Zea Mays
cgatcacatgcatgcaagtgtagacatccccatacgtgtaagcatgtaacagtccatgtttgtaggcagccaaggccacgatgcggaaagaatggtcccctttggctaaagatgtcacgatatgagacaaaccctcacgccgatctgctcagctcaatgtcccatctctctccttcatcttctgatctgacgccgcgaccttcgatcttctccagctccgacgccgacgacctggatcctgcactgcgtacctcacgatgagaaccggcggctggagatcagccgtttttataatagcggcggagatcggcgagcgcttcgctttctacgcagtggcctcaactctgatcacctatctaacgggacccctgcaagagggaatcgcggccgcggctgccgccacaaacgtgtggaacggcacggcgctgatgctgcccctgctgggcggcgccattgctgacctgtggctgggaagatacctcaccattgtcttagcgtcactcctatacatcctgggtttaggcctgctggccgtgtcaaccgtggttggggggcagcactgcgacgctgccgcccacaccgccggtgagaagtgcccgccgccgcccgccgcccaggtggtcctgttctacgtgtcgctctacgtggtggccgtgggcgagggcgggcacaagccgtgcgcgcacgcgttcggcgccgaccagttcagcggcagcgacccgggcgagtccgtctccaggggcgccttcttcaactggtggtacttcggcgtgtgcgccggcaccgtcgccacgctcctggtcgtcagctacgtgcaggagaacctcggctggggcctcggcttcgccgtcccgtgcgccgtcatggcgtgcgccctcgccgtgttcctgctcggtacgaggacgtaccggcacaccggcgacacggtcgggacgcggaacggcctgttcgctcacgccgccgaggctttcgctggctgctggcgtcggcagcgacgtagcagcagcagcagcagagtcgatgaggaagcgcaggtggcgacgacgaacacagccgtcctcctggtcagcgaaaccaaggacgtcctccgtctgttgccgatatgggcgacaacgctggtgtacgccgtggtgtactcgcagtccatgacgttcttcacaaagcaggcggcgacgctggaccggcgcgtgggcgagctggccaaggtgccggcggcggcgctgctggccttcatcagcgtgaccatcatggcgctgatcccggtctacgaccgcgtggtggtcccgctggcgcggcggtacaccggcaggccgtcggggatcacgatgctgcagcgcatcggcgcggggatgctcctgtccgtcgcgtccacggtgaccgcggcgctcgtcgaggcgcgccggctccgggtcgcgcgggccgccgccggcctgctggccgacacgcccggcaaggcggcggcgcagcagcagctgccgatgagcctgtggtggatggtgccgcagtacgtggtgttcggcgccgccgacgtgttcgccatggtcggcctgcaggagttcttctatgaccaggtgcccgacaggctgcgcagcgtcgggctggcgctgtacatcagtgtcttcggcgtcgggagcttcgtcagcagcgcgctcgtgtcgggcatccaccgggcgacggcggccaggggccagagctggttctcggataacatgaacggcggccacctcgactacttctactggctgctcgccgcgctcagcgccctccagttcttcgcctatgtcttcgttgcgtggaggtacaaatataaggacgctggagccgagcacacgtgacgtgacatcgtagtaggatctatcagatgtatgccgttgcacagcgacatcaaacagagggatagctaggagagaccagcaaagctgcggaaaccaccacgagcagcagaccag

SEQ ID NO: 214321 - DNA, 991 bp, Zea Mays
gtttttttgtactattacaggagtttgttttcattgatggtgcaaaacgccttgagggaaagaagcctgatatatttgtagtcaactcttttggttctggtttccaggcactttttattttcctactccttccatttctctctaacttgaaagggattccttttgctgaactccctgcatacctaacccgtggtgctgcatgctttctgaatgtgggagggaatctgaaggattgccatggagctcctttgctaccacttctctacataactctgaacatggccttcaacatttctgtccttaatcttgtgaagatgtctacagcagtggttgcttcgctgacatcaactttagcagtacctctttccatctatatactgtcactgcctctaccatatctacccgaaggaacaaatttgagcgcatcttttttgattggtgttgctaccttagtgctcggattgcttctatacaatcttcctcaagaatcaaccaatcaagtaaaggaagattaatctaaacccatatcagatataaggttaacaggaagctattggtgctccactaagaaaatagccgcattttgttgacagtggcttcacagtttggtacataactcatgaagagcagtgttcttctgccacaaacatttgcggtgcaaacatttgaggcaccagctgacttcaaagtttagaaacagcaagttcttgtttcatctgttaacaaaatcctaatggattatgcagctatatataagctctacctgagcggatgtaactactaactactttcagatgagtaagggctttacaaattcattggttgtataattgttctcaccattttttggtcaattcaagactaacataccagactccgtgggatttattatgtaaataagtaatgattgtaaccattataaatcttgattgtatggccaaccatttcaagtgaatgctagatacacggactacgttactattacttattt

SEQ ID NO: 214322 - DNA, 2616 bp, Zea Mays
gtaggacgcgttaaggatgaggaggcggaccgagtcgacgaaagtggctccggtgctggtgccatcgaggcggtagacaccggtggcctcaaacgaccgcagctcgtcgctgacttccatctgcggtggcagcggcaagggtttggcagaatctgaacttggaactactgggtctccttccttcgagccggtgcagagggccgagcgtcgccgtcaccgccgacgcccgagtttgcgggccgcctccagtcctccctccatctcaggtaagcggccgccgagcagccccgggccaggaggcgggagcgagcacgcgggcgtggggaggtcagtcagggaggcacgcgccgtcagtcgggttcaagtatcattggccccctaccagtcagatactctgcgagcgaaacgtgagttggcacagcagacaacacccgcgtgcagcgctgcaatccaaagaagcgaagcaaccaacccccgaaatcttcaacggcgccatcgccactgcgtcatgcccgtcccgcccctcctctcgccacttcgcctgccctcgccagcgccgcccctccaccgcaatggagcgccatggcggcgcccgacgcaactacgtgccgcactacgggtcccccctccgcttcacctggggctcgccgcggcccgtggcgatggcgtgaggcggttcgtcgggacgctgggctcgaagagagcgcgagctgttggtgcaattagggtttctgcgatctctggagacggcggtggcggtgctggtggtacgggaattgcggcggcagcggccgccactgtggtctttgctgtgatgaaccgggtgctctacaagctggcgctcgtgccaatgaagaattaccccttcttcctcgcccagttcgccacatttgggtatgtcctagtgtatttctcaattctcttcataagatttcgcgctgggattgtcactagagaaatgttagcgcttccgaagccacagttcatgctaattggtttactggaagcgctaggtgctgcttcaggcatggctgctgctgctatgttgcccgggccatctattccagtgttgtcacagtcctttctggtttggcaacttatcttatctgccctcatcttgggaaggaaatatagagcaaatcagatccttggctgcttgcttgttacagctggagtaattctagcagtggccggtggagccagtaatggtccgattctctttgaagtcaaattcttttggccagcagtaatgatgatttcagctgcatttcaagctgctgcttccattatcaaggagtttgttttcattgatggtgcaaaacgccttgagggaaagaagcctgatatatttgtagtcaactcttttggttctggtttccaggcactttttattttcctactccttccatttctctctaacttgaaagggattccttttgctgaactccctgcatacctaacccgtggtgctgcatgctttctgaatgtgggagggaatctgaagggtgagtattgtttctcatatcacattcatgtggtaaataagtggagcttctcatattatataatttcaaatctatggttaattagagaaaaagtgatgttctcatattatatgatttcaaatatatggttgattggagaaaagggatcttcatgaaatctttcacaagtgaatattatccatctcaacctttttgttttggtattatctatattattgaggtatgcatggcataaatgtttaacactttgctagctatgccaaactcaaaacgcttgtggccagcagtcttgaacatgattatctatgatctatgatgcaagatcatttgctaacggtttagatttttcagattgccatggagctcctttgctaccacttctctacataactctgaacatggccttcaacatttctgtccttaatcttgtgaagatgtctacagcagtggttgcttcgctgacatcaactttagcagtacctctttccatctatatactgtcactgcctctaccatatctacccgaaggaacaaatttgagcgcatcttttttgattggtgttgctaccttagtgctcggattgcttctatacaatcttcctcaagaatcaaccaatcaagtaaaggaagattaatctaaacccatatcagatataaggttaacaggaagctattggtgctccactaagaaaatagccgcattttgttgacagtggcttcacagtttggtacataactcatgaagagcagtgttcttctgccacaaacatttgcggtgcaaacatttgaggcaccagctgacttcaaagtttagaaacagcaagttcttgtttcatctgttaacaaaatcctaatggattatgcagctatatataagctctacctgagcggatgtaactactaactactttcagatgagtaagggctttacaaattcattggttgtataattgttctcaccattttttggtcaattcaagactaacataccagactccgtgggatttattatgtaaataagtaatgattgtaaccattataaatcttgattgtatggccaaccatttcaagtgaatgctagatacacggactacgttactattacttattt

SEQ ID NO: 214323 - DNA, 844 bp, Zea Mays
ctcgcctcgctcggcgcattggagaggtagtagctagcgcacgcccttcgtccgtcaagcccagtagcccacacctgcacctctatggcactattagcacctctatctagttcttctctcttcagcctcggatccaggcgagcaccatacccctgcaaataataaggttaccagcttgcaggcagccacaggcacggcttcaactacaacttggctagagaaattttaaaagaagagaagtgatgcgggtatagttacttcaagataaaagcgtcaaagtaatgtaaatgagctatgggcttttgagcaagcacggagcgagggccactgcctgtggtcttgtttcttcaggtaaagaaaaacagttcttcctgagtgaggggtagccaagatcgacgactggcggcaggtgtacaagcccacaaccacaagtcgtcgtccaggctctcgactcgagggagaagcaactccgatcacttgttcagagttgcatgtcccgtgaactcagggccagaagtccatgcagtggcaaaagcagaacgcgtgttggaagtccaagcgcaagcccatcccgggaagctgcctgtcggatgtcgatgaacgcgtgttggaagtccaagcgcagaacgcgtgttggaagtccaagcgcaagtccatgctgtggcaaaagcagaacgagtcaatggtgatcgatgagacgccgcgttgtgttgttcttgcagtcttgctcatcgtgctcgccgtgtttcacaacttatgcatttacatattgtgccgtctcgtcactcgaaactgaagcaagctagagttctcgatcgtatcgtattccgatccatcttccgat

SEQ ID NO: 214324 - DNA, 1004 bp, Zea Mays
ggtgtcgcgcgcaggccggaaaagggcaggcccccaaggactctgcgccggcaccgcgccaacaaaccctggctttggcgtgcggacgaccggccggacgtgccgtcgtgtcgaagcggcaccgctcgtctcgacccgtcgtcgacccctgtgccgcagccagatcggcctgatgagttggaaagggtagaatcagccggtggcagggtcattaactggatggggtaccgtgtccttggtgtgcttgcgacgtcaaggtcaattggtgactattacatgaagccattcatatcagcggaaccagaggtgactgtcacagagcgcacgcacagggacgagttcatcatcctggcgagcgacgggctgtgggacgtcatgtccaacgaggtggcctgcagggtcgcgaagagctgtctgtgcgggcgcgcggcttccaagtgccctgacaccatccacgggagctcggccagcgatgccgccgcggtgctggtggagttcgccatgtcgcggggcagcactgacaacatcagcgtcgtggtggtggagctgaaacgtctcaagaggtggaagggtggtagtagacagaacggtcggacgtagcctggccctgtaggagtctccggctcgtcgcgaaatatatgcatggcgacggagctctagggaagcagccgagcatatgacggaatggtgtaaagaagaagaagaagaagagagggttctgactcttgagagctatacctatgctgtgaccaggtgagtgtagccgtgtaggagctgctcgtagctttgccgttgtattgcgttggttacttggttctttctttagttcaatcaatactaacaaaacggcattccggccgatggaagcagcaggaaataatgtaaaaaagccaaaacaaatatggaaaaaaataagaggaaaatggtattggcatatattgtgtcatcgctcgatcacaaacccatatgagtttacggagcaatgcatgtctttgatatcctct

SEQ ID NO: 214325 - DNA, 1658 bp, Zea Mays
gctccttgctgttctgctgactggtctcaccatctcatcccaccaccaccaccaccaccaccatctttaggataagatagcaaatatatggccatcatactcgtacgagcagcgtcgccggggctctccgccgccgacagcatcagccaccaggggactctccagtgctccaccctgctcaagacgaagaggccggcggcgcgccggtggatgccctgctcgctccttggcctccacccgtgggaggctggccgtccctcccccgccgtctactccagcctcgccgtcaacccggcgggagaggccgtcgtctcgtccgagcagaaggtctacgacgtcgtgctcaagcaggccgcattgctcaaacgccagctgcgcacgccggtcctcgacgccaggccccaggacatggacatgccacgcaacgggctcaaggaagcctacgaccgctgcggcgagatctgtgaggagtatgccaagacgttttacctcggaactatgttgatgacagaggagcggcgccgcgccatatgggccatctatgtgtggtgtaggaggacagatgagcttgtagatgggccaaacgccaactacattacaccaacagctttggaccggtgggagaagagacttgaggatctgttcacgggacgtccttacgacatgcttgatgccgctctctctgataccatctcaaggttccccatagacattcagccattcagggacatgattgaagggatgaggagtgatcttaggaagacaaggtataacaacttcgacgagctctacatgtactgctactatgttgctggaactgtcgggttaatgagcgtacctgtgatgggcatcgcaaccgagtctaaagcaacaactgaaagcgtatacagtgctgccttggctctgggaattgcgaaccaactcacgaacatactccgggatgttggagaggagtaagtaacatatatattcttccacaagatgagcttgcacaggcagggctctctgatgaggacatcttcaaaggggtcgtcacgaaccggtggagaaacttcatgaagaggcagatcaagagggccaggatgttttttgaggaggcagagagaggggtaactgagctctcacaggctagcagatggccagtaagtccactcaacttcacatttcccacccagtatagcacagcatcctcacttccttttctttgttaccattgcaggtatgggcttccctgttgttgtacaggcagatcctggatgagatcgaagccaacgactacaacaacttcacgaagagggcgtatgttggtaaagggaagaagttgctagcacttcctgtggcatatggaaaatcgctactgctcccatgttcattgagaaatggccagacctagccaccagagaagctcgattccataggtccgtccaacacggcgcgccccgtggaggagctggccaacgctaatggtacggccgtcactcgtcggcgaaagcaataagcgcgtggcggcgtggggcgtggcgaggccgatcgccgcactcgcctcactcgaatggcggcgattacggaggcggattggcttcgtgttcaactgttcgttcgtggtgggacgactccggtccggtggcggcagcgcggaggttccagccgcgctcccg

SEQ ID NO: 214326 - DNA, 784 bp, Zea Mays
cgatcactgagggcctgacctcctccggggctcaccggttttgtgcccgcatgagaccctccatagtctaggcgaccaatggccgggcagcacccacacccagcctgggtggcgcccaaagatcaagcgggagatttagactatgaagttgatcaaacatcccaatatggtccaactgcatgaggttatggcgagcagaacgaagatatacatggtccttgaatttgttgatggaggtgagctattcgataagatcgtcaattctggaaggctaggagaggatgaatctaggatatattttcatcaacttataaatgcaattgattattgccatagccgaggagtgtaccatagagacctgaagccacagaatttgcttctggattcaaatggagctcttaaagtttcaaacttcggcctaagtgcatttgcaccacaaacaaatgtatgatctctagtcagtaactagaaacaaatgtactatctaggcactctgtgtcacgcatgtgacccggtcccggattcatgacccatagtcatacgagtgtaccctctttctaaccatccaagcactccatgtcatgtatgttgtacccagaatgcacgatccatagtcatatgagttagaacaacccacatagtactggatgatgagatgtgtcttattatgactatggatgagacttttgtgatgtaattaatgagactatggatttaaatactgttatgtgattgtgtgtgagatgttttatgtgaaaatatgttgtgctatatagcttttgat

SEQ ID NO: 214327 - DNA, 694 bp, Zea Mays
tagtgtgggccaacaagggggctccatgtttgacgctggctcaagagctagatcaagcgggagatttagactatgaagttgatcaaacatcccaatatggtccaactgcatgaggttatggcgagcagaacgaagatatacatggtccttgaatttgttgatggaggtcaattctggaaggctaggagaggatgaatctaggatatattttcatcaacttataaatgcaattgattattgccatagccgaggagtgtaccatagagacctgaagccacagaatttgcttctggattcaaatggagctcttaaagtttcaaacttcggcctaagtgcatttgcaccacaaacaaatgtatgatctctagtcagtaactagaaacaaatgtactatctaggcactctgtgtcacgcatgtgacccggtcccggattcatgacccatagtcatacgagtgtaccctctttctaaccatccaagcactccatgtcatgtatgttgtacccagaatgcacgatccatagtcatatgagttagaacaacccacatagtactggatgatgagatgtgtcttattatgactatggatgagacttttgtgatgtaattaatgagactatggatttaaatactgttatgtgattgtgtgtgagatgttttatgtgaaaatatgttgtgctatatagcttttgat

SEQ ID NO: 214328 - DNA, 828 bp, Zea Mays
ctcaagttagtgtgggccaacaagggggctccatgtttgacgctggctcaagagctagccttgccgatcactgagggcctgacctcctccggggctcaccggttttgtgcccgcatgagaccctccatagtctaggcgaccaatggccgggcagcacccacacccagcctgggtggcgcccaaagatcaagcgggagatttagactatgaagttgatcaaacatcccaatatggtccaactgcatgaggttatggcgagcagaacgaagatatacatggtccttgaatttgttgatggaggtcaattctggaaggctaggagaggatgaatctaggatatattttcatcaacttataaatgcaattgattattgccatagccgaggagtgtaccatagagacctgaagccacagaatttgcttctggattcaaatggagctcttaaagtttcaaacttcggcctaagtgcatttgcaccacaaacaaatgtatgatctctagtcagtaactagaaacaaatgtactatctaggcactctgtgtcacgcatgtgacccggtcccggattcatgacccatagtcatacgagtgtaccctctttctaaccatccaagcactccatgtcatgtatgttgtacccagaatgcacgatccatagtcatatgagttagaacaacccacatagtactggatgatgagatgtgtcttattatgactatggatgagacttttgtgatgtaattaatgagactatggatttaaatactgttatgtgattgtgtgtgagatgttttatgtgaaaatatgttgtgctatatagcttttgat

SEQ ID NO: 214329 - DNA, 729 bp, Zea Mays
gcccgttcctcaagttagtgtgggccaacaagggggctccatgtttgacgctggctcaagagctagatcaagcgggagatttagactatgaagttgatcaaacatcccaatatggtccaactgcatgaggttatggcgagcagaacgaagatatacatggtccttgaatttgttgatggaggtgagctattcgataagatcgtcaattctggaaggctaggagaggatgaatctaggatatattttcatcaacttataaatgcaattgattattgccatagccgaggagtgtaccatagagacctgaagccacagaatttgcttctggattcaaatggagctcttaaagtttcaaacttcggcctaagtgcatttgcaccacaaacaaatgtatgatctctagtcagtaactagaaacaaatgtactatctaggcactctgtgtcacgcatgtgacccggtcccggattcatgacccatagtcatacgagtgtaccctctttctaaccatccaagcactccatgtcatgtatgttgtacccagaatgcacgatccatagtcatatgagttagaacaacccacatagtactggatgatgagatgtgtcttattatgactatggatgagacttttgtgatgtaattaatgagactatggatttaaatactgttatgtgattgtgtgtgagatgttttatgtgaaaatatgttgtgctatatagcttttgat

SEQ ID NO: 214330 - DNA, 2012 bp, Zea Mays
gtcaaaccgaagcgtactgggccacgcaaacgcaacgacgctcgcagtcgcagaagaaactgtccagccatcccatccgttccacccaagcacaccaacggtgctgatcccgtcctctctcggcgccgaccagactcgcccgctactcttccgaaaaaaatatcccaaatagttactccactcccctcacccctcccgactcccgtgctctctctctctctctctctcggatccgaattgccagcgcaccagtcgagctcgcgggaactcgccggcaccggcgatggcctccgccctactggccggacagggcggggcgcgccaccacggctggggggagacgcgcgccccactcgcgcccatacctcccaaccctaaccccagccagccccacccgcgcgccgacgggtccaagtccaagccgcgggcggcagcctcctcgccggcggccggatacgtgacgttccgcccggcgtccctgggcccgcgcgaggcccgcgcgctccgggaccgcctcgcgggggagctcacccaggtgcgcgccctcctctcccgcatcgacacctggcagcagcagggcccgccgcccgcggggctccgcggcgaggtgcggaagcggtgcgggcagatcctcaccaggctgcgcaaggacaagcggagcgtgtggttcaacgcgcccgtcgaggtggagcgcctcggcctccacgactaccacgccgtcatcaagcgccccatggacctcggcaccgtcaaggagggcctcgccgccgggaggtacgcctcgcacgacgacttcgcggccgacgtccgcctcaccttcaccaacgcgctgcggtacaacccggtcggccacgaggtccacaccttcgctggcgccctcctcgcctacttcgagaggatgtacaaggaggcgctcgcctgcttcgaggaagactgcaaacgccctgagccgccaaggccagtgccgcctgaattgacacctccacccgcagctgagcctgttgaggccaaggttaagccgagggcagggaatgtgaggatgcggaagcccaaggccagggagcctaacaagagggagatgagcctggaggagaagaacatgctcagggtggggctggagagtttgcccgaagagaagatgcataatgtgctacagattgtgcgcaagaggaacaacaatccggagatgctgggggatgagatcgagcttgatattgatgagatggatgttgagacacagtgggagcttgatcgtttcgtagctaacttcaacaaagcgctcaagaaatctcagcgtgctgtggtgatgaatggtggcgccgctgatgtaaccagtgctgctgtggctgagaatgacactgcacctgtcagcaatgtgcttacgttggttgacaatgatgatgtggagagagagaaacctgtgaggagcgctacaatggctgagcaggtggatgagtatgttgatattggggatgagatgccaacagccacttaccaatccatggaaatcgagaaggacgctgaaggttctgagtcgaggagctcaggggacagtgcctcaggagctggcaatgctcattctttggcttaacactaggatttgaaaatttggatgatctgagttctgttgttgggtgatttacgtagagctagtggtaattgtaagtatgtagctgtttctgagacgtgggtgtgcgtaggcttcgattacacagttagtagtagataacaaactggctttgtgggtgtctgttagcaccatgtgtatgtaagctggtggtggaaggtattggggtgttaaaagtagttgatcgaccttctggtatggagggggccagggctagtgtttgtgttctttgtagtacaattgttctggtgcagacctcttatgtaattaatgatttgtgcatgacattaaagtatggttgtataagtaacaatgcagtatcttttgttcggtgatggtttttgacctttttcggataggcctatgcaagatagttttcaatgac

SEQ ID NO: 214331 - DNA, 7229 bp, Zea Mays
gcctcgcagctccgaaatcggtcactttttcccgcccattcccacccccgagatctccaaagcccgaccgcaaaatttccccaaccgggcttcttcggtcatccacctagacggcaatggaggccgccgctgccgacctcatcgccgccctctcgtccccatcctcattcgctggcctctactctcgcttcgccgcctacctacagcccttcaccccctacctgcacagctcaaaccctaacaccaagccaccgcagaagagggcgacgaagcagaacaagcagccgccgcctcccgacgcggccaccctccgcccccttgcgaagcgattcctgccgtttctcggtcgcgcgctccacctcctcccgccgctcgtccgcgcttgtcctgtttcgggcgataagggcggcgaagccgccgacgaactgcttgagatctacggcctcctcttggactgcctagaggccatatcaccctgccttgcggggaaaccctactccgtgttgctccaacgcggccgcttcatctgttgcctcgagtcgcgcggtcacttcgcacgcgccagtgcggaggctgccgctaccctcgacgccctccgctccgcgctctctccacccaccacgagcaccaagtcgcgacgtggtgctgcaggcgttgatcccgtcctccttccggaccccggcagcgctggggaggctggcacggatcctgaagtcaccctccttgcggttgagctcactgtttgccttgctaattgttccagcaagggcaaggtgaaggaacctaccccttatgaacgactcatcagccttttcaaacagctaaaaccatggcttcgtattcttactaatgaagtcagcaggaagtatctcccgttgcttatgaatgccatgagccggtgtaccctttttctggtttctgagtcttcccttttcaatactgatctagtgcatggattctgtcgttacacgatgcaagagtgtgtgggggaggggatgattgagcttttgccagcaattgctcgcaagatttgctcttctgtagatttgacttggggagggagcacacagcttttgctccatgtgctaaaaactgtcactgattctgttgtacgtttaaaggatgatttaccaaaatctgtaaatgagcttctggtatttgtggcgtatttttgccggttcattctttctgccaatagggatttatctgttggcgcttcagaactactttataaacaaggtttcctctcctactgcctcaatgcttcttctttatgcgactgggttatacttgagtgcccagcaagcagaaagtgaaataccaccctatttatcggtgggtattcccaaggatcaaaagtatctacatgccttagagaagggtcttggcacattagcacgatgcccacatgataatacatctttggtcacatacttggactctttggagtttattagcaagatattatcacagcaagtgaatacactttggaaggacttctctgaaggaaaaccaacccattattctggtaacatggactatgtcttgacagcactgcatcagttcattgattcgagcttcacgtcttttagctgtaggcaaatgtctcaaggggacaacgagagacagcatgaacaacatggaaccttactgacagtccttgtttccgcgatcaagttttcctttcttaccaagaaagatatccagaagagcttgggtttcatcgtctgtgccatttcaagtaaatggtttacacttgaggagctcaaattcttgataccttcacttggcaacatcggagtgacacttcataacactggacatgttaaagaggcaccaaaggctttagaactgtgctgccaaacaatatgggcacacatcagccttttttactatagactatcttcaagaacaaaaggaaacgacattatgacagatctgtcgatggatacactgaaggatatggatatcattttggatgcattttcaagaattgcaaagatggttgatgctctctgtagatgtggcacagagatagaaacaccacttgtgattgttgcgaagagtttgtctataatgttgcctgatggcgacaattctgaatataacaaatgttcttttatactgatcaaggcatgggttaaggcagtacacaaggattttagggatactaaggtggatgatgctccacttctctatccctttcttctgaaatatcggtctccatggccaattaagctgataggcttaatagtagagcaggagttattagcatatggattaactgaagcccgaagcatagaattctgctctaaaatgcagataaggatcatagatgttctgcttcataaaatttactgtacgaaagaacattttttggagagatcaagggttcttattagaaaggcaggtgcacttcgtgcatctggagtggaaaacataaaaaactgccttgagtctctacgtgatgccatatctttactgcaaaagatctcacatgattcaactcgtaccaacactactgcaaacaatcagttggccattgcgtactgtttgtatgcgcagtgtgctcaggaagacaaacttggtggggaggtaatatttgatagcgctgagaaagcacttaacttgtggttggacatggaggcttttgaccattcttcttctgatatggtcttgcaacagccatcaaaaactattgtaccacttatttgtttcctggttgatttgttgtctatgaagggctgttttgagcttcagtttaagttgtgcaaggttatgataatgatatggaagcaagaaaaattacccattgagaagttgttgtccttgctgttcaccagtgggcgccttagtcatgcatgctgttatctcccactggatgagcgatttctttctattgccaaagagcatcttggtgtatgttgccatgatattgaattttggataaactgtttcaaaggagaccatccttctctctgtatgtttcttcagagaacgctgcctagtgccttatttattcctcaatcatgtaagcatccctttggaaggcagttcagtttcgtcacgagtgttgatgaagtcagcaaagttgcctcatctctggtatctggagatacttcaaatgagcaatctacctttctagctggatgtttatactatgacttgtcagaaaaagttttttcacgcggacaacttttccaggccttttcatatggaaacaaagccctccatttgcgcaaaaagctcctaaaaaagaagttcaaaatcaattcgggcatatctggaaatatggaaagacaacactgtgggcaggacatctctcttgaagtgtgtggccctacaatagttgagatttggccaaattccagcagttcagtcaacactaaagattttttccttaccccatggaatgtccttaggtgctatcttgagagcactttacaggttgctatgatgcacgaattgattggcaatggtgctgaagctgaagttctcttacagacaggaaaagagatatcaaatttccatggtttatcagttttctgtattgtatttacatcatttctaggtcaactatattgtaagcggcagctatgggatgaagcggagagtgagcttaattatgcccgagatcttgtgaaaaatgatgcaacaatttcatgtaagctctgcagtctgactttggggatatctgttgacatgcaagttggtgatctgtcttggagtctgtttgaaaaaaaaattcataaacagattacagctggtttgtctaacactttaggcatgtaccaatctgcaatagacaaattgaatagcactaacttggaatattgtaacgggtcctttgatagacatacaactggttatcttgtgtgcagcaaagactgtataccgagcaagtatgaagcttgtaatttgggggcagaacccctaacttcaaatgatggattgttatctccatgtagtgtttgcatggtaatacaagttcgaaggaaaaactcagggaatgctgaagctggtccacctttagatgcaaaagcaaggaggtcatcaagaaattcatcacgtttagctaagggacagaatgtagagactcttgcaaagactagaactcgctctagtaaacgaaatgcatgtatgaaaagtgagaaggttttaactgagctaaatagtaaaaataacgtaactgggagtaaggaattggctgcagatgcttctgtttgtggtgaagcagagtgttttcctgatggcattgatcacagcaaagacgacctatgcaatatgtttggttgctggagctgccttttcattaaatccctcaattcggggtgcattcagaatattttgcagctgagattggactatgttcaccgacactaccttgtgtcacttcttttaaaaaaagctagagccttgggatctcatagcaatggggactgtgaagttcatagtgtctattggaagtgcatatcactgctgttcttcaggtcccttccacaagattgctgtaggacttatgggccttatttaattggactaatcatggataggagcattggtgattttcttcctttagagtgtgcagaaatactattcaatatgagcttcttcttgctaaaaagccccctttctgaacagtcaagggacatctgctgtatcttctctagtgtaacaatggcagacgttgtcccctggttgctcaaagcttttgttctatccagagagagcccctcacttgttcaggaggtttgcaagttacttgcatgcatattcttgctatcaactacagattcctcaattcaactgcctttgggttctcataaagaatctctttctttgaatcactgggccacatacttccatcaagtttctgtgggaactaatctcaattgtcattactttgctagcttacaagcatcgtccgaggaaaaggttccaaaggacacctataaagatttcagaaatgagacagatgacaatgtctcgaaatttctcaggttgtcatcaagggacatcaaatatattgagaaacatatgacagaattcttccaaaaacttcctgatgtaccagttctgtgcattagtatgcttggaggtgattatgttaatgcccttctgaaattccattgccatcctccgttttttcctgcttggatgttgctttcaaggtttgattcaacaaatgaacccacaacattgcttcttccagtggattctatttcagcagaaatgcaatttgaagattcctgcaccaaagatttgggcaatccaacgagagttttagataagtggcaatgcccttggggctatggaattactgactatgtagccccagtttttagaaatatactcgaggagaattttatgtccctctccagcgcaacccttactattgatgatgtaaatgcagatcgtgtcaggtggtggtcccatagaatgaagctcaacaattaccttgctaacacattgaaagacattgaagattcttggtttggaccctggaaatgccttctgttgggccatcaattatctgatgaacacattgagactgcctcatcaatgattatcactggtctggatacagaattcgaatttgaagtcaatccaatgctcatcaaggctatccttggtggtgctgtgtcagtggatgaagtacaagaatgttttctccaactcattttgtataaaggttactttggaaggggaggatgctgtgggaaagatagacttaaagctttctcttcctgccaaatggatgatggatctatggagacactcaaacgtataataacggatgcatcatatgagttgcctcagccagctgatagagatccagttattttagttcttgatgtcaatgttcagatgcttccttgggagaacctgcctgtactaaggaatcaagaaatttatcgcatgccgtcaatgggtagcatctttttagcattatctcgaaccaataatgattacaaagatcacagttctccttttcctgtcatcgatcctttcaatacatattatctgttgaatcctagcggtgatctgagtagcacacaagaagaatttgttcagttattcagaaactatgagtggaagggagtggctgggaattctccgaaggctgacgagctggttttggccttgacaaatcatgacctattcctgtactttgggcatggaagtggaacccagtatatttctagtaaggaagtcgaaaagatagataactgtgcagctgctcttcttatgggatgtagcagtggaacacttcattgcaaaggaagttatgctcctcgaggggccccattatcatatttatttgctggttcccctgctatcattgcgaatctctgggatgtttcagacaaggacattgacaggtttagtaaggctttgctcaattcatggttgcatgacaaatctctagatggcaacaattgttcaaaatgttgccagctaacaatggagcttgagtccatgagtattgcttccaaggaaaatggtaaagcaagacgacaaggcacacgaggaaagaagcaacaacatataaatgatagtaccaagtgctgcagctgcaagcagaggcgaatagcttcatatataagtgaagctaggagggcttgcaggcttccacttttgataggcgcatctcctgtgtgttacggcgtgcctacaatcattaggaagaaagtaatgacggattctaccacgagagagatgacctaaaagtgtggtagtatcggcatggtattggtgactattgatagtgtgatctatggcgttgatggagttggcacgaaagtgtgccagctcaaatgcactgactaatttatgctttatacccagtgcttggacgcatggtcttgctggacgacctgcagtgggcgtgcacctattggtattccagagctgtaacgagtgtatattgaagtaaatgttctgtacaatggcgctgtacataactgtaatgtcactggagcatcacttagagaaagtatgttgaggctattgatttcaattgtataacgtgtactatagttttgtccaggaacatagagaatgcatgttgaggcagttaatttcaattgtataaaatgtgtactacagttttgacccttgtaagttacttataagaagctgttgtctatactgtactgaattctacatgaagttacgtaggcagtatgacggaagttttgaaagcatgtaggatgtttggtttcaat

SEQ ID NO: 214332 - DNA, 1576 bp, Zea Mays
cagaggccgtcgagcgataaacagagaaatggctacatatctctcttagacttggctgctggggcggcgctatccatggcgaagtgggcgtcggccgcgagggctacgacgacgacagaccgacttgacgctctcaacagagctgccttgccatgagatacgaggcactgttgcttagagatgctaaatactgcaacgaccttcacttgcaagtgtcccgtcaggagtggttaacttttgcaatggattgtcttgataatggcttctacaccattgcctccaaggcacttggactctgctaattccattgaggagaaggacaagatcattgagataacaggactccagaacttggccaagtcattatctacacaacattgtgacacgcgcagcgatagatcatcagcgcgcggttctagacttcactggcatgagttcattgcgaccaaccagcctcttcgtgagtattgcgacgcttccagaggctgtcgagcgataaacagagaaaaggctatatatctctctcagacttggctgctggggcggcgctatccatggcgaagtgggcgtcggccgcgagggctacgacgatgacgatagaccgacttgacgctctcaacaggtttgggatgttactaggagtcaagtttttgttgagatgagggagcatgagcgacgtgtgtggtcggtggacttctcaattatggacccaacaaaattggtcagtgggagtgatgatggatctgtgaagctgcgggatatgaatcaggcaattttattcttgcacctactgctgggagtattggcactattaaaacaagggcaaatgtgtgttttgtgcaatttcaacctgatactgctcgctccattgccatcggctctgcagaccacaaaatttactgctatgatctacgtcacatacgagctccttattgtacactagttgggcacacaaagactgtaagctatgttaagtatctggatgcatcgacaatagtatctgcatctactgacaactcattgaagctttgggacttatcgatgagtacaggaaggataattgacagtccagttcaaacatttaaggggcatacaaatacaaaggaactgggccatgctgatgttcaaaagagttgtcagaagttcatgacatctggtagcactacaaccagcaatgtatggatgaattgaaggtagtaaagaacgcagacaatcttatagaaactctgcatcttgaaactggcatgattgacaaagaagctggatgaatcctttggattggtgtcttcttatcaccaagcagtaatgtgaagcaagtttatttgttgactaagaacagatgagcacaaatcagtgaagagttcgttgcactagagatggaggatggataggtggtagatttcaatatggctttgatactattgtttccctttacaatctttgtacagaacaagaaaaatgacgttgtatgtggatactattgtaattcaagaatttatttctgaataataaatatatttgtttataatttgtgtatggatttggcataatatataaatttacagctatattgatt

SEQ ID NO: 214333 - DNA, 1124 bp, Zea Mays
cagagaaatggctacatatctctcttagacttggctgctggggcggcgctatccatggcgaagtgggcgtcggccgcgagggctacgacgacgacagaccgacttgacgctctcaacagagctgccttgccatgagatacgaggcactgttgcttagagatgctaaatactgcaacgaccttcacttgcaagtgtcccgtcaggagtggttaacttttgcaatggattgtcttgataatggcttctacaccattgcctccaaggcacttggactctgctaattccattgaggagaaggacaagatcattgagataacaggactccagaacttggccaagtcattatctacacaacattgtgacacgcgcagcgatagatcatcagcgcgcggttctagacttcactggcatgagttcattgcgaccaaccagcctcttcgtgagtattgcgacgcttccagaggctgtcgagcgataaacagagaaaaggctatatatctctctcagacttggctgctggggcggcgctatccatggcgaagtgggcgtcggccgcgagggctacgacgatgacgatagaccgacttgacgctctcaacaggtttgggatgttactaggagtcaagtttttgttgagatgagggagcatgagcgacgtgtgtggtcggtggacttctcaattatggacccaacaaaattggtcagtgggagtgatgatggatctgtgaagctgcgggatatgaatcaggctgggagtattggcactattaaaacaagggcaaatgtgtgttttgtgcaatttcaacctgatactgctcgctccattgccatcggctctgcagaccacaaaatttactgctatgatctacgtcacatacgagctccttattgtacactagttgggcacacaaagactgtaagctatgttaagtatctggatgcatcgacaatagtatctgcatctactgacaactcattgaagctttgggacttatcgatgagtacaggaaggataattgacagtccagttcaaacatttaaggggcatacaaatacaaaggtctttgatgagtaccttaacttgcatgatagcatactcatacagtaatattgttgcatgtcgc

SEQ ID NO: 214334 - DNA, 1590 bp, Zea Mays
gcttgaccccggttcggggcggttttcacagggaagaaaaacacaccccggatggtcgggcacgtaagccccgtctcgtcctccagatatcggccgccaccttcacctccaccgccccggcgcacgtgcgcgtctccatcgtcgccgcctctcctccttcggacacgactgaccttccactggcgccgacgaagaagacacataggaagaagctcaccgccaaacctcatccagatccagtcgctaccctccgaaagccgcatacggaacgtctcgtctcttcctttggatccggcagccggtgctcctcctccggatccggtggtcaactccatcacccccagctccacctcccttagtccccctccatccgccctcacccaccgcttctatatcgccacctctctcgttgtagaagacactgaggatctggccatcatcatccgtcgcccctcactcgatttcccatctgccgctccctcctggtctctgagccgctgatcgggtctccgacgcagggaagtgaagccgttccgccgtgaagcagcgccaccccttgccatccgcccgaccgctgggaagcagggcccacgtctccaagcttcctacaggaagagcctgcgcccctcccaaaggacaaagatattaggatggatgaagtcacacaagctgttgaaaatctgaagaaagaatggagccaagctgtttcacagcttgaggagagcattgctgcaattgaatcatgtggaaaaacagggaaaggaacagaggaagcaacttctcttccaaggttgaatggttctgcacaggatgctctgcagttgctcaagtccctgcagttccggcttgatcttctagctcagcagctacctacttttgatgaagtgcagtctgggcaagcaaccttagggtcgtgggatgaacaatacaagaagttgcgtgctagcctgaggaatgctaacttacaagcgaaagagaacattagaaaagctgctcaggaggagagggagcttcttctagggggtggagaagagtcaacaatccgtaggcgtaatctccagacaaaggttgggatgacatctgctgctgaaagtatcaccgagagcctccgacggtctcgccagatgatggttcaggaagtggaaaggagtgcaagtaccttggcaacatttgatgaatcaacaagtgttctccggaaggctgaaggtgaatatcaaggacaccgctctttgctaatgcgtacccgtggtttgctctccacgatgcaacagcaagatgttcttgataggatcatcctgaccatcggctttatcattttctccttggcggttctttatgttgtctcaagacgtattggtctattgacgctgcaaaggaaactggccgatgccatcagatccggttcattatcagccgatgacatcgtagcgaatgcccaacgtggacctgccccagcaaatgttcctgctcccatctacgatgaactgtgattcgtttgtcctctgtattgttaaggtcgctgaaacacttggaacaaacagagcttgcttctgaagccctacacctctgaaggatcaggatgacgatgct

SEQ ID NO: 214335 - DNA, 1716 bp, Zea Mays
gcttgaccccggttcggggcggttttcacagggaagaaaaacacaccccggatggtcgggcacgtaagccccgtctcgtcctccagatatcggccgccaccttcacctccaccgccccggcgcacgtgcgcgtctccatcgtcgccgcctctcctccttcggacacgactgaccttccactggcgccgacgaagaagacacataggaagaagctcaccgccaaacctcatccagatccagtcgctaccctccgaaagccgcatacggaacgtctcgtctcttcctttggatccggcagccggtgctcctcctccggatccggtggtcaactccatcacccccagctccacctcccttagtccccctccatccgccctcacccaccgcttctatatcgccacctctctcgttgtagaagacactgaggatctggccatcatcatccgtcgcccctcactcgatttcccatctgccgctccctcctggtctctgagccgctgatcgggtctccgacgcagggaagtgaagccgttccgccgtgaagcagcgccaccccttgccatccgcccgaccgctgggaagcagggcccacgtctccaagcttcctacaggaagagcctgcgcccctcccaaaggacaaagatattaggatggatgaagtcacacaagctgttgaaaatctgaagaaagaatggagccaagctgtttcacagcttgaggagagcattgctgcaattgaatcatgtggaaaaacagggaaaggaacagaggaagcaacttctcttccaaggttgaatggttctgcacaggatgctctgcagttgctcaagtccctgcagttccggcttgatcttctagctcagcagctacctacttttgatgaagtgcagtctgggcaagcaaccttagggtcgtgggatgaacaatacaagaagttgcgtgctagcctgaggaatgctaacttacaagcgaaagagaacattagaaaagctgctcaggaggagagggagcttcttctagggggtggagaagagtcaacaatccgtaggcgtaatctccagacaaaggttgggatgacatctgctgctgaaagtatcaccgagagcctccgacggtctcgccagatgatggttcaggaagtggaaaggagtgcaagtaccttggcaacatttgatgaatcaacaagtgttctccggaaggctgaaggtgaatatcaaggacaccgctctttgctaatgcgtacccgtggtttgctctccacgatgcaacagcaagatgttcttgataggatcatcctgaccatcggctttatcattttctccttggcggttctttatgttgtctcaagacgtattggtctattgacgctgcaaaggaaactggccgatgccatcagatccggttcattatcagccgatgacatcgtagcgaatgcccaacgtggacctgccccagcaaatgttcctgctcccatctacgatgaactgtgattcgtttgtcctctgtattgttaaggtcgctgaaacacttggaacaaacagagcttgcttctgaagccctacacctctgaaggatcaggaagtttacgctcttccatctactgcaaaattcaattggaaggatatctattgtagaattaatttagaaagactgcatgtacttctagaataggtacgagtttttatttcagacaacacactcacttctatgtttctt

SEQ ID NO: 214336 - DNA, 1721 bp, Zea Mays
gcttgaccccggttcggggcggttttcacagggaagaaaaacacaccccggatggtcgggcacgtaagccccgtctcgtcctccagatatcggccgccaccttcacctccaccgccccggcgcacgtgcgcgtctccatcgtcgccgcctctcctccttcggacacgactgaccttccactggcgccgacgaagaagacacataggaagaagctcaccgccaaacctcatccagatccagtcgctaccctccgaaagccgcatacggaacgtctcgtctcttcctttggatccggcagccggtgctcctcctccggatccggtggtcaactccatcacccccagctccacctcccttagtccccctccatccgccctcacccaccgcttctatatcgccacctctctcgttgtagaagacactgaggatctgggaagtgaagccgttccgccgtgaagcagcgccaccccttgccatccgcccgaccgctgggaagcagggcccacgtctccaagcttcctacaggaagagcctgcgcccctcccaaaggacaaagatattaggatggatgaagtcacacaagctgttgaaaatctgaagaaagaatggagccaagctgtttcacagcttgaggagagcattgctgcaattgaatcatgtggaaaaacagggaaaggaacagaggaagcaacttctcttccaaggttgaatggttctgcacaggatgctctgcagttgctcaagtccctgcagttccggcttgatcttctagctcagcagctacctacttttgatgaagtgcagtctgggcaagcaaccttagggtcgtgggatgaacaatacaagaagttgcgtgctagcctgaggaatgctaacttacaagcgaaagagaacattagaaaagctgctcaggaggagagggagcttcttctagggggtggagaagagtcaacaatccgtaggcgtaatctccagacaaaggttgggatgacatctgctgctgaaagtatcaccgagagcctccgacggtctcgccagatgatggttcaggaagtggaaaggagtgcaagtaccttggcaacatttgatgaatcaacaagtgttctccggaaggctgaaggtgaatatcaaggacaccgctctttgctaatgcgtacccgtggtttgctctccacgatgcaacagcaagatgttcttgataggatcatcctgaccatcggctttatcattttctccttggcggttctttatgttgtctcaagacgtattggtctattgacgctgcaaaggaaactggccgatgccatcagatccggttcattatcagccgatgacatcgtagcgaatgcccaacgtggacctgccccagcaaatgttcctgctcccatctacgatgaactgtgattcgtttgtcctctgtattgttaaggtcgctgaaacacttggaacaaacagagcttgcttctgaagccctacacctctgaaggatcaggtatcatcaacgaatgtatcaagtaaatttacctgacactcctcgacatcgacgaaacatcttctgatcagttcattcctaactattaaaggaagtttacgctcttccatctactgcaaaattcaattggaaggatatctattgtagaattaatttagaaagactgcatgtacttctagaataggtacgagtttttatttcagacaacacactcacttctatgtttctt

SEQ ID NO: 214337 - DNA, 1683 bp, Zea Mays
gcttgaccccggttcggggcggttttcacagggaagaaaaacacaccccggatggtcgggcacgtaagccccgtctcgtcctccagatatcggccgccaccttcacctccaccgccccggcgcacgtgcgcgtctccatcgtcgccgcctctcctccttcggacacgactgaccttccactggcgccgacgaagaagacacataggaagaagctcaccgccaaacctcatccagatccagtcgctaccctccgaaagccgcatacggaacgtctcgtctcttcctttggatccggcagccggtgctcctcctccggatccggtggtcaactccatcacccccagctccacctcccttagtccccctccatccgccctcacccaccgcttctatatcgccacctctctcgttgtagaagacactgaggatctgatattaggatggatgaagtcacacaagctgttgaaaatctgaagaaagaatggagccaagctgtttcacagcttgaggagagcattgctgcaattgaatcatgtggaaaaacagggaaaggaacagaggaagcaacttctcttccaaggttgaatggttctgcacaggatgctctgcagttgctcaagtccctgcagttccggcttgatcttctagctcagcagctacctacttttgatgaagtgcagtctgggcaagcaaccttagggtcgtgggatgaacaatacaagaagtatgacagtgttggattttttttaatttttttcttcttcttttagcctgctttttttttgcaaaaaaaattgattgtgtttgcaggttgcgtgctagcctgaggaatgctaacttacaagcgaaagagaacattagaaaagctgctcaggaggagagggagcttcttctagggggtggagaagagtcaacaatccgtaggcgtaatctccagacaaaggttgggatgacatctgctgctgaaagtatcaccgagagcctccgacggtctcgccagatgatggttcaggaagtggaaaggagtgcaagtaccttggcaacatttgatgaatcaacaagtgttctccggaaggctgaaggtgaatatcaaggacaccgctctttgctaatgcgtacccgtggtttgctctccacgatgcaacagcaagatgttcttgataggatcatcctgaccatcggctttatcattttctccttggcggttctttatgttgtctcaagacgtattggtctattgacgctgcaaaggaaactggccgatgccatcagatccggttcattatcagccgatgacatcgtagcgaatgcccaacgtggacctgccccagcaaatgttcctgctcccatctacgatgaactgtgattcgtttgtcctctgtattgttaaggtcgctgaaacacttggaacaaacagagcttgcttctgaagccctacacctctgaaggatcaggtatcatcaacgaatgtatcaagtaaatttacctgacactcctcgacatcgacgaaacatcttctgatcagttcattcctaactattaaaggaagtttacgctcttccatctactgcaaaattcaattggaaggatatctattgtagaattaatttagaaagactgcatgtacttctagaataggtacgagtttttatttcagacaacacactcacttctatgtttctt

SEQ ID NO: 214338 - DNA, 2643 bp, Zea Mays
tcgatggccctattgcgtaaaacaataaacccgccttccccaccactggtcatcagtctccactccacgcccgacagagcaggaggactcagaaatggcaatcccagtgcgatcggctgccgcgccccgccgcctcgttccgtcgatacctccggcgagctctggacatgttcgaggactggcgtgcttcggtacccgaaccgggcctcgcggtgcaagagggttgtcaatggtggtcgccgactccaccagccgtcgggccaagcaagcggacggcggggacggcgtccttggggcgcctgttctcggagggctcgggatggagggattgggggatcagctcagcgtggtgatgaagttcggggggtcctcggtgtcgtcggccgcgaggatggctgaggtggccggcctcatcctgacgttccccgaggagcgccccgtcgtcgttctctctgccatggggaaaaccaccaacaaccttctccttgctggagagaaggcagtagggtgtggagttatccatgtttctgaaatcgaagagtggaatatggtcaaaagcctacatatcaagacggtggatgaacttggacttccaagatctgtaatacaagacatgctagatgaactggagcaactattgaaaggtatcgctatgatgaaagagctgacgcctaggaccagtgactaccttgtttcatttggagaatgcatgtccaccaggattttttctgcttatttgaacaaaattcgtgtcaaggcacggcaggtacttcttgatattttcttgatttgcacagtgattcagtgagcttttcaggttatgaatgcagcagcctacaagaatttgctatagtatccctgccctatggtgggggtgtcttgaaactttgattagtcattgatatttttactacatatgcacttcgtgatctcaagtttcagctcattatgttagttgattgccactagtattctgcggaaatttcacatttcgataatgattcgttcattgtccttttatgtgtgcgtggaaaatattcttagtattttttagattttgtgattaatttggtattgccataaaattgtaaccttttagatgatggagataatctccgtccacttcaccaaccaggttacacaaaccattttatcctttaaaatgtggacaacaggatttgaacccttatagtagtggagtcacacacccacaactcaattgagtgtttgactatgatctggatttccctttatttaatatctcaatttgatacaggggccatgtaaccagcctagctgcaaatccccagtacatccatatacatcccccattcttctacattatgcaatgatgtgaactcacgttcattattaattttatttgaaattttttgcagtatgacgcatttgatattggtttcattacaactgatgaatttggtaatgcggatatcttagaagcaacctatcctgctgttgcgaagagacttcatggggactggatacaggatccagcgatacctgttgttactgggttccttgggaagggctggaaatctggtgctgtaactactttaggccgaggtggtagtgacttgactgctacaaccattggtatggaaagatgttgatggtgtacttacttgtgatccaaatatctacccacatgcaaagactgttccatacttaacatttgaagaggccacagaacttgcttattttggtgctcaggttttgcatccacaatcgatgagacctgctagagaaggtgatattccagttagggttaagaattcatacaaccctaaagctccaggcacccttattaccagacaaagagacatggataaggttgtactaactagcatagtgctcaagtcaaatgtcactatgttggacattgtgagcactcggatgcttggtatttgctatatttgaagatctatgtatatctgtggattgtgttgctaccagtgaagttagtgtttctgtgtcacttgatccatcaaagatctggagtagggaactgatacagcaggaacttgaccatgtagttgaagagcttgagaaaatagcaattgttcgtctacttcagcagagggcgataatttcacttatcggaaatgtggagcaatcgtctctcatactagaaaagacgggacgtgtgctgaggaaaagtggggttaatgttcagatgatctcgcaaggagcgtcaaaggttaacatgtcgctgatagtccatgatagcgatgcaaaggcactcgtagaagcccttcatcaggcgttctttgaagacgatgtcctatcacaagtcgaagcggagaacctactcgtgggctgatcaacgtaggctttgctgggtccaggcgtgttatctgttatagattcccactcgcctccatgaacggcatgggcattggatcattgatcatgttttgcttgaaacaagtatgtcttccaggttctcagccaatgactgcaaaactgtgtttctgttttagaactgtttgcagacaccacagtctgagctgcgagcaccgattgtcaacaagatggcaagcctgtgatataattccaactgtctctaatcaatatatataataaacattatcaatatctattaattataagctgttttagttt

SEQ ID NO: 214339 - DNA, 2672 bp, Zea Mays
tcgatggccctattgcgtaaaacaataaacccgccttccccaccactggtcatcagtctccactccacgcccgacagagcaggaggactcagaaatggcaatcccagtgcgatcggctgccgcgccccgccgcctcgttccgtcgatacctccggcgagctctggacatgttcgaggactggcgtgcttcggtacccgaaccgggcctcgcggtgcaagagggttgtcaatggtggtcgccgactccaccagccgtcgggccaagcaagcggacggcggggacggcgtccttggggcgcctgttctcggagggctcgggatggagggattgggggatcagctcagcgtggtgatgaagttcggggggtcctcggtgtcgtcggccgcgaggatggctgaggtggccggcctcatcctgacgttccccgaggagcgccccgtcgtcgttctctctgccatggggaaaaccaccaacaaccttctccttgctggagagaaggcagtagggtgtggagttatccatgtttctgaaatcgaagagtggaatatggtcaaaagcctacatatcaagacggtggatgaacttggacttccaagatctgtaatacaagacatgctagatgaactggagcaactattgaaaggtatcgctatgatgaaagagctgacgcctaggaccagtgactaccttgtttcatttggagaatgcatgtccaccaggattttttctgcttatttgaacaaaattcgtgtcaaggcacggcaggtacttcttgatattttcttgatttgcacagtgattcagtgagcttttcaggttatgaatgcagcagcctacaagaatttgctatagtatccctgccctatggtgggggtgtcttgaaactttgattagtcattgatatttttactacatatgcacttcgtgatctcaagtttcagctcattatgttagttgattgccactagtattctgcggaaatttcacatttcgataatgattcgttcattgtccttttatgtgtgcgtggaaaatattcttagtattttttagattttgtgattaatttggtattgccataaaattgtaaccttttagatgatggagataatctccgtccacttcaccaaccaggttacacaaaccattttatcctttaaaatgtggacaacaggatttgaacccttatagtagtggagtcacacacccacaactcaattgagtgtttgactatgatctggatttccctttatttaatatctcaatttgatacaggggccatgtaaccagcctagctgcaaatccccagtacatccatatacatcccccattcttctacattatgcaatgatgtgaactcacgttcattattaattttatttgaaattttttgcagtatgacgcatttgatattggtttcattacaactgatgaatttggtaatgcggatatcttagaagcaacctatcctgctgttgcgaagagacttcatggggactggatacaggatccagcgatacctgttgttactgggttccttgggaagggctggaaatctggtgctgtaactactttaggccgaggtggtagtgacttgactgctacaaccattggtaaagccttgggactgagagaaattcaggtatggaaagatgttgatggtgtacttacttgtgatccaaatatctacccacatgcaaagactgttccatacttaacatttgaagaggccacagaacttgcttattttggtgctcaggttttgcatccacaatcgatgagacctgctagagaaggtgatattccagttagggttaagaattcatacaaccctaaagctccaggcacccttattaccagacaaagagacatggataaggttgtactaactagcatagtgctcaagtcaaatgtcactatgttggacattgtgagcactcggatgcttggtatttgctatatttgaagatctatgtatatctgtggattgtgttgctaccagtgaagttagtgtttctgtgtcacttgatccatcaaagatctggagtagggaactgatacagcaggaacttgaccatgtagttgaagagcttgagaaaatagcaattgttcgtctacttcagcagagggcgataatttcacttatcggaaatgtggagcaatcgtctctcatactagaaaagacgggacgtgtgctgaggaaaagtggggttaatgttcagatgatctcgcaaggagcgtcaaaggttaacatgtcgctgatagtccatgatagcgatgcaaaggcactcgtagaagcccttcatcaggcgttctttgaagacgatgtcctatcacaagtcgaagcggagaacctactcgtgggctgatcaacgtaggctttgctgggtccaggcgtgttatctgttatagattcccactcgcctccatgaacggcatgggcattggatcattgatcatgttttgcttgaaacaagtatgtcttccaggttctcagccaatgactgcaaaactgtgtttctgttttagaactgtttgcagacaccacagtctgagctgcgagcaccgattgtcaacaagatggcaagcctgtgatataattccaactgtctctaatcaatatatataataaacattatcaatatctattaattataagctgttttagttt

SEQ ID NO: 214340 - DNA, 2926 bp, Zea Mays
tcgatggccctattgcgtaaaacaataaacccgccttccccaccactggtcatcagtctccactccacgcccgacagagcaggaggactcagaaatggcaatcccagtgcgatcggctgccgcgccccgccgcctcgttccgtcgatacctccggcgagctctggacatgttcgaggactggcgtgcttcggtacccgaaccgggcctcgcggtgcaagagggttgtcaatggtggtcgccgactccaccagccgtcgggccaagcaagcggacggcggggacggcgtccttggggcgcctgttctcggagggctcgggatggagggattgggggatcagctcagcgtggtgatgaagttcggggggtcctcggtgtcgtcggccgcgaggatggctgaggtggccggcctcatcctgacgttccccgaggagcgccccgtcgtcgttctctctgccatggggaaaaccaccaacaaccttctccttgctggagagaaggcagtagggtgtggagttatccatgtttctgaaatcgaagagtggaatatggtcaaaagcctacatatcaagacggtggatgaacttggacttccaagatctgtaatacaagacatgctagatgaactggagcaactattgaaaggtatcgctatgatgaaagagctgacgcctaggaccagtgactaccttgtttcatttggagaatgcatgtccaccaggattttttctgcttatttgaacaaaattcgtgtcaaggcacggcaggtacttcttgatattttcttgatttgcacagtgattcagtgagcttttcaggttatgaatgcagcagcctacaagaatttgctatagtatccctgccctatggtgggggtgtcttgaaactttgattagtcattgatatttttactacatatgcacttcgtgatctcaagtttcagctcattatgttagttgattgccactagtattctgcggaaatttcacatttcgataatgattcgttcattgtccttttatgtgtgcgtggaaaatattcttagtattttttagattttgtgattaatttggtattgccataaaattgtaaccttttagatgatggagataatctccgtccacttcaccaaccaggttacacaaaccattttatcctttaaaatgtggacaacaggatttgaacccttatagtagtggagtcacacacccacaactcaattgagtgtttgactatgatctggatttccctttatttaatatctcaatttgatacaggggccatgtaaccagcctagctgcaaatccccagtacatccatatacatcccccattcttctacattatgcaatgatgtgaactcacgttcattattaattttatttgaaattttttgcagtatgacgcatttgatattggtttcattacaactgatgaatttggtaatgcggatatcttagaagcaacctatcctgctgttgcgaagagacttcatggggactggatacaggatccagcgatacctgttgttactgggttccttgggaagggctggaaatctggtgctgtaactactttaggccgaggtggtagtgacttgactgctacaaccattggtatggaaagatgttgatggtgtacttacttgtgatccaaatatctacccacatgcaaagactgttccatacttaacatttgaagaggccacagaacttgcttattttggtgctcaggacttgaaccctgtatagtgtgaccaggctgcttctcagtgaataaacaaatctttcagttgcatacttctcaaaaacgaaagatcctgttcagtagataaacctctgttccctttttaccttttaaagctatattgattgttgtttggcatttgctttactaaccatcatgaattgaacatatagctcatgatgtcagtctcctgaacagaagcgagaaatttaggatcgttattgtggactgttcactccaatgcaggttttgcatccacaatcgatgagacctgctagagaaggtgatattccagttagggttaagaattcatacaaccctaaagctccaggcacccttattaccagacaaagagacatggataaggttgtactaactagcatagtgctcaagtcaaatgtcactatgttggacattgtgagcactcggatgcttggtcagtatggtttttctggcaagggtatttgctatatttgaagatctatgtatatctgtggattgtgttgctaccagtgaagttagtgtttctgtgtcacttgatccatcaaagatctggagtagggaactgatacagcaggaacttgaccatgtagttgaagagcttgagaaaatagcaattgttcgtctacttcagcagagggcgataatttcacttatcggaaatgtggagcaatcgtctctcatactagaaaagacgggacgtgtgctgaggaaaagtggggttaatgttcagatgatctcgcaaggagcgtcaaaggttaacatgtcgctgatagtccatgatagcgatgcaaaggcactcgtagaagcccttcatcaggcgttctttgaagacgatgtcctatcacaagtcgaagcggagaacctactcgtgggctgatcaacgtaggctttgctgggtccaggcgtgttatctgttatagattcccactcgcctccatgaacggcatgggcattggatcattgatcatgttttgcttgaaacaagtatgtcttccaggttctcagccaatgactgcaaaactgtgtttctgttttagaactgtttgcagacaccacagtctgagctgcgagcaccgattgtcaacaagatggcaagcctgtgatataattccaactgtctctaatcaatatatataataaacattatcaatatctattaattataagctgttttagttt

SEQ ID NO: 214341 - DNA, 1001 bp, Zea Mays
cggctggttccaaggctgcaggaatttacttacctacaacagagtgacgagactccaatggtctgggagatccttctttatatgtatgtcctttattcgccggactggcattacaggagcacaatgccaaccttccttttcctatatggtgctgcctttgctgtagttcatttctttgcccggttccaattcgtattcaagctgcattacattggcctctgcttcctctgcatcccccggatgtacaagtactacatacagaccaaagacgtggctgcgaagcggctcgcaaagctgtgggttctcacgttaacccttgggactctctgctggctagttgatcgcatcttctgcaagaagctttcgcattggtatgtcaacccgcaggggcacgcatggtggcatgtgcttatgggcctcaactcatactatgcaaacacattcctaatgttctgtcgggctcagcagcgcgggtgggaggcgcgaatcacctaccttcttggatttttgccttatgtcaaggtccagaaaccagagaagaagagggaatgatttgtctctgcttaacactgatgctactcagtccaccgccagtaagctaatgtctatcccccaccccatcccccacccaatgtgcgcagacaagttgtggcatttttgtatatgggcatccaaatgattacggactataaatgttctgatgtcacactggatttcggtaacttttgactggcacctgttttgtaccatacttaatcatcgaacggagattagttggagtggttggttggtgtcctagttttggccatctttcttttggtttctttgcaattgccttttggtggtaataggacagggttatttgtttattcgtttgtcgttgaatggagtccagttgtactagttatcatcactccgcatggggatacatccttccatatgatgaccgttaattcattgacttgtgttggtgccaatggacaactctcccgagttgagct

SEQ ID NO: 214342 - DNA, 1620 bp, Zea Mays
attcgttccacgagacccacacgtttctttaccctagttttttttttcactgagcgaaggcacacagccgcagccccatcttcatcttcctcgcagcgccggcgttccatcttccgctcctcccttattcgcgctcggcacgcaggcggcggcggcggcactcaggctcgggatctcagcgacggcgctcaggctcgggatctcagcgacggcgcccaggctcgggatctcagcgacggcgtcagcggcttcccttcagcctcgcgccctcgccttcgatcctccgcacaccggccggttatttctctgagggcactcatgatttagcacaagtcatactgatctctaactctggtgacataagctgttgttagggtagcaaatcaagagataaaaatggcagattcaatggtagcgagcttctgggggcctgttacatcaacaactgagttgtgcgaggagaattatgcacactcatcatatatagcagaattctacaacacaatttctaatgtcccatgtgttcttttggcgcttattggattagtgaatgctttccgccaaggttttgagaagcgattcagtgtcctgcacatatccaatatgatacttgctattgggagtatgatttttcatgccaccttgcaacttcctacaacagagtgacgagactccaatggtctgggagatccttctttatatgtatgtcctttattcgccggactggcattacaggagcacaatgccaaccttccttttcctatatggtgctgcctttgctgtagttcatttctttgcccggttccaattcgtattcaagctgcattacattggcctctgcttcctctgcatcccccggatgtacaagtactacatacagaccaaagacgtggctgcgaagcggctcgcaaagctgtgggttctcacgttaacccttgggactctctgctggctagttgatcgcatcttctgcaagaagctttcgcattggtatgtcaacccgcaggggcacgcatggtggcatgtgcttatgggcctcaactcatactatgcaaacacattcctaatgttctgtcgggctcagcagcgcgggtgggaggcgcgaatcacctaccttcttggatttttgccttatgtcaaggtccagaaaccagagaagaagagggaatgatttgtctctgcttaacactgatgctactcagtccaccgccagtaagctaatgtctatcccccaccccatcccccacccaatgtgcgcagacaagttgtggcatttttgtatatgggcatccaaatgattacggactataaatgttctgatgtcacactggatttcggtaacttttgactggcacctgttttgtaccatacttaatcatcgaacggagattagttggagtggttggttggtgtcctagttttggccatctttcttttggtttctttgcaattgccttttggtggtaataggacagggttatttgtttattcgtttgtcgttgaatggagtccagttgtactagttatcatcactccgcatggggatacatccttccatatgatgaccgttaattcattgacttgtgttggtgccaatggacaactctcccgagttgagct

SEQ ID NO: 214343 - DNA, 3606 bp, Zea Mays
cagtctccaagggcgcgaagccgcgcgcgtgcctgcctggcgctggcggacaccctcccgttcaccacttcccattccactccaacctcctcctcgggagagatccgctccctgcctcccctgcggcctcctctttctccgcgcaaactcgccgtggcagagtaatctcgcgccggcccctcgctcatatcggggggaaagaaaggttcttgggatgcccggggccggtgtgaagccgccggcgccgccagtcgaggccgcgacggggctaccgccgcgcaggttgacaccttcgagagtctccgccaagcggtcctggccgcccgggtgcggtcggttccctgcgcctctgcccgcgccggcctctccggccgcggcaggtcctgaggtgaatggcgttgatggcgccttcaccatcgtcggcggcagggccgacgacgaggccgcccccgctgtcatttcgccttcggctcagaacggatgcccggataaggtggaggaggccgtcgccgccgccacagtttcgcctctgcccgagaacggcgccccgcctcggccgcaggggtcggataaggtggaggaggccgccgccacagtttcgcctctgcctgagaacggcgccccgcctcggcagcagggttcggataaggtggaggaggccgtcgccgccgccacagtttcgcctctgcctcagaatggcgccccgcctcggcagcaggggtcggataaggtggaagaggtggctgatcctgccgccgtttcacctgtggctcagagttgcggcctgcctcaccaagaggatgataaggtggacgatctctcagctgttttgcctgcagcgcgcagcagcgccctcccacatgccctgcctcagtcagggccggagagggctaggcaggatggagacggtggggagaacggagaggtgcaattggtgggcggtgcagtcaagctgtcatcggatggtcagcaaggggacagggtggtgcaggtggcagggccaacgttagaagtactggggagctgtaccactgttggtgctagttctatgcagaacggtggcgagggggatggcttgttggtggcagcagagaagggctgtggtggcagcagcgatatggggcaggaggttgctgctaatgatttcacagagattgaaaacaaaacaggcactggtgagttacagggaaaggaaaatggaattgcaggaagcagaacaaaacggtggtcgtcggaatcgtctctgaatccgctgcctaagaggagggcagtctcagccgtacgcaaatttccacctggctgtgggaggactattgttaccaccgcagacagtggtgttttggaggtctcacctatacgctcatttgctcctagttttgggatgtctgctgttaataccacaggcagtggagatagggagtggttgccttcagaagccacccctgtcaacaatggtgatgccttggtggcaattccggttttagttttaggagaatcggcttttccaacttcagcaatagaggcatccaataagaaagtggaaagcaagaaaatagtggatgaaggacatagcaaggctcacaatagggtccaagttcgagatgattttgccggtaccaaacaagacggtgaccagcgaaatgttgtttcaaaagctacacagaggaatgtttctgatgagaagatgaatgggaaattctcggcacataaaggggagcaggtagcacaagaaatggtggatcataagatgaaaaatgaacttgaaagtagcttgcaaagaagtaatcttaggacacctttgagcaatcccattgatgtaaaggtaaagaggttggatagtggcaagatgaatgctggattgcttggtaatgcaaggtcctctgcaggtgggaagatgcaaagtaagactctgagtgctaaaaaggaagtgtcctcaaatatgaacacaaagcaaaataagtttgctcataagttgaagagtgatgacacaagcaagggtaatttgcatttgtccgctagggagtccaagcttggaacacatgttgcaatcaatcaaattgaagagcctaaccaaataattgtacaagcattgatggctcctgataattgcccttggacacgaggaagaaagtcatttgctagtgcttccaagtctcttgttcctaggaacaagcttaagggaaaggatggtagtgcttccaagtctcttgttcgtatgaacaagataaaggaaaaggacaccactcgaaaagatatactagcaagaaaagtgacctctaatgaatcgatcaatgatgagacaatggatgataatgagacacgaggaagagaacctattgatagtacttccaagtggcttgttcctgtgaacaagctagatgctactccaaatgatataccagtagggaaagtggtatcttgtgactcgagcaatgatgaggcaatggatgacaatgatggcattatcttggaagatgatgacaactctagggcgctagttgtgtatggacaaaaacaagaaatgtgtctcacggttcttccggttgttccttccgggtcacaccacaagcaatctcgggaccatgatatagatgctcgaagcaaagttaggaagttgctccagttattccaggcgacataccgaaagcttacacaagttgaggaacaaggtaaacgcaaagttggaaggattgacattgaagcagctaaggcactaaagaacgaccctatttataaaaagcttggggctgttgtgggaaattttcccggtgtcgaagttggcgatgaatttcattttagagttgagctgtccataattggtctccatggcccacttcaagcaggtattgccacttctaaggtgaatggtatcaatgttgctataagtatcgttgcctctggtggctatcctgatgaattatcaagctcagatgaactaatatacactggttccggagggaaggctggtgggaataaagaaggagatgatcaaaagcttgagcggggtaatcttgccttgaagaattgcattgaaaccaagaccccggttcgtgtgattcatgggttcaaaggccaaaatagaagtgaaattggtcattctaaaggcaagcaaacttcaatatttatatatgatggattgtacgaagtgttggaatgttggcaagaaggcccaaaaggcgagagggtcttcaagtacaagttacagaggatcgcagggcaacctgaattagccctacatgcagttaaggcaacgaggaagtccaaagttcgtgaaggtctttgtttgcctgatatatctcaaggaagggagcggatacccatatgtgtcatcaacacaattgatgacatgaagccagcaccatttaaatacattaccgaagtcatatatccagattggtatgaaaaagaaccaccaaaaggttgcaactgtacaaacggctgctcggactctattacatgtgcttgtgcagtgaaaaatggaggggaaatcatgttcaatttcaacggtgcgatcgtcgaggccaggcctctcatatatgagtgtggtccatcatgcaggtccagatgatagcgacacattatgaaacattaagaacaacagcaggt

SEQ ID NO: 214344 - DNA, 4302 bp, Zea Mays
ctcctcctcctcctcctttggttgcgctatcaggttcttgggatgcccggggccggtgtgaagccgccggcgccgccagtcgaggccgcgacggggctaccgccgcgcaggttgacaccttcgagagtctccgccaagcggtcctggccgcccgggtgcggtcggttccctgcgcctctgcccgcgccggcctctccggccgcggcaggtcctgaggtgaatggcgttgatggcgccttcaccatcgtcggcggcagggccgacgacgaggccgcccccgctgtcatttcgccttcggctcagaacggatgcccggataaggtggaggaggccgtcgccgccgccacagtttcgcctctgcccgagaacggcgccccgcctcggccgcaggggtcggataaggtggaggaggccgccgccacagtttcgcctctgcctgagaacggcgccccgcctcggcagcagggttcggataaggtggaggaggccgtcgccgccgccacagtttcgcctctgcctcagaatggcgccccgcctcggcagcaggggtcggataaggtggaagaggtggctgatcctgccgccgtttcacctgtggctcagagttgcggcctgcctcaccaagaggatgataaggtggacgatctctcagctgttttgcctgcagcgcgcagcagcgccctcccacatgccctgcctcagtcagggccggagagggctaggcaggatggagacggtggggagaacggagaggtgcaattggtgggcggtgcagtcaagctgtcatcggatggtcagcaaggggacagggtggtgcaggtggcagggccaacgttagaagtactggggagctgtaccactgttggtgctagttctatgcagaacggtggcgagggggatggcttgttggtggcagcagagaagggctgtggtggcagcagcgatatggggcaggaggttgctgctaatgatttcacagagattgaaaacaaaacaggcactggtgagttacagggaaaggaaaatggaattgcaggaagcagaacaaaacggtggtcgtcggaatcgtctctgaatccgctgcctaagaggagggcagtctcagccgtacgcaaatttccacctggctgtgggaggactattgttaccaccgcagacagtggtgttttggaggtctcacctatacgctcatttgctcctagttttgggatgtctgctgttaataccacaggcagtggagatagggagtggttgccttcagaagccacccctgtcaacaatggtgatgccttggtggcaattccggttttagttttaggagaatcggcttttccaacttcagcaatagaggcatccaataagaaagtggaaagcaagaaaatagtggatgaaggacatagcaaggctcacaatagggtccaagttcgagatgattttgccggtaccaaacaagacggtgaccagcgaaatgttgtttcaaaagctacacagaggaatgtttctgatgagaagatgaatgggaaattctcggcacataaaggggagcaggtagcacaagaaatggtggatcataagatgaaaaatgaacttgaaagtagcttgcaaagaagtaatcttaggacacctttgagcaatcccattgatgtaaaggtaaagaggttggatagtggcaagatgaatgctggattgcttggtaatgcaaggtcctctgcaggtgggaagatgcaaagtaagactctgagtgctaaaaaggaagtgtcctcaaatatgaacacaaagcaaaataagtttgctcataagttgaagagtgatgacacaagcaagggtaatttgcatttgtccgctagggagtccaagcttggaacacatgttgcaatcaatcaaattgaagagcctaaccaaataattgtacaagcattgatggctcctgataattgcccttggacacgaggaagaaagtcatttgctagtgcttccaagtctcttgttcctaggaacaagcttaagggaaaggatggtagtgcttccaagtctcttgttcgtatgaacaagataaaggaaaaggacaccactcgaaaagatatactagcaagaaaagtgacctctaatgaatcgatcaatgatgagacaatggatgataatgagacacgaggaagagaacctattgatagtacttccaagtggcttgttcctgtgaacaagctagatgctactccaaatgatataccagtagggaaagtggtatcttgtgactcgagcaatgatgaggcaatggatgacaatgatggcattatcttggaagatgatgacaactctagggcgctagttgtgtatggacaaaaacaagaaatgtgtctcacggttcttccggttgttccttccgggtcacaccacaagcaatctcgggaccatgatatagatgctcgaagcaaagttaggaagttgctccagttattccaggcgacataccgaaagcttacacaagttgaggaacaaggtaaacgcaaagttggaaggattgacattgaagcagctaaggcactaaagaacgaccctatttataaaaagcttggggctgttgtgggaaattttcccggtgtcgaagttggcgatgaatttcattttagagttgagctgtccataattggtctccatggcccacttcaagcaggtattgccacttctaaggtgaatggtatcaatgttgctataagtatcgttgcctctggtggctatcctgatgaattatcaagctcagatgaactaatatacactggttccggagggaaggctggtgggaataaagaaggagatgatcaaaagcttgagcggggtaatcttgccttgaagaattgcattgaaaccaagaccccggttcgtgtgattcatgggttcaaaggccaaaatagaagtgaaattggtcattctaaaggcaagcaaacttcaatatttatatatgatggattgtacgaagtgttggaatgttggcaagaaggcccaaaaggcgagagggtcttcaagtacaagttacagaggatcgcagggcaacctgaattagccctacatgcagttaaggcaacgaggaagtccaaagttcgtgaaggtctttgtttgcctgatatatctcaaggaagggagcggatacccatatgtgtcatcaacacaattgatgacatgaagccagcaccatttaaatacattaccgaagtcatatatccagattggtatgaaaaagaaccaccaaaaggttgcaactgtacaaacggctgctcggactctattacatgtgcttgtgcagtgaaaaatggaggggaaatcatgttcaatttcaacggtgcgatcgtcgaggccaggcctctcatatatgagtgtggtccatcatgcaggtgcccgccaacatgccacaacagggtgagtcagcatggtgtcaaaattccactagaaatattcaagacaggcaagacaggttggggtgtaagatccctcagttctatatcatcaggcagtttcatatgtgagtataccggtgagctattggaagatgaagaagctgaaaagagagagaatgatgagtatctatttgatattggtcataactaccatgataaagaactttgggaggggctgaagtcagtggttggtctaggatctgctacctcatcttctgagaccatggaaggcttcacaatagatgcatctgagtgtggcaatgtgggaagatttatcaaccatagttgttcaccaaacctctatgcccaaaatgttctctgggaccatgatgatatgaggatgccacatgttatgttttttgctgttgagaatatcccgccactacaggagctgacctaccactataactataagataggggaggtctacataaatggcgaggagaaggttaaacattgctactgtggcgcctcggattgctgtggaaggctctactgaaacattattgactgttgttagctctatgttttgaacacctctgtcctgtctctgcggtacccttctattctcagttcgccttgtcttgtcggcgttctgatgtttacagcaagctgcatttgatcttgctgttttcatttagaaaaaaaaaaacattctgcttcgctctactgtgttttgaattgtgaatgaattttgaatggaaccccgttgtaccatgtgttcatgtggcaaaaatggacgatgatcgtgtcagcatgctggggcgttaattttttttccacagagctgactggtggcattgtaaattggacaatgttattatataattaaaatcttaaaatctggtttaat

SEQ ID NO: 214345 - DNA, 1914 bp, Zea Mays
ttctttagtgcctctccagcttcagcttcacgtgaagctgacccaaacgccttgttgaaaaacaactcctccttgggaccagtcacctttgggagctggttttgacctggccggccggtggcacgctccccgtacgagcacgcaactacgcaaggccaccccgccggtctctccttccgccgccagatcctccgctccttcgcccacagccgccgcggccgcggccctcctccctggttgttgcactgtagtactggagtggaggtccggtcccacgtttgggcgtggactcgacaagcgccaaaccgagcacccccaaatcctgattctgctcaacactgcgcctgaaatattttctccggtggggctgcaaaggcaaattaggagcgcttccaagttccaatccccgtttgcttgtacagggtataattaaagaggcaacggagtcatgacccttttgagggagtattagtaaccgcatgatcttttcgagggaggcacgatggaaggaaataacctaccctctggaagcttgatgcaaggaacaccttacagtaatgtggacttgcagcatcataaacatatgcaaatgcctgcaccaagctctggaaaccaggctttcaaccactctcaggtgcctggcaatttccccatttgtctgaaccaggttacagattccgaccagctacctgaattccaatttggagagcacggcaaggtcaatcaccaccatcatcctcaccatcacaagcagcatgcaacgaatagcatgagcgatgatgaggagcatggtgtgcatgaggatgccactgatagccagatcggcaagggaaagaagggttccacatggcatcggatgaagtggactgattcgatggttaggcttttgattactgcagcatcctacactggggaagacccaggagctgatttaggaggtggtaggagaagctgtgcaatgatgcagaagaaaggcaagtggaaggccatatcaaaagtcatgggcgagcgaggctgcctcgtgtcgccgcagcagtgtgaggataagttcaatgacctaaataagaggtataaaaggcttacagatatccttggtcggggtactacttgcagagttgtggcgaacccggaacttctggatggcatggctaatctctcagataagatgaaagatgccgcgaggaagatattgagctctaagcacttgttctatgaagagatgtgctcctaccacaacaataattggttcagtttacctgaagatcctgcacttcagcgatcgttgcagcttgctcttaagtgtaaggatgagcatgatgcaaggaagcgagcaagtggagatgctgatgaagatgatcaaagtgcagacactgattatgaagaagagaatgatgatgagcatcccatcacgcatgccaataaggggaccctactcacgcgtaaaagattgcggtacatgccggcggatatggaggatgtaggtttcggcaactcttccagctcacatgactgtagctggagatctgatccccatagcattgcagtggacatcaacaaagcttctccagatggaactaacttggcttcggttcaaaaagacttggctacacagtctgcggagattgagaaacagcgtatggaaattgaagttgaggcattggagcttgcaaaacaacgtctcaagtgggaggcatttagtaagaagaaggacagagagctagagaagatgaggttggaaaatgaacaaatgaagattgagaataaacgtttggagctagaggtaagatataaggagttggagcttgaacacaaaccacaaggccatggcagtcatgcaacatgataatatctttaaaatcgcgaagactgaaatgcaagatagagctggggattcataattattctcgccaatca

SEQ ID NO: 214346 - DNA, 2003 bp, Zea Mays
taacaagagagtagttatttttggagtggtccagatgtaacagcagaggaaacctggggtgtaaactacaggtcgttgaatgatctgtttgaaatttctcaaacaagagcagattccattacatatgatgttaaagttcagatgattgaaatatacaatgagcaagtgagggatttattaatgactgatggtgcaaacaaaagattagagatacgcaataattctcatgtaaatggactcaacatcccagatgccaatattgtgccagtcaagtgcgcacaagatgttttggatctgatgaaagttggccagagaaaccgagcagttggatcaactgctcttaatgaacgaagtagccgctcacacagtgtgttgacagttcatgtacaaggaaaggaggtaatttcaggctcaactctaagagggtgtcttcatctagtggatctcgcgggaagtgagagggtagacaaatctgaagcgactggagaaagactaactgaagccaagcacataaacaaatctctgtcagcacttggtgatgttatatctgcacttgcccaaaagagttcccatgttccatatagaaatagcaagttaacacaagtgctgcaggatgccttaggtggtcaagcaaaaacattgatgtttgtgcatgtgaaccctgaaacagactcttttagtgaaacaatgagcactctcaaattcgctgagcgtgtagctacaatagaacttggtgccgcccgtgcaaacaaggaagcaggccaggtcaaagacctaaaggaagagatcgccaagcttaaattggcattagatgaaaaggaaaatgaagtggcacagtttaaagatcttgctaaccgtgtgacttctgagatgagaaatgcaagaacaagatcacctttaaccgccagcatgtccttgaaacctgaagtcagtcaagaatccagtgtagacacctgtacaagtgagataagaagttcatcatctggcaagcaaagaaggttccgttcaccgttgtcagtgagagagctagacgataagtcacctgtcatcagcagggaactgtacctgagtgcgcgaaagtacaagactccctctcctccggttagaagctcactctctgtcgagagaggcagctttgccaaaatcgtggagaacactggaagcatcgactgcacaccgatatccaaggtcgaagtgcctccaaaagtgtggtccagcaactcgaagaccacaccttcatctgtcctgacagctcagagcctacggaaattccgggactccgaggagaacagaaccaaaattccgcccgctgtccggcagagcatggcgaagaacaggtctgagagtacgccaaagactcacaatgaagagaaaccggcgaacaggcaccactcgggtaccaaagcgaggtcagaggccaggaacacgagggactcgtccgaaatcgagaacgagtttgcgggcgatgaacctactttccacttcaaccgaactgcgaagaagttaccgacaaaggtgatgtcaagacagtcccagaacatagatgtcagtgtcagggcctctgtccggggggagatggagcctctgaccgaaggaaggcaacgccggaactggagcaagccgccgcacgccgagaggaccaatatgccgttgccggacatccggcgcagtgtctccctgccgcgcgggaagaaccctcttgtgtgaatctagctcgtttcgccaaccaggcattctttcattggttgtttgtttctttatcctgcggttcgatccgaatgtaggctctacggctgtgtagaacacttcatccggatgcataacacaaagtctgtcgagttgcttccaccaggctcccatgaaaacgcaaagttcacgctcttatacgcgatgtaaaaatgtatgggttaatgttgcactgcaggctgcagcatctcgttccagtggtgattccgtaccaattttgttcttatattattatatagaccaacaaatatattatt

SEQ ID NO: 214347 - DNA, 4450 bp, Zea Mays
cgcaaccgtcaccaccaccaaacccctccgcattctctcgtgcacgcagcacgcgtccctaaacctccctctcccttccgctttttgtaatcctcgtcgccatgacccgcgccgccgccgaagccgccggggaggtggtggtggaggaggatctgccgccatcctgcgacccgcagacacaggcgagatggtaccagctggaggcgctggagcgcgcgctggccgggaacacgcttgtgttcctcgagacgggcgccggcaagacgctcattgcggtgttgcttctccgccgcttcgcacaccgcatccgctcctccccgccgccctccttcgccgtcttcctcgtccccaccgtcgtgctcgtgaaccagcaggcgggcgtcatcaaggagcacacggacctccgcgtcgcccagttctacggcgacatgggcgtcgacttctggaacgcggacacctggcgcggcaggatcgacggggccgaggtgctcgtcatgacgccacaaatccttcttgataacctccgccacagcatcttcaggctgcgggacatcccgctcctcatcttcgacgagtgccaccgcgccaccgggaattccccgtacgcctgcattcttaaggagttttatcatccgcaactgaattctaggccatcagattccattccaactatatttgggatgaccgcttctttaattgcaagaaatttggcgcttgacaaatattcagaagaaatatctgagtttgagaatctcatgaatgcgaaggtgtacactgttgccagtgaatcagcactattgcaatacattccaattgcgactacaaagatagttgagtacgatgattatatcgtaacgtctgagttatatagtcatactatccgttgcttgaacaaattggaaacaaagcatttagaaatcctgaaggggaaactgcatggttcacctttggaaaattcagagaaaagaataaaaaaattaaatgcaatgttcttatattgcatatctgatcttggagtatggctggcagcaaaggctgctgagattctacaatcaaataaggaaagctgtgtgtccttttggggcgaagaattggatgaaaaacttgaaggatttgttagaaactatgtcagagatgtatatagtgatctttcagaaattatattgaagatgacaaagaggggcgtacaacgacatattggtgaggacttcgctgaggatctgcaagatgggttattaacatccaaagtttattttcttatcaaatctcttatggggtataggcatatgcaagatttgagatgcattgtttttgtcgaaagagttattacaagcattgtgttggaggcccttctgtcaactattaatcaaatgtctggatggagtgttagatacatggcatcagggcgtaattgtggtttgcaacatcagagtaggaataagcatgtggaaatcgttgattcatttcggagtggaaaggtgcatctgattattgccacacaaattttggaggagggactagatgtgccaagttgtaacttgataatccgttttgatcaggcagcaactgtacgcagctttatacagtcacgtggtcgagctaggatgcaacattctgactatgttttactagttagaaggggagatgtcaatgctctttctaagacacagaagtttctgaaaagtggacaaatcatgcgggaagaatctcagagattggaatctacttgttgtcagcctcttctaaacacactatgcaatgaagaattttatggtgttgaatctactggagcaattgtgactttgaactctagtattcaattgattaactttttctgctcaaagctaccatcggatgagtattttaaacctctaccaagattcaaaattgacaaggcattaggtacatgtacgctgcatcttccaatgagcagtcctgtacaaacaatttatgctgaaggaaaagtttctataatcaagaaggttgtttgtctcaaggcctgccgggaattacatgctgttggcgctctcacagattatctcttgcccgaatcgagtgttccatgtgaagatgaacctgatattgttgtggacaaatacaaaaatgggcaacctgactactttccagagcaattagtggataattggtcgtccttttctcgtcgtggcttttattattgctacatggtatcactggaaggttgttctaaaactactccagctgagatagtattagctgtaaagtgcgacatgggatctgacttcatctcgaactcattcaaattgtggggtgtgcaagattatttgagttttaccatgagatatgttggcatcattcatctaaatcaggaacagcatctcctggagctgtgtatctacttctgccagtagtttctggaaaaattgattggcgtagcatcaaattctcagcctcggaaatgcctgaagctactaacatggatatgcgacactgctatccttgtaaagatactggtatagtgcagacaaaagatggcactttctgctcgtgcatgcttcgaaattctattgtctgtacaccacataatggcatgttttatgctgtttgtggctttcttgacttgaatgctaattcgcttctacatagaagtgatggcagtttccttagctacaaaacctattttaaggaaaggtacaaccttgatttaagatgtgaagatcaagctctcttggaagctcgtaaacttgtggaagtgcggaactttctccacaagtgtaactataaaaaagaaaaagaaagaagtggtaagagtgtggttgaattgccacccgaactgtgcatagttgtcatgtcaccaatgtccgcaattactttgcgcagcttcacatttattccttctataatgtatcggatccagtgtatgctcctttctatgaatttgaaaatgcaattgggtccaagcatgcagcagtttgatattccagcactaaagattctggaagcacttacaacaaagaattgccaagaggaattttcgcaggaatcattagagacacttggggactcttttctcaagtatattacaacccaacacttttttgtcaaatacaaacatcagcatgaaggcatgctaaccaagatgaagaaaaacgtgatctcgaatgcagctttatgtcagctggcttgcagtaacaatcttgtgggatacattcgaagcgaagctttcaatcctaaaacatggatcgttccaggggttggctatgacatatgtgataggagtctgaggaagctgaaaagtaagagaattgcggattcagttgaggccttaatcggggcgtatctcagtactgctggtgagcaggcagcatatattttcttaaaatctttaggaatggatatagagtttcacaaaatgccaattgagagggtaatcacaatcaaagcagaagagttcattaatgttaaaagtttggagctattgcttgactatagtttcaatgatccttcattgttgatggaagcactgacacatggttcatatcagattgctggcactactccatgttatcagatctgagatctgcttctgtgaacaatagctgctatgctcatgcagcagtaaaagcaggattacataagcatgttcttcactcgtcatcagcactgcacaaaaggatggccgactacctggacaagtttgagcagtcattttcaggtccatcacatggttgggaagcaggcatcagtctgcccaaggttctaggtgatgtggttgaatctatcgctggtgcaatttacatcgacgccaagcatgacaaaggggtcgtttggagaagcatgaaacggatactggaacctcttgtgacacccgacacccttcagaatgaccctgtgaaagagctccaggaattctgtgatagcaaaggttacactttggagtacacggtaactcgtgacaacggtgtatcctcggtggtcgcagaagtgcggaccgaagggactacgtacaaggccactcggacaggcttctctaagcttgacgccaaaaagttggcagccagttccgtgctccgtgatttgaaggctgcggacacaaagcagtactctgcaaatggtatcagttgcacttaaacttcatagctctatggtatatacttttgtacaaaatcgtcgaatcagtaaggtgtgcaggtgcctaggcacgctaccctacttttactgcatctacgtctacggccacactaaagcagtacgtgcaacaatgttttgttttggtcatgtctcttgagagtgaaagtgtagcgttatttttattttgattcgcatttttgggataggcctggtggtgcaccagggcaccaagcgagtatgtggtccgtagggtttttagattactcttgtttcgagatgattggattaaattcttgtagagctgattggatggttcaatatcttggtttttagaatggtc

SEQ ID NO: 214348 - DNA, 4582 bp, Zea Mays
aggagagcggcagcgcaaccgtcaccaccaccaaacccctccgcattctctcgtgcacgcagcacgcgtccctaaacctccctctcccttccgctttttgtaatcctcgtcgccatgacccgcgccgccgccgaagccgccggggaggtggtggtggaggaggatctgccgccatcctgcgacccgcagacacaggcgagatggtaccagctggaggcgctggagcgcgcgctggccgggaacacgcttgtgttcctcgagacgggcgccggcaagacgctcattgcggtgttgcttctccgccgcttcgcacaccgcatccgctcctccccgccgccctccttcgccgtcttcctcgtccccaccgtcgtgctcgtgaaccagcaggcgggcgtcatcaaggagcacacggacctccgcgtcgcccagttctacggcgacatgggcgtcgacttctggaacgcggacacctggcgcggcaggatcgacggggccgaggtgctcgtcatgacgccacaaatccttcttgataacctccgccacagcatcttcaggctgcgggacatcccgctcctcatcttcgacgagtgccaccgcgccaccgggaattccccgtacgcctgcattcttaaggagttttatcatccgcaactgaattctaggccatcagattccattccaactatatttgggatgaccgcttctttaattgcaagaaatttggcgcttgacaaatattcagaagaaatatctgagtttgagaatctcatgaatgcgaaggtgtacactgttgccagtgaatcagcactattgcaatacattccaattgcgactacaaagatacatttagaaatcctgaaggggaaactgcatggttcacctttggaaaattcagagaaaagaataaaaaaattaaatgcaatgttcttatattgcatatctgatcttggagtatggctggcagcaaaggctgctgagattctacaatcaaataaggaaagctgtgtgtccttttggggcgaagaattggatgaaaaacttgaaggatttgttagaaactatgtcagagatgtatatagtgatctttcagaaattatattgaagatgacaaagaggggcgtacaacgacatattggtgaggacttcgctgaggatctgcaagatgggttattaacatccaaagtttattttcttatcaaatctcttatggggtataggcatatgcaagatttgagatgcattgtttttgtcgaaagagttattacaagcattgtgttggaggcccttctgtcaactattaatcaaatgtctggatggagtgttagatacatggcatcagggcgtaattgtggtttgcaacatcagagtaggaataagcatgtggaaatcgttgattcatttcggagtggaaaggtgcatctgattattgccacacaaattttggaggagggactagatgtgccaagttgtaacttgataatccgttttgatcaggcagcaactgtacgcagctttatacagtcacgtggtcgagctaggatgcaacattctgactatgttttactagttagaaggggagatgtcaatgctctttctaagacacagaagtttctgaaaagtggacaaatcatgcgggaagaatctcagagattggaatctacttgttgtcagcctcttctaaacacactatgcaatgaagaattttatggtgttgaatctactggagcaattgtgactttgaactctagtattcaattgattaactttttctgctcaaagctaccatcggatgagtattttaaacctctaccaagattcaaaattgacaaggcattaggtacatgtacgctgcatcttccaatgagcagtcctgtacaaacaatttatgctgaaggaaaagtttctataatcaagaaggttgtttgtctcaaggcctgccgggaattacatgctgttggcgctctcacagattatctcttgcccgaatcgagtgttccatgtgaagatgaacctgatattgttgtggacaaatacaaaaatgggcaacctgactactttccagagcaattagtggataattggtcgtccttttctcgtcgtggcttttattattgctacatggtatcactggaaggttgttctaaaactactccagctgagatagtattagctgtaaagtgcgacatgggatctgacttcatctcgaactcattcaaattgtggggtgtgcaagattatttgagttttaccatgagatatgttggcatcattcatctaaatcaggaacaggtaattgccgcgagaagattccagacaacaattctttctttgcttattagtaatgacctttcggaggtcagcaattatattaagaacttacttgaaatgccagcatctcctggagctgtgtatctacttctgccagtagtttctggaaaaattgattggcgtagcatcaaattctcagcctcggaaatgcctgaagctactaacatggatatgcgacactgctatccttgtaaagatactggtatagtgcagacaaaagatggcactttctgctcgtgcatgcttcgaaattctattgtctgtacaccacataatggcatgttttatgctgtttgtggctttcttgacttgaatgctaattcgcttctacatagaagtgatggcagtttccttagctacaaaacctattttaaggaaaggtacaaccttgatttaagatgtgaagatcaagctctcttggaagctcgtaaacttgtggaagtgcggaactttctccacaagtgtaactataaaaaagaaaaagaaagaagtggtaagagtgtggttgaattgccacccgaactgtgcatagttgtcatgtcaccaatgtccgcaattactttgcgcagcttcacatttattccttctataatgtatcggatccagtgtatgctcctttctatgaatttgaaaatgcaattgggtccaagcatgcagcagtttgatattccagcactaaagattctggaagcacttacaacaaagaattgccaagaggaattttcgcaggaatcattagagacacttggggactcttttctcaagtatattacaacccaacacttttttgtcaaatacaaacatcagcatgaaggcatgctaaccaagatgaagaaaaacgtgatctcgaatgcagctttatgtcagctggcttgcagtaacaatcttgtgggatacattcgaagcgaagctttcaatcctaaaacatggatcgttccaggggttggctatgacatatgtgataggagtctgaggaagctgaaaagtaagagaattgcggattcagttgaggccttaatcggggcgtatctcagtactgctggtgagcaggcagcatatattttcttaaaatctttaggaatggatatagagtttcacaaaatgccaattgagagggtaatcacaatcaaagcagaagagttcattaatgttaaaagtttggagctattgcttgactatagtttcaatgatccttcattgttgatggaagcactgacacatggttcatatcagattgctggcactactccatgttatcagcggctggagtttcttggggatgctgtattagatcatatttttactgattatttctaccatcagtaccctgaatgcactcctgaactgctgacagatctgagatctgcttctgtgaacaatagctgctatgctcatgcagcagtaaaagcaggattacataagcatgttcttcactcgtcatcagcactgcacaaaaggatggccgactacctggacaagtttgagcagtcattttcaggtccatcacatggttgggaagcaggcatcagtctgcccaaggttctaggtgatgtggttgaatctatcgctggtgcaatttacatcgacgccaagcatgacaaaggggtcgtttggagaagcatgaaacggatactggaacctcttgtgacacccgacacccttcagaatgaccctgtgaaagagctccaggaattctgtgatagcaaaggttacactttggagtacacggtaactcgtgacaacggtgtatcctcggtggtcgcagaagtgcggaccgaagggactacgtacaaggccactcggacaggcttctctaagcttgacgccaaaaagttggcagccagttccgtgctccgtgatttgaaggctgcggacacaaagcagtactctgcaaatggtatcagttgcacttaaacttcatagctctatggtatatacttttgtacaaaatcgtcgaatcagtaaggtgtgcaggtgcctaggcacgctaccctacttttactgcatctacgtctacggccacactaaagcagtacgtgcaacaatgttttgttttggtcatgtctcttgagagtgaaagtgtagcgttatttttattttgattcgcatttttgggataggcctggtggtgcaccagggcaccaagcgagtatgtggtccgtagggtttttagattactcttgtttcgagatgattggattaaattcttgtagagctgattggatggttcaatatcttggtttttagaatggtc

SEQ ID NO: 214349 - DNA, 4886 bp, Zea Mays
cggcgaacggcagaaagccaaggccacaaaattgctgcgaatctgggaaagcccaccaccgtccccgcgagagccaccgaggtagtcacgattcgaatcctctggcgtggatgggatcaggaaggaggacgcgaaacgaatcggatcccttccccttgccgagtcaaaaagcgtagcgaagcaagcgcaacgcaatcgtgtggcgattgcagggcgtgtgccgtggaggagagcggcagcgcaaccgtcaccaccaccaaacccctccgcattctctcgtgcacgcagcacgcgtccctaaacctccctctcccttccgctttttgtaatcctcgtcgccatgacccgcgccgccgccgaagccgccggggaggtggtggtggaggaggatctgccgccatcctgcgacccgcagacacaggcgagatggtaccagctggaggcgctggagcgcgcgctggccgggaacacgcttgtgttcctcgagacgggcgccggcaagacgctcattgcggtgttgcttctccgccgcttcgcacaccgcatccgctcctccccgccgccctccttcgccgtcttcctcgtccccaccgtcgtgctcgtgaaccagcaggcgggcgtcatcaaggagcacacggacctccgcgtcgcccagttctacggcgacatgggcgtcgacttctggaacgcggacacctggcgcggcaggatcgacggggccgaggtgctcgtcatgacgccacaaatccttcttgataacctccgccacagcatcttcaggctgcgggacatcccgctcctcatcttcgacgagtgccaccgcgccaccgggaattccccgtacgcctgcattcttaaggagttttatcatccgcaactgaattctaggccatcagattccattccaactatatttgggatgaccgcttctttaattgcaagaaatttggcgcttgacaaatattcagaagaaatatctgagtttgagaatctcatgaatgcgaaggtgtacactgttgccagtgaatcagcactattgcaatacattccaattgcgactacaaagatagttgagtacgatgattatatcgtaacgtctgagttatatagtcatactatccgttgcttgaacaaattggaaacaaagcatttagaaatcctgaaggggaaactgcatggttcacctttggaaaattcagagaaaagaataaaaaaattaaatgcaatgttcttatattgcatatctgatcttggagtatggctggcagcaaaggctgctgagattctacaatcaaataaggaaagctgtgtgtccttttggggcgaagaattggatgaaaaacttgaaggatttgttagaaactatgtcagagatgtatatagtgatctttcagaaattatattgaagatgacaaagaggggcgtacaacgacatattggtgaggacttcgctgaggatctgcaagatgggttattaacatccaaagtttattttcttatcaaatctcttatggggtataggcatatgcaagatttgagatgcattgtttttgtcgaaagagttattacaagcattgtgttggaggcccttctgtcaactattaatcaaatgtctggatggagtgttagatacatggcatcagggcgtaattgtggtttgcaacatcagagtaggaataagcatgtggaaatcgttgattcatttcggagtggaaaggtgcatctgattattgccacacaaattttggaggagggactagatgtgccaagttgtaacttgataatccgttttgatcaggcagcaactgtacgcagctttatacagtcacgtggtcgagctaggatgcaacattctgactatgttttactagttagaaggggagatgtcaatgctctttctaagacacagaagtttctgaaaagtggacaaatcatgcgggaagaatctcagagattggaatctacttgttgtcagcctcttctaaacacactatgcaatgaagaattttatggtgttgaatctactggagcaattgtgactttgaactctagtattcaattgattaactttttctgctcaaagctaccatcggatgagtattttaaacctctaccaagattcaaaattgacaaggcattaggtacatgtacgctgcatcttccaatgagcagtcctgtacaaacaatttatgctgaaggaaaagtttctataatcaagaaggttgtttgtctcaaggcctgccgggaattacatgctgttggcgctctcacagattatctcttgcccgaatcgagtgttccatgtgaagatgaacctgatattgttgtggacaaatacaaaaatgggcaacctgactactttccagagcaattagtggataattggtcgtccttttctcgtcgtggcttttattattgctacatggtatcactggaaggttgttctaaaactactccagctgagatagtattagctgtaaagtgcgacatgggatctgacttcatctcgaactcattcaaattgtggggtgtgcaagattatttgagttttaccatgagatatgttggcatcattcatctaaatcaggaacaggtaattgccgcgagaagattccagacaacaattctttctttgcttattagtaatgacctttcggaggtcagcaattatattaagaacttacttgaaatgccagcatctcctggagctgtgtatctacttctgccagtagtttctggaaaaattgattggcgtagcatcaaattctcagcctcggaaatgcctgaagctactaacatggatatgcgacactgctatccttgtaaagatactggtatagtgcagacaaaagatggcactttctgctcgtgcatgcttcgaaattctattgtctgtacaccacataatggcatgttttatgctgtttgtggctttcttgacttgaatgctaattcgcttctacatagaagtgatggcagtttccttagctacaaaacctattttaaggaaaggtacaaccttgatttaagatgtgaagatcaagctctcttggaagctcgtaaacttgtggaagtgcggaactttctccacaagtgtaactataaaaaagaaaaagaaagaagtggtaagagtgtggttgaattgccacccgaactgtgcatagttgtcatgtcaccaatgtccgcaattactttgcgcagcttcacatttattccttctataatgtatcggatccagtgtatgctcctttctatgaatttgaaaatgcaattgggtccaagcatgcagcagtttgatattccagcactaaagattctggaagcacttacaacaaagaattgccaagaggaattttcgcaggaatcattagagacacttggggactcttttctcaagtatattacaacccaacacttttttgtcaaatacaaacatcagcatgaaggcatgctaaccaagatgaagaaaaacgtgatctcgaatgcagctttatgtcagctggcttgcagtaacaatcttgtgggatacattcgaagcgaagctttcaatcctaaaacatggatcgttccaggggttggctatgacatatgtgataggagtctgaggaagctgaaaagtaagagaattgcggattcagttgaggccttaatcggggcgtatctcagtactgctggtgagcaggcagcatatattttcttaaaatctttaggaatggatatagagtttcacaaaatgccaattgagagggtaatcacaatcaaagcagaagagttcattaatgttaaaagtttggagctattgcttgactatagtttcaatgatccttcattgttgatggaagcactgacacatggttcatatcagattgctggcactactccatgttatcagcggctggagtttcttggggatgctgtattagatcatatttttactgattatttctaccatcagtaccctgaatgcactcctgaactgctgacagatctgagatctgcttctgtgaacaatagctgctatgctcatgcagcagtaaaagcaggattacataagcatgttcttcactcgtcatcagcactgcacaaaaggatggccgactacctggacaagtttgagcagtcattttcaggtccatcacatggttgggaagcaggcatcagtctgcccaaggttctaggtgatgtggttgaatctatcgctggtgcaatttacatcgacgccaagcatgacaaaggggtcgtttggagaagcatgaaacggatactggaacctcttgtgacacccgacacccttcagaatgaccctgtgaaagagctccaggaattctgtgatagcaaaggttacactttggagtacacggtaactcgtgacaacggtgtatcctcggtggtcgcagaagtgcggaccgaagggactacgtacaaggccactcggacaggcttctctaagcttgacgccaaaaagttggcagccagttccgtgctccgtgatttgaaggctgcggacacaaagcagtactctgcaaatggtatcagttgcacttaaacttcatagctctatggtatatacttttgtacaaaatcgtcgaatcagtaaggtgtgcaggtgcctaggcacgctaccctacttttactgcatctacgtctacggccacactaaagcagtacgtgcaacaatgttttgttttggtcatgtctcttgagagtgaaagtgtagcgttatttttattttgattcgcatttttgggataggcctggtggtgcaccagggcaccaagcgagtatgtggtccgtagggtttttagattactcttgtttcgagatgattggattaaattcttgtagagctgattggatggttcaatatcttggtttttagaatggtc

SEQ ID NO: 214350 - DNA, 4792 bp, Zea Mays
cggcgaacggcagaaagccaaggccacaaaattgctgcgaatctgggaaagcccaccaccgtccccgcgagagccaccgaggtagtcacgattcgaatcctctggcgtggatgggatcaggaaggaggacgcgaaacgaatcggatcccttccccttgccgagtcaaaaagcgtagcgaagcaagcgcaacgcaatcgtgtggcgattgcagggcgtgtgccgtggaggagagcggcagcgcaaccgtcaccaccaccaaacccctccgcattctctcgtgcacgcagcacgcgtccctaaacctccctctcccttccgctttttgtaatcctcgtcgccatgacccgcgccgccgccgaagccgccggggaggtggtggtggaggaggatctgccgccatcctgcgacccgcagacacaggcgagatggtaccagctggaggcgctggagcgcgcgctggccgggaacacgcttgtgttcctcgagacgggcgccggcaagacgctcattgcggtgttgcttctccgccgcttcgcacaccgcatccgctcctccccgccgccctccttcgccgtcttcctcgtccccaccgtcgtgctcgtgaaccagcaggcgggcgtcatcaaggagcacacggacctccgcgtcgcccagttctacggcgacatgggcgtcgacttctggaacgcggacacctggcgcggcaggatcgacggggccgaggtgctcgtcatgacgccacaaatccttcttgataacctccgccacagcatcttcaggctgcgggacatcccgctcctcatcttcgacgagtgccaccgcgccaccgggaattccccgtacgcctgcattcttaaggagttttatcatccgcaactgaattctaggccatcagattccattccaactatatttgggatgaccgcttctttaattgcaagaaatttggcgcttgacaaatattcagaagaaatatctgagtttgagaatctcatgaatgcgaaggtgtacactgttgccagtgaatcagcactattgcaatacattccaattgcgactacaaagatagttgagtacgatgattatatcgtaacgtctgagttatatagtcatactatccgttgcttgaacaaattggaaacaaagcatttagaaatcctgaaggggaaactgcatggttcacctttggaaaattcagagaaaagaataaaaaaattaaatgcaatgttcttatattgcatatctgatcttggagtatggctggcagcaaaggctgctgagattctacaatcaaataaggaaagctgtgtgtccttttggggcgaagaattggatgaaaaacttgaaggatttgttagaaactatgtcagagatgtatatagtgatctttcagaaattatattgaagatgacaaagaggggcgtacaacgacatattggtgaggacttcgctgaggatctgcaagatgggttattaacatccaaagtttattttcttatcaaatctcttatggggtataggcatatgcaagatttgagatgcattgtttttgtcgaaagagttattacaagcattgtgttggaggcccttctgtcaactattaatcaaatgtctggatggagtgttagatacatggcatcagggcgtaattgtggtttgcaacatcagagtaggaataagcatgtggaaatcgttgattcatttcggagtggaaaggtgcatctgattattgccacacaaattttggaggagggactagatgtgccaagttgtaacttgataatccgttttgatcaggcagcaactgtacgcagctttatacagtcacgtggtcgagctaggatgcaacattctgactatgttttactagttagaaggggagatgtcaatgctctttctaagacacagaagtttctgaaaagtggacaaatcatgcgggaagaatctcagagattggaatctacttgttgtcagcctcttctaaacacactatgcaatgaagaattttatggtgttgaatctactggagcaattgtgactttgaactctagtattcaattgattaactttttctgctcaaagctaccatcggatgagtattttaaacctctaccaagattcaaaattgacaaggcattaggtacatgtacgctgcatcttccaatgagcagtcctgtacaaacaatttatgctgaaggaaaagtttctataatcaagaaggttgtttgtctcaaggcctgccgggaattacatgctgttggcgctctcacagattatctcttgcccgaatcgagtgttccatgtgaagatgaacctgatattgttgtggacaaatacaaaaatgggcaacctgactactttccagagcaattagtggataattggtcgtccttttctcgtcgtggcttttattattgctacatggtatcactggaaggttgttctaaaactactccagctgagatagtattagctgtaaagtgcgacatgggatctgacttcatctcgaactcattcaaattgtggggtgtgcaagattatttgagttttaccatgagatatgttggcatcattcatctaaatcaggaacaggtaattgccgcgagaagattccagacaacaattctttctttgcttattagtaatgacctttcggaggtcagcaattatattaagaacttacttgaaatgccagcatctcctggagctgtgtatctacttctgccagtagtttctggaaaaattgattggcgtagcatcaaattctcagcctcggaaatgcctgaagctactaacatggatatgcgacactgctatccttgtaaagatactggtatagtgcagacaaaagatggcactttctgctcgtgcatgcttcgaaattctattgtctgtacaccacataatggcatgttttatgctgtttgtggctttcttgacttgaatgctaattcgcttctacatagaagtgatggcagtttccttagctacaaaacctattttaaggaaaggtacaaccttgatttaagatgtgaagatcaagctctcttggaagctcgtaaacttgtggaagtgcggaactttctccacaagtgtaactataaaaaagaaaaagaaagaagtggtaagagtgtggttgaattgccacccgaactgtgcatagttgtcatgtcaccaatgtccgcaattactttgcgcagcttcacatttattccttctataatgtatcggatccagtgtatgctcctttctatgaatttgaaaatgcaattgggtccaagcatgcagcagtttgatattccagcactaaagattctggaagcacttacaacaaagaattgccaagaggaattttcgcaggaatcattagagacacttggggactcttttctcaagtatattacaacccaacacttttttgtcaaatacaaacatcagcatgaaggcatgctaaccaagatgaagaaaaacgtgatctcgaatgcagctttatgtcagctggcttgcagtaacaatcttgtgggatacattcgaagcgaagctttcaatcctaaaacatggatcgttccaggggttggctatgacatatgtgataggagtctgaggaagctgaaaagtaagagaattgcggattcagttgaggccttaatcggggcgtatctcagtactgctggtgagcaggcagcatatattttcttaaaatctttaggaatggatatagagtttcacaaaatgccaattgagagggtaatcacaatcaaagcagaagagttcattaatgttaaaagtttggagctattgcttgactatagtttcaatgatccttcattgttgatggaagcactgacacatggttcatatcagattgctggcactactccatgttatcagatctgagatctgcttctgtgaacaatagctgctatgctcatgcagcagtaaaagcaggattacataagcatgttcttcactcgtcatcagcactgcacaaaaggatggccgactacctggacaagtttgagcagtcattttcaggtccatcacatggttgggaagcaggcatcagtctgcccaaggttctaggtgatgtggttgaatctatcgctggtgcaatttacatcgacgccaagcatgacaaaggggtcgtttggagaagcatgaaacggatactggaacctcttgtgacacccgacacccttcagaatgaccctgtgaaagagctccaggaattctgtgatagcaaaggttacactttggagtacacggtaactcgtgacaacggtgtatcctcggtggtcgcagaagtgcggaccgaagggactacgtacaaggccactcggacaggcttctctaagcttgacgccaaaaagttggcagccagttccgtgctccgtgatttgaaggctgcggacacaaagcagtactctgcaaatggtatcagttgcacttaaacttcatagctctatggtatatacttttgtacaaaatcgtcgaatcagtaaggtgtgcaggtgcctaggcacgctaccctacttttactgcatctacgtctacggccacactaaagcagtacgtgcaacaatgttttgttttggtcatgtctcttgagagtgaaagtgtagcgttatttttattttgattcgcatttttgggataggcctggtggtgcaccagggcaccaagcgagtatgtggtccgtagggtttttagattactcttgtttcgagatgattggattaaattcttgtagagctgattggatggttcaatatcttggtttttagaatggtc

SEQ ID NO: 214351 - DNA, 4815 bp, Zea Mays
cggcgaacggcagaaagccaaggccacaaaattgctgcgaatctgggaaagcccaccaccgtccccgcgagagccaccgaggtagtcacgattcgaatcctctggcgtggatgggatcaggaaggaggacgcgaaacgaatcggatcccttccccttgccgagtcaaaaagcgtagcgaagcaagcgcaacgcaatcgtgtggcgattgcagggcgtgtgccgtggaggagagcggcagcgcaaccgtcaccaccaccaaacccctccgcattctctcgtgcacgcagcacgcgtccctaaacctccctctcccttccgctttttgtaatcctcgtcgccatgacccgcgccgccgccgaagccgccggggaggtggtggtggaggaggatctgccgccatcctgcgacccgcagacacaggcgagatggtaccagctggaggcgctggagcgcgcgctggccgggaacacgcttgtgttcctcgagacgggcgccggcaagacgctcattgcggtgttgcttctccgccgcttcgcacaccgcatccgctcctccccgccgccctccttcgccgtcttcctcgtccccaccgtcgtgctcgtgaaccagcaggcgggcgtcatcaaggagcacacggacctccgcgtcgcccagttctacggcgacatgggcgtcgacttctggaacgcggacacctggcgcggcaggatcgacggggccgaggtgctcgtcatgacgccacaaatccttcttgataacctccgccacagcatcttcaggctgcgggacatcccgctcctcatcttcgacgagtgccaccgcgccaccgggaattccccgtacgcctgcattcttaaggagttttatcatccgcaactgaattctaggccatcagattccattccaactatatttgggatgaccgcttctttaattgcaagaaatttggcgcttgacaaatattcagaagaaatatctgagtttgagaatctcatgaatgcgaaggtgtacactgttgccagtgaatcagcactattgcaatacattccaattgcgactacaaagatagttgagtacgatgattatatcgtaacgtctgagttatatagtcatactatccgttgcttgaacaaattggaaacaaagcatttagaaatcctgaaggggaaactgcatggttcacctttggaaaattcagagaaaagaataaaaaaattaaatgcaatgttcttatattgcatatctgatcttggagtatggctggcagcaaaggctgctgagattctacaatcaaataaggaaagctgtgtgtccttttggggcgaagaattggatgaaaaacttgaaggatttgttagaaactatgtcagagatgtatatagtgatctttcagaaattatattgaagatgacaaagaggggcgtacaacgacatattggtgaggacttcgctgaggatctgcaagatgggttattaacatccaaagtttattttcttatcaaatctcttatggggtataggcatatgcaagatttgagatgcattgtttttgtcgaaagagttattacaagcattgtgttggaggcccttctgtcaactattaatcaaatgtctggatggagtgttagatacatggcatcagggcgtaattgtggtttgcaacatcagagtaggaataagcatgtggaaatcgttgattcatttcggagtggaaaggtgcatctgattattgccacacaaattttggaggagggactagatgtgccaagttgtaacttgataatccgttttgatcaggcagcaactgggagatgtcaatgctctttctaagacacagaagtttctgaaaagtggacaaatcatgcgggaagaatctcagagattggaatctacttgttgtcagcctcttctaaacacactatgcaatgaagaattttatggtgttgaatctactggagcaattgtgactttgaactctagtattcaattgattaactttttctgctcaaagctaccatcggatgagtattttaaacctctaccaagattcaaaattgacaaggcattaggtacatgtacgctgcatcttccaatgagcagtcctgtacaaacaatttatgctgaaggaaaagtttctataatcaagaaggttgtttgtctcaaggcctgccgggaattacatgctgttggcgctctcacagattatctcttgcccgaatcgagtgttccatgtgaagatgaacctgatattgttgtggacaaatacaaaaatgggcaacctgactactttccagagcaattagtggataattggtcgtccttttctcgtcgtggcttttattattgctacatggtatcactggaaggttgttctaaaactactccagctgagatagtattagctgtaaagtgcgacatgggatctgacttcatctcgaactcattcaaattgtggggtgtgcaagattatttgagttttaccatgagatatgttggcatcattcatctaaatcaggaacaggtaattgccgcgagaagattccagacaacaattctttctttgcttattagtaatgacctttcggaggtcagcaattatattaagaacttacttgaaatgccagcatctcctggagctgtgtatctacttctgccagtagtttctggaaaaattgattggcgtagcatcaaattctcagcctcggaaatgcctgaagctactaacatggatatgcgacactgctatccttgtaaagatactggtatagtgcagacaaaagatggcactttctgctcgtgcatgcttcgaaattctattgtctgtacaccacataatggcatgttttatgctgtttgtggctttcttgacttgaatgctaattcgcttctacatagaagtgatggcagtttccttagctacaaaacctattttaaggaaaggtacaaccttgatttaagatgtgaagatcaagctctcttggaagctcgtaaacttgtggaagtgcggaactttctccacaagtgtaactataaaaaagaaaaagaaagaagtggtaagagtgtggttgaattgccacccgaactgtgcatagttgtcatgtcaccaatgtccgcaattactttgcgcagcttcacatttattccttctataatgtatcggatccagtgtatgctcctttctatgaatttgaaaatgcaattgggtccaagcatgcagcagtttgatattccagcactaaagattctggaagcacttacaacaaagaattgccaagaggaattttcgcaggaatcattagagacacttggggactcttttctcaagtatattacaacccaacacttttttgtcaaatacaaacatcagcatgaaggcatgctaaccaagatgaagaaaaacgtgatctcgaatgcagctttatgtcagctggcttgcagtaacaatcttgtgggatacattcgaagcgaagctttcaatcctaaaacatggatcgttccaggggttggctatgacatatgtgataggagtctgaggaagctgaaaagtaagagaattgcggattcagttgaggccttaatcggggcgtatctcagtactgctggtgagcaggcagcatatattttcttaaaatctttaggaatggatatagagtttcacaaaatgccaattgagagggtaatcacaatcaaagcagaagagttcattaatgttaaaagtttggagctattgcttgactatagtttcaatgatccttcattgttgatggaagcactgacacatggttcatatcagattgctggcactactccatgttatcagcggctggagtttcttggggatgctgtattagatcatatttttactgattatttctaccatcagtaccctgaatgcactcctgaactgctgacagatctgagatctgcttctgtgaacaatagctgctatgctcatgcagcagtaaaagcaggattacataagcatgttcttcactcgtcatcagcactgcacaaaaggatggccgactacctggacaagtttgagcagtcattttcaggtccatcacatggttgggaagcaggcatcagtctgcccaaggttctaggtgatgtggttgaatctatcgctggtgcaatttacatcgacgccaagcatgacaaaggggtcgtttggagaagcatgaaacggatactggaacctcttgtgacacccgacacccttcagaatgaccctgtgaaagagctccaggaattctgtgatagcaaaggttacactttggagtacacggtaactcgtgacaacggtgtatcctcggtggtcgcagaagtgcggaccgaagggactacgtacaaggccactcggacaggcttctctaagcttgacgccaaaaagttggcagccagttccgtgctccgtgatttgaaggctgcggacacaaagcagtactctgcaaatggtatcagttgcacttaaacttcatagctctatggtatatacttttgtacaaaatcgtcgaatcagtaaggtgtgcaggtgcctaggcacgctaccctacttttactgcatctacgtctacggccacactaaagcagtacgtgcaacaatgttttgttttggtcatgtctcttgagagtgaaagtgtagcgttatttttattttgattcgcatttttgggataggcctggtggtgcaccagggcaccaagcgagtatgtggtccgtagggtttttagattactcttgtttcgagatgattggattaaattcttgtagagctgattggatggttcaatatcttggtttttagaatggtc

SEQ ID NO: 214352 - DNA, 2039 bp, Zea Mays
caggccccttcccaccgttctcttgacgactcctcgtctcctcgtcgtagtagttgcagccaccggtcttgagagctgccacctatttgccttgacgcggagaaaagtatacctggggggttggggcttgccgccgcaactatccccggcctcggctcgcctgcactgcacctctctccttggtttcttcccgttacccgtctcggcagatgcctctcttcctgcagcttcaacttcagggtgcctgtccacttagtcagtactgcagcggcgatatctgaaggtccgactaatgtgatgtcaatcacatgctgcttgcctgtcgtcgagtgcgtgtactgcctggcgtgtgcgcggtgggtgtggcagcgctgcctccactccggaggctacgacagtgagacctggggtgttgcatcggctgaagagtttgagcctgtgccgcgcttgtgtcggatcatcctctcggtctatgaggatgaccttgagaacccccaatgggcgcctccaggtggttatggcatggagccacgttgggtggtgcagcggagaatatatgaagacactcatggtcatgcaccaacataccttctgtatgttgatcaccagcattcagatgttgtgcttgctgttcgaggaatgaacatggcgaaggagagtgactatgctgtccttctggataacaagcttgggcaaaggaggtttgacggcggctacgtgcacaatggcttgcttaaggccgccgagtgggtttttgatgctgagtgtgatgttctgaaggaccttctggagaggaatcctggctatacactcacatttgctgggcattctcttggctctggtgtggtgtcaatgctagctttgctggcagtgcacaacagggagctgctcggtggcatagacaggaagaggatacgatgttttgcaatggcaccagcccgatgtatgtcactgaatttggctgtccgttatgcagatgtcatcaatgcagttattcttcaggatgattttttgcctcgcacagacattcctttggaagacatcttcaagtcactattctgggtacctgatgtagtcctctttgtacagcttaccatgccttctatgtggaagatgcctaatagacacatgtatacctgaaagtgtgatgttgagagatccaaggcgcctctatgcacctggtaggctttaccacattgttgaaagaaaacctttcagatgtggaagatacccccctattgtgagaacagcagttcctgtggatgggagatttgaacgcattgttctctcttgcaacgcaacatctgatcatgctattatatggatagaaagagaggcgcaaagggcattagatttattgctagagagtgagaaaaccatgcaagcacctgcggttgaaaggatgagcagtgagatcactgttacaagagatcacgacgaagagcagcaggaggctctgcggcgtgcgatcatgctaggggttgctgatgtaaacatgccatcaacatatggtacgttcaacgaaaatcctacttctgaaccagccgaggcctccccattactatcagacagcggaaggcgcagggcagtatgggaggagtggatcgcaaggatcttcgagaaggatgaatcagggcaaatggttccacggagatgatcgtggcgacagctcaaggcatgcttgcttgatgggtcggtttcttgatgctgcttccactctgtttcgagcctattttgaaacttcggaacggtaatgtaagatgagtaggggttagggattagatcatgtatttagggctagtttgacaaccctatttttctatgggatttttaatttcctaagggaaaacgaactaattttctataagaaaatgaaaaacccttggaaaattggggttaccaaaccagcccttagtgagtgagatggtgtatagcatgaataattttccctttggttgacaaaaaatgtgggtgcctattgtacttacacatcagtaatttcattgtataagaatataagatattgtagaatcttgggt

SEQ ID NO: 214353 - DNA, 2313 bp, Zea Mays
cttatccccaatccaaacaaacccttacttttggggcgctgagcatcccagatgtccccggtactgtcattcaagctacgcaaaattcatgcaatgtatttgttgtgtccaaacggagactaattatgaaactcgcaagatatcctcaaacgagtgagtctaacagaaacttgaggatcgagtccattagtcatgaaacatttgcactatcacacaggagtttactgtttgacaactttggtgacgatgaagcacaatcagattcattctcccagtcccacagctcacatagtgcttccaatgttgtttcaagttcagaaagttctgaacaagttgcttcaggaagttcaggagtaaattatgcagcaaccgaaggaagtaagaactacgattctcttagctcctggggggaagatccttgggttgcctcaaactccagcgaagagtgccaatctacggatgatgtgtccaaactaaggaaggagctgcaggaaaccttagtagtctatgataaagcttgtgcaaaccttgttagtgttaagaaaaagattcaggtactttctatcgagtgttctgaagaggctaggaaggtggagcacgcgctagagtgggaggaagctttgaagcagacggtgtctgatgagaaggcgaaacagctcgaggtcatcagtgaagtcgagcaagcaggaaaatcattcacccgagaggcttattcaaggtacaagacagaaatggctgccagcatgatctgtcaggataaggtgcagattgttgatgcgattttgacaaagagcagaagttgcaggcggtattcgaagagagatatagagcttgccactgacaacttctctgaagaaaggaagatcggtgagggtggttatggcaatgtgtacaggtgcaccctcgaccacactgaagtagctgtgaaggtcattcaggaaaactccattgacaaaactgatgagttcctgaaggaggttgagattcttagccagcttcgccatcccaacctggttttgttgcttggtttctgtcccgaaattggctgcctggtgtacgaatacctgaagaacgggagcctagaagaccagctcttcaacagcgaagggtgccaaccactgcactggttcctccggttccaggtcgtcttcgaggtgtcctgcggactcgcattcctgcacgcgagaagcccagagcctgtcgtccaccgcgacctgaaaccggccaacatcttgctggacaggaactacgtgggcaaggtcggcgacgtcggtttcgcgaagttcgtctctgatctcgtgcccgactggcagaccgagtacaaggacacgatcgtcgccggcacgctgtactacacggaccccgagtaccagcagaccggcaccgtgcgtcccaagtccgacgtgttcgcgctgggagtcgtcatcctgcagctcctgaccggcagacgcccggacgggctcgttgcgagcgcagagaacgctgtgagaaacggcaggctcgctgatatcctcgactggtctcaggctggttggccgcttgccgaggcagaggtgtttgccaggctcgggttgagatgcgcggccttgaggtgcagggacaggcctgaccttgagtcggaggtgctgccggagctcgacgagatcctgcacaggattacttttgctgtcagtttgagaagccccaaactgacgagcgtaccaagccacttcgtctgccctataacacaggagctgatggaggatcctcacgtcgccgcagacggccacacctacgagcattacgcgatcagagcttggctcaagcggcacaggacatcgcctgttacgaggagtaagctgcagaattcgtccgtaatcccgaaccactcattgcgcggcgcgatacagcagtggaagtcacagttaccggctcagacgaacgagtgaaacgggagtcagggtgccctctcttcttgattcaactgttaatggtggcgaaattattttggagagcacgcaaaaggcctttgcgtttcggtttttgtaagtggttcaaagctgtaaatgaaaaaggaggcagctgtaaattgaagcgcagaatcacgaaggtcgattttgtaactggagtgctaggttctgttgccatagtattggtcatcagttttggaacagagcaagcttaaaagttttttttttgctatttattactccccctctctgaatactgttctgcccaagcaccggcagtcggcagacaaagttttagtgtgtaaactaatatcacatactaacatatgtttttggcaaaaaagtatatgtgatgcaatacagt

SEQ ID NO: 214354 - DNA, 3048 bp, Zea Mays
ccttccctccccgagaccttcgaggggatgaatcgctagcgtcaggatcgtagaaatatagcctagaacatatactacacataggaggtcaaaatccaccaatccatatagtgctctgcgtgcattagaagcggcagaagcacaatgggcaggtacagcgacgggaaggacagcggcgagaccggcggcggcagctacccgctggtggcggtgtgcatcgacaaggacaagaacagccagaacgccctcaagtacgccaccgagacgctcgcccacaggggccagaccatcgtcctcgtgcacgtcaacaccaaaggcacctcgggcgagcaccatccttcatctccatgccgcggcgagcatcgtccatgtcagcttcgttcccgtgtgtttctgacgacggcgtgcgtgtgcatgtgcctgtgcctgtgcgtgcaggtggggtggcggacgccgccgggtacaagcagccgacggacccgcagatgaaggacctcttcctcccattccgctgcttctgcacgcgcaaagacatccactgcaaggacgtggtgctggacgaccacgacgtggccaagtccgtcgtcgagttcgccgcgcacggcgccgtagagaagctcgtcgtcggcgctagcgctaggggcggcttcgtcaggcggaaatctgcaacaccatctccaagtccgcgcccgacttctgcaccgtgtacgtcgtctccaagggcggcaaggtgacgtcggtgcggcaggccgtccggcaggcgccggcagtgtcgccgctccggaccatgatccatgggcccaagccggaaccagagccggtgcacgcgcagaaatggacgcctccgcctccgcctccagcggttcaagacaaccacatcatgtcgccgttcgcgaggacgacggggcacagcgccgggtcggcgcggaaggcgttcccggacttctcgctgccggagtcgtcggacatatcgttcatcgggtccgccccccgcaggagcacggagcggtacccgccgcggctgtccagcgggtcggacggcgtggaccagcagcagcagcacagcttcgaggcgtcgcgcacgcccagccggtggggcgactcgttcggcaacgacagcacgtcgcactcccagaccagcacctcctcctggtgctcgcagcctccggacgagatggaggcggagatgaagcggctgcggctggagctgaagcagaccatggacatgtacagcacggcgtgcaaggaggcgctgagcgcgaagcagaaggcgctggagctgcagcgctggaagatggacgaggagcagcggtcgcaggagacgcggctgacggaggagtcggccatggcgctcatcgagcaggagaaggccaaggcgagggcggccatcgaggcggccgaggcgtcgcagcggctggcggacctggaggcgcagaagcggatcagcgcggagatgaaggcgctcaaggaggccgaggagcggctccggtccatggccgccggggcgcgcgagtcggcggtccggtaccgcaggtacaccatcgaggagatcgagatcggcaccgaccgcttcaacgaggcccgcaaggtgggcgagggcgggtacggccccgtgtacaagggccacctggaccacacgccggtggccatcaaggtgctccgccccgacgcggcgcaggggcggtcgcagttccagcaggaggtggaggtgctgagctgcatccgccaccccaacatggtgctcctcctgggcgcctgccccgagtacggctgcctcgtgtacgagtacatggccaacggcagcctggacgactgcctgttccaccgcggcggcggcgggccggtgctcccgtggcagcaccggttccgcatcgcggcggagatcgcgacgggcctcctgttcctgcaccaggccaagccggagccgctggtgcaccgcgacctcaagccgggcaacatcctcctggaccgcaactacgtgagcaagatcagcgacgtcgggctggcgcgcctggtgccggcgtcggtggcggacaacgtgacgcagtgccacatgacgtcggcggcgggcaccttctgctacatcgacccggagtaccagcagacgggcatgctgggggtgaagtcggacgtgtactcgctgggcgtgatgctgctgcagctggtcacggcgcgttcccccatggggctgacgcaccacgtcgggcgcgccctggagcgcggcaccttcgccgacctcctcgacccggccgtccacgactggccaatggacgaggcgcaccgcttcgccgaggtctccctccgctgctgcgagctccggcgcaaggaccgccccgacctcgccaccgtcgtgctccccgagctcaaccgcctgcgcgcgctcggcgaggacagcatggactcctgcacgaccatgagcggccgcggcggcatgcacagctcctcctccgccttccacggcaacccctattcgcagccacgacacgtaattaaagccactcctagttcttccttgcagaatcgtcgtttcctctgacggctaatcgaatccattccaggacgcggcgagcgacccgacgcggccgcaccacgtctcgaacgcgagccagtcagccatggctccatggaggtccaactacaactgagagatcgcgagcgcatctgagacaccagcccgtcgccgccatggagcagtgcatgcagcaacggtctcttggtctgctgaatggactgcgagtgctgttaaccaatgcagagctggcagaagcagagcgtgccatggcaatgccaatggtgcagtgcatagtttgttgtggcagtaaagttgtgaccgtgcagtgtgtagtttcttcaaaccaaaacaagaaagaaagaaaaaaaaagaacatgtgaatttgtgtaaacgcagactgaagaatgtcaaagaccaaagatcggtactgacggttcctcccgaaagtcgttctgaaattcgcgtcgcaagatgtgtactgatcatgatgctggactgtctggcgaggcggcgaccatgtcgttcgtctgtccgac

SEQ ID NO: 214355 - DNA, 2953 bp, Zea Mays
aaccgctctaattatagtcaacagaggtcagggaacaagagtagaagtctaaaagagatgccccccgaaatcctcctctgatcgccttccctccccgagaccttcgaggggatgaatcgctagcgtcaggatcgtagaaatatagcctagaacatatactacacataggaggtcaaaatccaccaatccatatagtgctctgcgtgcattagaagcggcagaagcacaatgggcaggtacagcgacgggaaggacagcggcgagaccggcggcggcagctacccgctggtggcggtgtgcatcgacaaggacaagaacagccagaacgccctcaagtacgccaccgagacgctcgcccacaggggccagaccatcgtcctcgtgcacgtcaacaccaaaggcacctcgggtggggtggcggacgccgccgggtacaagcagccgacggacccgcagatgaaggacctcttcctcccattccgctgcttctgcacgcgcaaagacatccactgcaaggacgtggtgctggacgaccacgacgtggccaagtccgtcgtcgagttcgccgcgcacggcgccgtagagaagctcgtcgtcggcgctagcgctaggggcggcttcgtcaggttcaaggcggaaatctgcaacaccatctccaagtccgcgcccgacttctgcaccgtgtacgtcgtctccaagggcggcaaggtgacgtcggtgcggcaggccgtccggcaggcgccggcagtgtcgccgctccggaccatgatccatgggcccaagccggaaccagagccggtgcacgcgcagaaatggacgcctccgcctccgcctccagcggttcaagacaaccacatcatgtcgccgttcgcgaggacgacggggcacagcgccgggtcggcgcggaaggcgttcccggacttctcgctgccggagtcgtcggacatatcgttcatcgggtccgccccccgcaggagcacggagcggtacccgccgcggctgtccagcgggtcggacggcgtggaccagcagcagcagcacagcttcgaggcgtcgcgcacgcccagccggtggggcgactcgttcggcaacgacagcacgtcgcactcccagaccagcacctcctcctggtgctcgcagcctccggacgagatggaggcggagatgaagcggctgcggctggagctgaagcagaccatggacatgtacagcacggcgtgcaaggaggcgctgagcgcgaagcagaaggcgctggagctgcagcgctggaagatggacgaggagcagcggtcgcaggagacgcggctgacggaggagtcggccatggcgctcatcgagcaggagaaggccaaggcgagggcggccatcgaggcggccgaggcgtcgcagcggctggcggacctggaggcgcagaagcggatcagcgcggagatgaaggcgctcaaggaggccgaggagcggctccggtccatggccgccggggcgcgcgagtcggcggtccggtaccgcaggtacaccatcgaggagatcgagatcggcaccgaccgcttcaacgaggcccgcaaggtgggcgagggcgggtacggccccgtgtacaagggccacctggaccacacgccggtggccatcaaggtgctccgccccgacgcggcgcaggggcggtcgcagttccagcaggaggtggaggtgctgagctgcatccgccaccccaacatggtgctcctcctgggcgcctgccccgagtacggctgcctcgtgtacgagtacatggccaacggcagcctggacgactgcctgttccaccgcggcggcggcgggccggtgctcccgtggcagcaccggttccgcatcgcggcggagatcgcgacgggcctcctgttcctgcaccaggccaagccggagccgctggtgcaccgcgacctcaagccgggcaacatcctcctggaccgcaactacgtgagcaagatcagcgacgtcgggctggcgcgcctggtgccggcgtcggtggcggacaacgtgacgcagtgccacatgacgtcggcggcgggcaccttctgctacatcgacccggagtaccagcagacgggcatgctgggggtgaagtcggacgtgtactcgctgggcgtgatgctgctgcagctggtcacggcgcgttcccccatggggctgacgcaccacgtcgggcgcgccctggagcgcggcaccttcgccgacctcctcgacccggccgtccacgactggccaatggacgaggcgcaccgcttcgccgaggtctccctccgctgctgcgagctccggcgcaaggaccgccccgacctcgccaccgtcgtgctccccgagctcaaccgcctgcgcgcgctcggcgaggacagcatggactcctgcacgaccatgagcggccgcggcggcatgcacagctcctcctccgccttccacggcaacccctattcgcagccacgacacgacgcggcgagcgacccgacgcggccgcaccacgtctcgaacgcgagccagtcagccatggctccatggaggtccaactacaactgagagatcgcgagcgcatctgagacaccagcccgtcgccgccatggagcagtgcatgcagcaacggtctcttggtctgctgaatggactgcgagtgctgttaaccaatgcagagctggcagaagcagagcgtgccatggcaatgccaatggtgcagtgcatagtttgttgtggcagtaaagttgtgaccgtgcagtgtgtagtttcttcaaaccaaaacaagaaagaaagaaaaaaaaagaacatgtgaatttgtgtaaacgcagactgaagaatgtcaaagaccaaagatcggtactgacggttcctcccgaaagtcgttctgaaattcgcgtcgcaagatgtgtactgatcatgatgctggactgtctggcgaggcggcgaccatgtcgttcgtctgtccgac

SEQ ID NO: 214356 - DNA, 2454 bp, Zea Mays
gccacaagtgccaactttggtttggaacaaatcaaccacaagcagatttatctcagccaccaccaccagcagcagcagctcaaatccatccaactactgtaataaatgaagaagaatctcaagtcttttccctctccctcctctctctaatgtacatctttggtattaaaaatgttattacacctcaacagatcaaaattgtgcagcgataacacctaaccaactccattacagatcccagcctcctggcagccaacactgtttgttcgactttccacgcagcacgcccacggcaaagggagtggtgcatgaagctatctatctatgccacacaagctacttgtaaaagctggcaacacatcccagccacacaaagttgctgttgttcattgatgtctcagcttcacaggtgattgtcactcagctaaaagggtatcacgtatggcagagcaatgacatcagcatggtcaattttcagagcctgagcccacacttgggggactccatcagcctcaggcgctgaactggccggcttccttggctgggtgccgcctttgtcgaacagccagtcctcaccttcctgcccaggcaattccatcatttgaggtgcttcaggaatgctgtatatctggctaagatacttgcagtcggggtgaggtggcttcctagagcttgtgccattctcataagcagccaccggatcgactggacctcgctgctgaccctgttggttgccattgaccttctcttccttgtggagcctttcagccttttcaatatttatggcttcctgcttcacagaagagagtggcgcggctacatgagatgctgtaccattctccacacgattgctggggagtgctggtctcggcaactttgtaggccgcatatcaaggttgtctgtacagcagcatcagaagtcttataatataaagcaccataaaaaaggataatggtgtcatacaagactcgcatgctgttaagtgcaaaagaaaaaaagaaaagctaggaactcactttgtaagtaaccattcgtttcatggttctttcgcttcttcaggttctcatcaggcacaacagattttccatcatcaactggtggggctaaaggagggaccgagtgcttcaagttaagactatctatgggataacttatactgttttctcttgttttattatgctctttgtggttatgttcccttttctccttctttgcctctttctcctttttcttctctttgtgtttatctttctctttccttttctttttctcatgccgatcactctttttgtcctctttcttggcaatatctggtgccccatctctgaccttctccatcctttcagctctcccatctgcagctttctccacagctggaggctttgacataaccagtttctgatcagttgaaatattagcctgcagcaaccttccaccttgttccttttccttgcccatagcaggtgaaaggcctcctgcatcaggtttcttagcagagacagaaagattttcagctggtcgtaccatgccattcggtctccgtattgtaatgctcgggcttgggatggatgacctaggtgctcctctatccatcccccatgttgcacttgatgttgatgggctgccaaatctctgcatggatccttgtgtgttgtccattggcctaccaaccttgccatttcccttatgcatagcattagcaggatttggaggcaatggagaggaggtgccaacttctttcttcgcgacatctttgtttgtgttctcagttctcttttgaagcgatatgctaatgttactgattcgctgtccaaccccctcttttctgggtgcagcttcattactggatgaaagccttgcagctttgaatttatcctccgttgtaggtgctggtggaaagccaccagcagttcttcgagcagaagtggtgaagctttcagaatgttgtactgatgtcccattcttttgtcgattggcattgatgctctgttgtataaatccctcagttttccttgaagcattaccagactgaatatgcactttattatgcgcggacctttcagtctccattgcaggtgaagcaatgaagcctttgcgatttcgatcatttgaaacagcataattttcaatagtttgactcgctgcccctttctcatcctgtactcctctgaccaactcctccctgaatttaagatccttaatttcttcagaccccctgctgctctctccaaccttctgaccatggagagcctcgtcatttctttgaattccttcgcctgactccctgtttttatctttgctcttgtcttttttctcgtctttgtgtttttctttacgatctttcttatctttgtgcttatccctactcctgtctttatccttcttttctttaccttcctttctatctttgtccttcttgtccttcttatgtttcttctctttgtgtttctcct

SEQ ID NO: 214357 - DNA, 1727 bp, Zea Mays
gttcggttgttccattacggatacatctcggtgatgagcggcgcgcagctgttcatgaaggaggacctcaagatcacggacacgcagatcgagatcctcgccggcgtcatcaacatctactcgctgttcggctccctcgccgccggcctcacctccgactggctcggccgccgctacaccatggtgctcgcggccgccatcttcttcacgggcgcgctcctcatgggcttcgccccgggctacgggttcctcatggtgggccgcttcgtggccggcatcggcgtcggcttcgcgctcatgatcgcccccgtctacaccgccgaggtggcgcccacctcggcgcgcggcttcctcacctccttcccggaggtgttcaacaacttcggcatcctcctcgggtacgtctccaacttcgccttcgcgcgcctccccgtccacctcagctggcgcgccatgttcctggtcggcgccgtgccgcccgtcttcctgggcgtcgccgtcctcgccatgccggagtcgccccgctggctcgtcatgcggggccgaatcgacgacgcgcgccgcgtgctgcagaagacctccgactcccccgccgaggccgaggagcgcctgctcgacatcaagaaggtggttggcatccccgagggcgtgtccgacgccgacgacgtggccgccatagtccgcgccagcggcaagggctcgtcgtcgtcgcgccacgacggggtgtggaaggagcttctcatcaacccttcccgccccgtgcgccgcatgctcatggcggggctcgggctcatgttcatccagcaggccacgggcgtggactgcgtggtcatgtacagcccgcgggtgttcgagcgggcgggcatcaagtccaagaccaactcgctgggcgcgtccatggcggtgggcgcgtgcaagaccttcttcatacccatctcgacgctgctcctggaccgcatcggccggcggccactgctgctggcgagcggcggcgggatggccatcttcctcttcacgctggccacgtccctgcacatgatggaccggcgccccgagggggaggccaccgcgctgggcgcggtcagcatcgcggccatgctgtcgttcgtggcgtcgttcgcgtccgggctgggccccgtcgcctgggtctactgctccgagatctacccgctgcggctgcgcgcgcaggccgccgccatcggcacggggctgaaccggatcatgagcggcgccaccaccatgtccttcctctcgctctccaacaccatcaccatctccggcagcttctacctctacgcctgcatcgccgccgcagggtgggtgttcatgtacttcttcctgccggagacgatgggcaagagcctggaggacaccgtgaagctcttcggcaaggacgcggacgacgaggacgtcagcgacatccgtcgtcacgtgcccactaagaagccgtctactgagctgagtgctcagcactgatcgagtaatgtgctacgcaacacgtgtcctcccgagtgtggccgaagcttatgttccgtaaagcttcgatgatgtagtataatatttttttttgtgtgtcggaactgtggtgaatctatgtatatcccgcgcctcttttgtttattagatttgtacattttttgttgatctcgtggcatggtgcgtgtgcgtagaaaaaatattattaaaaatatctatctctgcctcgtgtggcctacatgttatatttt

SEQ ID NO: 214358 - DNA, 2422 bp, Zea Mays
ttcgtactgaaagcgttggccatgatcgatggcatccggtcctgccgaccccggatgaattcgcgatcaagcaaacgcaccgcgcgcgccgagtaagcatagccgccggccccgctcgggagctagcactggtgctgcgcgccgtgtccgcgcccgcgtgcgctgcagtgctccctactctgttcttgataagacgatcacgacaacacgtcgcgccctaaagcagcagccgccctagccggctagtctcacatcgacgccgcgacgggagtggattggactcttcttctcctccttcttcttcctcttgccgtttcttccactccttggctcgggtccgcgggatcgccgtgcccctgcggcttctttcggccccggacgggatgcaccagatcgggagcggcatgtacgtgtccggccccgcgccggacaggaagcgggagcggcggctgtcgtcggggtcggccgccacgccgccgtacacgggcggggacgtggcgcgctcgggcgagctcggccggatgttcgacatcgccgcgtcgcagtcgcaggcgccgtcgccggcctcctcgcgccgcagctccggcccgctgccccggccctcgccgtcgccggcgtcgggaccgctgtcgcagctctcgcacccggggctcctggtcgggccgtccccgtcccccgcgccctctccgtcgccggcggtcgggtcgtcgaggaaggggagcggcaggaggcgcggcgccgggaacgaggcgggcgcggccgtggcggcgcgcgggacggcgaggctcggcgtcccgttcgcgtgctacgtgctggtggccgtggcggccgcggccgccgtcggcgccggggccttctgcctcgtgtcgtggcgccggtgggaggtcctcgccgcggcgggcggcgcggtggccgccgtcgcggcggtgttcgcgtcgaacgcgtgccggacggcggccgaggcggagaggttcttccgccggttccccgatacggtgttcgacgaccacggcggggacatgcccatcggcgagctcgtcaagatcaccgggcaagttacctgcggtcgccgccccctgggtgccaatttccacgacgccgccaggtgcgtgctcacgtccgttcagctgttcgagcgccgtcgatggggctggtgctgcagccgtcggcggtggcggctgagacactctgaggcacgggtgacgaacttctacatctctgacaggaactcgggcaagagattctacgttcgtgctggtgagagcgccttgatcactcctatgatcaaacagaaaacaatcagctttgacggcgacaagaaggacgcttcacaaaacttgaagagattgttggcaaccaacgagttgtcgtgcaatggagatttgactgttaaagaagggttaatcagagaaggggacacagcaagtgtgataggcatcctgaagaaacaccatgcctgtgacatcgtggatgcaccggccggtgtggtcaccaccggttgccagctgatccggtgcatgttccccgtcttcgttgaagggctcatactgatcggagatgaagaccctgacgaggctgtatatatggtctgaactatagatacatatacatgcatattcatacactaatgtactagaattcacgccctgctgtctatcacggaagaggagttttagtatcttccatgggtttctgataaaagggatttactacttacgtagctgatggagacggaatgatgtaaattaaagtggtatttgtaggttgtcagtagcttagctgtattatttttgggtctctttacaagaggactgctcatttgtttgttggctaagacttgatgtttatgtgcccggtttcttttgaagtttggaatgatcagtttttgtttgttgcaactattgttttttcctgatttgaaacagggtggagccttttcattcttgcaaagtgtttgtcgctctgaacaatgcattcttagagaaagtttctcaaaatagagaaaagtaaacaaaagatatattttgaagaaattcaagatgggctaataggacaatattcaacaagtgatgctaatgtaacagaacaagttaaaatatctgaggcaagagaagcaccaccacaatcacgaaggtcagcaaggcttcgcgagacacgagaggaagtgttgttgttagacaacgatgaacttgcaacatatgtgggagcaatggtggacctagatttcaagtcatggcaagttaccacgagatccaaaatagattctatggaagataatcaagtttggaacttggttgaccgcctcatggtgttagatctatagatatggatgaaaaagtttatatctataaagctcgacttgttgcaaagggttttcgaaaagttcaaggagttaactacgacgagtcattcttgctggtgg

SEQ ID NO: 214359 - DNA, 1226 bp, Zea Mays
ctgggtgccaatttccacgacgccgccaggaactcgggcaagagattctacgttcgtgctggtgagagcgccttgatcactcctatgatcaaacagaaaacaatcagctttgacggcgacaagaaggacgcttcacaaaacttgaagagattgttggcaaccaacgagttgtcgtgcaatggagatttgactgttaaagaagggttaatcagagaaggggacacagcaagtgtgataggcatcctgaagaaacaccatgcctgtgacatcgtggatgcaccggccggtgtggtcaccaccggttgccagctgatccggtgcatgttccccgtcttcgttgaagggctcatactgatcggagatgaagaccctgacgaggctgtatatatggtctgaactatagatacatatacatgcatattcatacactaatgtactagaattcacgccctgctgtctatcacggaagaggagttttagtatcttccatgggtttctgataaaagggatttactacttacgtagctgatggagacggaatgatgtaaattaaagtggtatttgtaggttgtcagtagcttagctgtattatttttgggtctctttacaagaggactgctcatttgtttgttggctaagacttgatgtttatgtgcccggtttcttttgaagtttggaatgatcagtttttgtttgttgcaactattgttttttcctgatttgaaacagggtggagccttttcattcttgcaaagtgtttgtcgctctgaacaatgcattcttagagaaagtttctcaaaatagagaaaagtaaacaaaagatatattttgaagaaattcaagatgggctaataggacaatattcaacaagtgatgctaatgtaacagaacaagttaaaatatctgaggcaagagaagcaccaccacaatcacgaaggtcagcaaggcttcgcgagacacgagaggaagtgttgttgttagacaacgatgaacttgcaacatatgtgggagcaatggtggacctagatttcaagtcatggcaagttaccacgagatccaaaatagattctatggaagataatcaagtttggaacttggttgaccgcctcatggtgttagatctatagatatggatgaaaaagtttatatctataaagctcgacttgttgcaaagggttttcgaaaagttcaaggagttaactacgacgagtcattcttgctggtgg

SEQ ID NO: 214360 - DNA, 759 bp, Zea Mays
ccggcgctcctactactcccctccatggcgcgcagttggcaagactggtcgccagaagctactcaagcagaaaggatgtgttgtttgcatcacgggcctttagtgcttcagcataatcaggttatgaagcacgaattgtacatcagctttcaagtgccaagttcagttaccttgaatattttaagtaatgataaactacgcctctgctcatgacaatgaaacactatttgatattattagtgtaaagttttttgtttgtttgcttgtgcagactctgatgaacctctcaattgacgagcgatgcaggaaaaataatttgtccacaagcatgattgcattatcccaggtttgaacttagaagatggccctgcacactctgcctcgacgtcatcttcaccagagcagactactgatgttgatggaagtaccactggtgatgtcaccttctaagtataacttgggtaaacttattacctcttcctcttttccaaatgctggttcggtgttatccatgttctcagcattaacctcttaaagttctgaaaagacaaggatgaatgcacactgcacttcctactgcacttcttttgaacctatcatgcaatgtccttctgcttgggtgtgagcttcaaaaacacactgaaatttactaagctagtagttcatctaaaagaaaaggtgtgtgctctgttctttctatccagcataattggcttctaattagagataaactccaatactaagaaccttctgaggaag

SEQ ID NO: 214361 - DNA, 1936 bp, Zea Mays
caatcattcgcagcaacattcctagtcgtaggcgaggagcgaattgcttcaaggaatcggaatcctctctctcattcactcactctctcttatccaaacgcccccgtgccccgtctgcgtcgcgtagggttttggcaacttgcacgtacgagagcgtccatggacgacggcagcagcaacaaggtggttgaggacgtcgcggaggaggaccccggccgccgcggcggtccatggaggacggatgaggccgacgccaacgagaaggcgcctcgcccgagcaggcgggtcgcttccctcgacgtcttccgcggcctcaccgtcgcgctgatgatactggtggacggcgccggcggcgagtggccggtcatcgggcacgcgccgtggaacggctgcaacctcgcggacttcgtgatgcccttcttcctcttcatcgtcggcatggccgttcccctggccctcaagaggatcccggaccgtggccgagccgtgaggagagtggtcgtaaggacgctgaagctgctcttctggggcatcctgttgcaagtggaatgaatgtgtccaggcggttactcccacgctccggacgaactggcgtatggagtcgacatgaggcacgtgaggtggggcggaatcctccagaggatcgctcttgcgtacctggtggttgcggttctagagatggtgacgaaagacggcgccaaggttcatcaggaccagccgccaggttcttcaggccgcttctcccgtgtattcagaatgtatctctcccagtggatcgtcgcgtgctgcattctggtggtctacctgtcccttgcctacggggtctacgttcctgactgggagttcagagtgcgaaacgctgacagcccagactacggcaaagttctaacggtgaggtgtggtacgaggggggcgttggaccctccctgcaacgccgtaggctacatcgaccgcagagtcctgggcatcaaccacatgtaccagaagccggcatggagaaggcacagggcctgcactgatgactccccacacgaggggcctttcagagaggatgccccagcgtggtgtgtcgcgccattcgagcctgaagggatactgagctcactgtctgctgtgctgagtacggtcgtcggtgttcactacgggcatgtgcttgtccacatgaagagccatacggacaggcttaggcagtgggttaccatgggcgtagctcttctcgttctcggaatcattctgcacttctcgcatgcgatcccgctcaacaagcagctctacacgttcagctacatctgcgtcactgccggcgccgctggggtcgtcttctcagcgctctacttcttggtcgacgtcgtgagcctgcgctacgccttcgcgccgctgcggtgggtcggcatgaacgcgatgctggtgtacgtgatggccgcggaaggcgtcttcgagggcttcctcaacgggtggtactacgagagcaccaacaacactctggtttactgggtgaggaagcacgtgttcgtcaaggtgtggcactccaccagggtgggcatcctcctctacgtcctcttcgcgcagatcctcttctgggcgctcgtctccggcgtcctccaccgcgctcgcctctactggaagctctagcgagcgaacggtggcatagcatgcttttgtcttttgaactgcacatgatacacacgacacctcaaactcgaaccccaagttagtttgaagaactcaaatcacgggcaaaatggaattcggcgagcggatcggattcattattatccgtgcgtgtggagtcgtcggcacgtacacgttcagtacaggtactcagtgtagcatgcatagcgcgaaggcctaggcagcaatggtgcggccaccgtcggcgcagatgacctgcccggtgatgtaggacgaggcgggcatgcagaggaaggcgacgagg

SEQ ID NO: 214362 - DNA, 1545 bp, Zea Mays
gcagctgagttgttgacaaacaacaagttatctgagttggcatgtttggcattatatctcatgtatgagaaaaagcaaggaaaggattcattttggtacccctacattaaggaacttgaccgacatcgaggaagggggcagctagctgttgaatcaccacttctatggactgaaagtgaactggactaccttagtggaagccccttgaaggatgaagttgttgctagagatgaggcaataaggagagagtataatgagcttgacacattgtggtttatggcaggttcactatttcagcaatatccttttgacatacctactgaggcttttccgtttgaaatattcaagcaggcttttgttgcagtacagtcttgtgttgttcatttgcagttatgcttcttatccaagagcagaaagttagtcttgctcgaaggttcgcactagttcccttggggccgccactattgacttacaagagcaactgcaaagcgatgttgacagttgatggtgagtctgttcgattggtggtggatcggccatataaagctggagaaccaataatcatctggtgtggaccccaaacaaactccaggcttgttctgaactatggttttgttgatgaaaacaatccctttgatcgcatatcaattgaggcatctttaaatacagaagatcctcaataccaagaaaagagaatggttgctcagaggaatggaaagcatgctatccaaaattttaatgtctatgtaggcaaagagaaacaaactgttgcagaaatgcttccttatttgagattaggatacatttcagatccagacgaaatgcagtctatactctcttctgaaggagatacatgtccagttagtccatgtacagagcgagctgtacttgatcagcttggtggttacctggaatctcggttggctggttatccaacaacattgaatgaagatgaagctatgttggcagatggcagtttggaaccaaagcaggaagttgctactaggcttgtgaggttggagaagaagatgctccatgcctgtctccaggccacaaatgagtttataactgacttgccagaccacacagtatcaccttgccctgctcaatatgcccctgaaatgaaatgaggttgcatgttgttttctttcccaaatggtcatatcattaagaatgtcacaatttgatcaatgtgcatatctttttgaagaccatatatgctgcaaggtggatataatatttgaaagaatttgctccttgttttctttagagattacgtaaacgcaattgcttgctagaagcttgcgtgttccaggaaatcacatctcttgatgttccaagttataagggtatcagtggtcttcagcgggatatggtaatggtctccaacgggatgtggccatgttgtagttattagttgcaatgcaccaaagtagtggcggacttaggatttgaacctcgggtattctaagacataaaaaatggtatgtaataccatatacagttcagtaacacatatatataatggtaggcgtttcggagatg

SEQ ID NO: 214363 - DNA, 1860 bp, Zea Mays
ctaatggcggaggctgagcgccgccatggatctgacacggtgtggaatggggaggagccgaagcggagattggatcaaagtggactgggcaggagccaagcaaatcatacttttgactaggtgtccaggacgactgggttcgctatgctaagatgactgaagaaattggagagcaactgcatattgtcggtgatgaccttgtcactaatcccactgcatttttggcacatatggtctatatgaaagaattgatgaatctcgaaggatgtggttaaacatgtctcctagcagccttgtaagattagcaataaaagaccatgagctctggatgctgcgatgcttatagcacaccgccaagttttagatcctcatgctttgaatctctgagtacttaaaacaatgtgtaagggagtccttggattggacctggactgatcgaattcaactgaatttgtaatagaactgactatatatccacccatatttctgacatgtagttggtccttcgaatccaaccacgcattggagacttgttcatatttctaatttccagcctgcacagtcttagcatatatctttgcttagggagttgaactgctccgttgtataatgttgaacattttttgtggttccgaggaattattgttgagcatgcctattatacttggcttccttgtccttaggaaagcatggctttttgacatcctgtcttgtgatgatatatgtccagtaactgttccgtgatcgagttcttgccaattctcatgcttatatctgtctggccgagtcctgttccagttctgcaaatcagcaattgaagtgttttgtgatcatgacaccatgctgtcctcatgttgtgtgtaccggtattttattcttcggtgctgtatcttgccgttgtgattggtcgtttaacaatttagcaggacttgtctgttctgatgtgttttcgacggcaacatattttttagtatctgagtaatatctggcagaagacaccctaacttttgtccaatatcaaacaaagatattatttgcgagtctgctagcctaatcaagagttgttgaatagagagatcctttgaaaagaacaactttttaaactagcaataaaattgacatgactggtccacttgtatgattgtatcttaccattatattcatatttcaaaactatactagggtaggtaaagtgccaacactagagcaaacatgaacctgcgtagtgtactcatgaaaaggataattttgtttgcctacattttcgaatcaataaaatatacgaggtttgtgattattcataaattttgattgttgccagttgcatctgattttttgttatagctgaatgaattgtttcatgtttgggctctatgtagggctctatgataggctttgaatttcagtgcttttgtttagactgaaatggttcagttcatgggtcatacccaagtttattactcctgggccttgctgccataatggctgaagaacctttcaagcttctggtaggactgaaagtgtaaagtgcattcatttctataaatctgagttgtgctcaactgctcaacatacaacttaacactactacaacaacaacaacaaagcctttttatcccaagcacgttggggtaggctagagatgaaaccccgtatgaaaacctcagagctcaaccccaaagaaaaaaaggggaaataaaggcaaaggagaaccgaaaaacgacgaaacagggaaacacataaaagagataaaacccacaagaaccagcaatatctaaatgggcacaagaaaaggtcaaacgattaaagaggaaaagcgaaactataaatcaaggttctggcacgtgaattgcacacttc

SEQ ID NO: 214364 - DNA, 2499 bp, Zea Mays
ctcactcccacgcggccacaccgcctactctgttctcctccccaccactgccgcagcaccgagaaccatggccgccacgtcgcccttctcctcgtacccccctcgcctacactccaaaaccttgaagcctcgtcattctcgcccgctccaccacaaggccgcgcccgccgcctccgccccgcgtccgctactcctctccttccccgcgcctgcacgccactgcggtgctgggctccgcgcttcagcggcgcagaaaaactctgctgattacaagttcgatgaagacgacgacgacgacgaggaggaggagtacgaatacgacggcgaagaggaggagtgggaggaggaggatgatgaggatgcgatgaacgtggaggcgatggaggaggaagcccgtggcgccgctgccgacctcgccaaacgcctcgctcgggagctccacatcgatgatgatgtcagggagaaacgaagaaacatcagggataagacatctgtgtctaaacacattccagataatcttcttccaaaggtggcaattattggtaggccgaatgttggtaaatctgcactcttcaatcgtcttgtcggaggcaatagggctatagttgttgatgaacctggtgtgacaagggaccgcttatatggacgatcttattggggtgatcatgagtttatggttattgatactggtggggtaattactttgtcaaagtctcaagcaggtgtaatggaagaacttgccgtcaccactactgttggtatggatgggattcctctcgccactagagaagctgctattgcaaggatgccatcaatgattgaaaaacaagcagttgcagctgttgatgaagcatccgtcatactattcgttgtggatggtcaggctggtcttgtggcagctgatatagagatttctgattggttacgacgcaactactctgacaagtgtattctacttgctgtcaataagtgtgaatctccacggaaagggcaaatgcaagcattagacttttggtcactcgggttttctcctctgccaatttctgctatcactggcacaggaactggagatctccttgacctggtgtgttcagagttgagaaaatttgaggtattggatgccgttgaagaagagaaaaataaggttcctgctattgccattgtgggaagaccaaatgtgggtaaaagtagcattctaaatgctttggttggagaagatagaactattgtcagcccagttagtgggacaacacgtgatgccattgatactgagtttactacagcagatggggagaagtacaaactcattgatactgctgggatccggcgcaggacagcagttatttctgctggcagcacaaccgaatcactttcggtaaagcgtgcatttcgagcaattcggcgctctgatgtggttgcccttgttattgaagcaatggcctgtgtcacagagcaggattataaaattgcagagaggattgaaaaagaaggaaaggcttgtgtcattgttgtgaacaaatgggatacaatcccaaacaagaaccacgagagtacaacacattatgaacaagatgataatttctgctgctgctttggttgagaaggaaaggtctagaagactcagcacctccattcttaatcaagttattagagaagctatagcattcaaatcaccaccaagaacaagaggtggcaaaagaggtcgtgtctattatacaacacaggctgccgtcggtccaccaacattcgttctatttgtaaatgatgcgaagctcttccctgacacgtaccgccgttacatggaaaagaaactccggtcagacgccggttttccaggcacccctattcggttactgtggcgtagcagaaggcggccagacaaacgaggtaaatctgctgacagtagagcgcagagcccaggaacccctagtgaagtggctctagccgcctaactaaaccgcggcctccagaaatgctcgccacagatcagctcgaccactgggaatggaattctatcgaggcggcggcagttgcttgctccaagaacctggatcggctgaggagctagctgttcatggagtagcgctctcatgttcgggccttggagattttgttgcgtctatatactactagtacggatcagacggagaaagcacattgggccaatgaatgaatagtcacacttcaccgacagagctccaagcacgctttttccacagcgctcttggaacatgtaagattgtaccgaaagaatggcgttagaatgaccatgtaaatgtaatcgtagactgagttctcggatgtgtgggtaaacagcatacttaggtgccgtttggttgttttgtttacgaaatgtaacttaattggtaacggtaatatgttaggagtattttattttgaacgagaaaaaggcgtgcggactgccaattacatattcaagaagatatacagcgccaaaactgtgggaaaaaaccatgatgctccgcctcaatatcgcag

SEQ ID NO: 214365 - DNA, 2580 bp, Zea Mays
ctcactcccacgcggccacaccgcctactctgttctcctccccaccactgccgcagcaccgagaaccatggccgccacgtcgcccttctcctcgtacccccctcgcctacactccaaaaccttgaagcctcgtcattctcgcccgctccaccacaaggccgcgcccgccgcctccgccccgcgtccgctactcctctccttccccgcgcctgcacgccactgcggtgctgggctccgcgcttcagcggcgcagaaaaactctgctgattacaagttcgatgaagacgacgacgacgacgaggaggaggagtacgaatacgacggcgaagaggaggagtgggaggaggaggatgatgaggatgcgatgaacgtggaggcgatggaggaggaagcccgtggcgccgctgccgacctcgccaaacgcctcgctcgggagctccacatcgatgatgatgtcagggagaaacgaagaaacatcagggataagacatctgtgtctaaacacattccagataatcttcttccaaaggtggcaattattggtaggccgaatgttggtaaatctgcactcttcaatcgtcttgtcggaggcaatagggctatagttgttgatgaacctggtgtgacaagggaccgcttatatggacgatcttattggggtgatcatgagtttatggttattgatactggtggggtaattactttgtcaaagtctcaagcaggtgtaatggaagaacttgccgtcaccactactgttggtatggatgggattcctctcgccactagagaagctgctattgcaaggatgccatcaatgattgaaaaacaagcagttgcagctgttgatgaagcatccgtcatactattcgttgtggatggtcaggcaggctggtcttgtggcagctgatatagagatttctgattggttacgacgcaactactctgacaagtgtattctacttgctgtcaataagtgtgaatctccacggaaagggcaaatgcaagcattagacttttggtcactcgggttttctcctctgccaatttctgctatcactggcacaggaactggagatctccttgacctggtgtgttcagagttgagaaaatttgaggtattggatgccgttgaagaagagaaaaataaggttcctgctattgccattgtgggaagaccaaatgtgggtaaaagtagcattctaaatgctttggttggagaagatagaactattgtcagcccagttagtgggacaacacgtgatgccattgatactgagtttactacagcagatggggagaagtacaaactcattgatactgctgggatccggcgcaggacagcagttatttctgctggcagcacaaccgaatcactttcggtaaagcgtgcatttcgagcaattcggcgctctgatgtggttgcccttgttattgaagcaatggcctgtgtcacagagcaggattataaaattgcagagaggattgaaaaagaaggaaaggcttgtgtcattgttgtgaacaaatgggatacaatcccaaacaagaaccacgagagtacaacacattatgaacaagatgtaagagaaaagcttcgcatacttgattgggcacctattgtctactgttctgcgacaaatggcaccagtgttgaaaagataatttctgctgctgctttggttgagaaggaaaggtctagaagactcagcacctccattcttaatcaagttattagagaagctatagcattcaaatcaccaccaagaacaagaggtggcaaaagaggtcgtgtctattatacaacacaggctgccgtcggtccaccaacattcgttctatttgtaaatgatgcgaagctcttccctgacacgtaccgccgttacatggaaaagaaactccggtcagacgccggttttccaggcacccctattcggttactgtggcgtagcagaaggcggccagacaaacgaggtaaatctgctgacagtagagcgcagagcccaggaacccctagtgaagtggctctagccgcctaactaaaccgcggcctccagaaatgctcgccacagatcagctcgaccactgggaatggaattctatcgaggcggcggcagttgcttgctccaagaacctggatcggctgaggagctagctgttcatggagtagcgctctcatgttcgggccttggagattttgttgcgtctatatactactagtacggatcagacggagaaagcacattgggccaatgaatgaatagtcacacttcaccgacagagctccaagcacgctttttccacagcgctcttggaacatgtaagattgtaccgaaagaatggcgttagaatgaccatgtaaatgtaatcgtagactgagttctcggatgtgtgggtaaacagcatacttaggtgccgtttggttgttttgtttacgaaatgtaacttaattggtaacggtaatatgttaggagtattttattttgaacgagaaaaaggcgtgcggactgccaattacatattcaagaagatatacagcgccaaaactgtgggaaaaaaccatgatgctccgcctcaatatcgcag

SEQ ID NO: 214366 - DNA, 2503 bp, Zea Mays
ctcactcccacgcggccacaccgcctactctgttctcctccccaccactgccgcagcaccgagaaccatggccgccacgtcgcccttctcctcgtacccccctcgcctacactccaaaaccttgaagcctcgtcattctcgcccgctccaccacaaggccgcgcccgccgcctccgccccgcgtccgctactcctctccttccccgcgcctgcacgccactgcggtgctgggctccgcgcttcagcggcgcagaaaaactctgctgattacaagttcgatgaagacgacgacgacgacgaggaggaggagtacgaatacgacggcgaagaggaggagtgggaggaggaggatgatgaggatgcgatgaacgtggaggcgatggaggaggaagcccgtggcgccgctgccgacctcgccaaacgcctcgctcgggagctccacatcgatgatgatgtcagggagaaacgaagaaacatcagggataagacatctgtgtctaaacacattccagataatcttcttccaaaggtggcaattattggtaggccgaatgttggtaaatctgcactcttcaatcgtcttgtcggaggcaatagggctatagttgttgatgaacctggtgtgacaagggaccgcttatatggacgatcttattggggtgatcatgagtttatggttattgatactggtggggtaattactttgtcaaagtctcaagcaggtgtaatggaagaacttgccgtcaccactactgttggtatggatgggattcctctcgccactagagaagctgctattgcaaggatgccatcaatgattgaaaaacaagcagttgcagctgttgatgaagcatccgtcatactattcgttgtggatggtcaggcaggctggtcttgtggcagctgatatagagatttctgattggttacgacgcaactactctgacaagtgtattctacttgctgtcaataagtgtgaatctccacggaaagggcaaatgcaagcattagacttttggtcactcgggttttctcctctgccaatttctgctatcactggcacaggaactggagatctccttgacctggtgtgttcagagttgagaaaatttgaggtattggatgccgttgaagaagagaaaaataaggttcctgctattgccattgtgggaagaccaaatgtgggtaaaagtagcattctaaatgctttggttggagaagatagaactattgtcagcccagttagtgggacaacacgtgatgccattgatactgagtttactacagcagatggggagaagtacaaactcattgatactgctgggatccggcgcaggacagcagttatttctgctggcagcacaaccgaatcactttcggtaaagcgtgcatttcgagcaattcggcgctctgatgtggttgcccttgttattgaagcaatggcctgtgtcacagagcaggattataaaattgcagagaggattgaaaaagaaggaaaggcttgtgtcattgttgtgaacaaatgggatacaatcccaaacaagaaccacgagagtacaacacattatgaacaagatgataatttctgctgctgctttggttgagaaggaaaggtctagaagactcagcacctccattcttaatcaagttattagagaagctatagcattcaaatcaccaccaagaacaagaggtggcaaaagaggtcgtgtctattatacaacacaggctgccgtcggtccaccaacattcgttctatttgtaaatgatgcgaagctcttccctgacacgtaccgccgttacatggaaaagaaactccggtcagacgccggttttccaggcacccctattcggttactgtggcgtagcagaaggcggccagacaaacgaggtaaatctgctgacagtagagcgcagagcccaggaacccctagtgaagtggctctagccgcctaactaaaccgcggcctccagaaatgctcgccacagatcagctcgaccactgggaatggaattctatcgaggcggcggcagttgcttgctccaagaacctggatcggctgaggagctagctgttcatggagtagcgctctcatgttcgggccttggagattttgttgcgtctatatactactagtacggatcagacggagaaagcacattgggccaatgaatgaatagtcacacttcaccgacagagctccaagcacgctttttccacagcgctcttggaacatgtaagattgtaccgaaagaatggcgttagaatgaccatgtaaatgtaatcgtagactgagttctcggatgtgtgggtaaacagcatacttaggtgccgtttggttgttttgtttacgaaatgtaacttaattggtaacggtaatatgttaggagtattttattttgaacgagaaaaaggcgtgcggactgccaattacatattcaagaagatatacagcgccaaaactgtgggaaaaaaccatgatgctccgcctcaatatcgcag

SEQ ID NO: 214367 - DNA, 1313 bp, Zea Mays
cactcccacgcggccacaccgcctactctgttctcctccccaccactgccgcagcaccgagaaccatggccgccacgtcgcccttctcctcgtacccccctcgcctacactccaaaaccttgaagcctcgtcattctcgcccgctccaccacaaggccgcgcccgccgcctccgccccgcgtccgctactcctctccttccccgcgcctgcacgccactgcggtgctgggctccgcgcttcagcggcgcagaaaaactctgctgattacaagttcgatgaagacgacgacgacgacgaggaggaggagtacgaatacgacggcgaagaggaggagtgggaggaggaggatgatgaggatgcgatgaacgtggaggcgatggaggaggaagcccgtggcgccgctgccgacctcgccaaacgcctcgctcgggagctccacatcgatgatgatgtcagggagaaacgaagaaacatcagggataagacatctgtgtctaaacacattccagataatcttcttccaaaggtggcaattattggtaggccgaatgttggtaaatctgcactcttcaatcgtcttgtcggaggcaatagggctatagttgttgatgaacctggtgtgacaagggaccgcttatatggacgatcttattggggtgatcatgagtttatggttattgatactggtggggtaattactttgtcaaagtctcaagcaggtgtaatggaagaacttgccgtcaccactactgttggtatggatgggattcctctcgccactagagaagctgctattgcaaggatgccatcaatgattgaaaaacaagcagttgcagctgttgatgaagcatccgtcatactattcgttgtggatggtcaggctggtcttgtggcagctgatatagagatttctgattggttacgacgcaactactctgacaagtgtattctacttgctgtcaataagtgtgaatctccacggaaagggcaaatgcaagcattagacttttggtcactcgggttttctcctctgccaatttctgctatcactggcacaggaactggagatctccttgacctggtgtgttcagagttgagaaaatttgaggtattggatgccgttgaagaagagaaaaataaggttcctgctattgccattgtgggaagaccaaatgtgggtaaaagtagcattctaaatgctttggttggagaagatagaactattgtcagcccagttagtgggacaacacgtgatgccattgatactgagtttactacagcagatggggagaataaaattattacttggaaa

SEQ ID NO: 214368 - DNA, 2699 bp, Zea Mays
acgcggccacaccgcctactctgttctcctccccaccactgccgcagcaccgagaaccatggccgccacgtcgcccttctcctcgtacccccctcgcctacactccaaaaccttgaagcctcgtcattctcgcccgctccaccacaaggccgcgcccgccgcctccgccccgcgtccgctactcctctccttccccgcgcctgcacgccactgcggtgctgggctccgcgcttcagcggcgcagaaaaactctgctgattacaagttcgatgaagacgacgacgacgacgaggaggaggagtacgaatacgacggcgaagaggaggagtgggaggaggaggatgatgaggatgcgatgaacgtggaggcgatggaggaggaagcccgtggcgccgctgccgacctcgccaaacgcctcgctcgggagctccacatcgatgatgatgtcagggagaaacgaagaaacatcagggataagacatctgtgtctaaacacattccagataatcttcttccaaaggtggcaattattggtaggccgaatgttggtaaatctgcactcttcaatcgtcttgtcggagtatgtcaatcatcactcagggctgtgcctgcaatgttcatcaccatacaattttcagaccagaatgcagaaatgaaccgagttatgatttcttgcagggcaatagggctatagttgttgatgaacctggtgtgacaagggaccgcttatatggacgatcttattggggtgatcatgagtttatggttattgatactggtggggtaattactttgtcaaagtctcaagcaggtgtaatggaagaacttgccgtcaccactactgttggtatggatgggattcctctcgccactagagaagctgctattgcaaggatgccatcaatgattgaaaaacaagcagttgcagctgttgatgaagcatccgtcatactattcgttgtggatggtcaggctggtcttgtggcagctgatatagagatttctgattggttacgacgcaactactctgacaagtgtattctacttgctgtcaataagtgtgaatctccacggaaagggcaaatgcaagcattagacttttggtcactcgggttttctcctctgccaatttctgctatcactggcacaggaactggagatctccttgacctggtgtgttcagagttgagaaaatttgaggtattggatgccgttgaagaagagaaaaataaggttcctgctattgccattgtgggaagaccaaatgtgggtaaaagtagcattctaaatgctttggttggagaagatagaactattgtcagcccagttagtgggacaacacgtgatgccattgatactgagtttactacagcagatggggaggaatagaacaataatttgctcaaacatgctgcagaagtacaaactcattgatactgctgggatccggcgcaggacagcagttatttctgctggcagcacaaccgaatcactttcggtaaagcgtgcatttcgagcaattcggcgctctgatgtggttgcccttgttattgaagcaatggcctgtgtcacagagcaggattataaaattgcagagaggattgaaaaagaaggaaaggcttgtgtcattgttgtgaacaaatgggatacaatcccaaacaagaaccacgagagtacaacacattatgaacaagatgtaagagaaaagcttcgcatacttgattgggcacctattgtctactgttctgcgacaaatggcaccagtgttgaaaagataatttctgctgctgctttggttgagaaggaaaggtctagaagactcagcacctccattcttaatcaagttattagagaagctatagcattcaaatcaccaccaagaacaagaggtggcaaaagaggtcgtgtctattatacaacacaggctgccgtcggtccaccaacattcgttctatttgtaaatgatgcgaagctcttccctgacacgtaccgccgttacatggaaaagaaactccggtcagacgccggttttccaggcacccctattcggttactgtggcgtagcagaaggcggccagacaaacgaggtaaatctgctgacagtagagcgcagagcccaggaacccctagtgaagtggctctagccgcctaactaaaccgcggcctccagaaatgctcgccacagatcagctcgaccactgggaatggaattctatcgaggcggcggcagttgcttgctccaagaacctggatcggctgaggagctagctgttcatggagtagcgctctcatgttcgggccttggagattttgttgcgtctatatactactagtacggatcagacggagaaagcacattgggccaatgaatgaatagtcacacttcaccgacagagctccaagcacgctttttccacagcgctcttggaacatgtaagattgtaccgaaagaatggcgttagaatgaccatgtaaatgtaatcgtagactgagttctcggatgtgtgggtaaacagcatacttaggtgccgtttggttgttttgtttacgaaatgtaacttaattggtaacggtaatatgttaggagtattttattttgaacgagaaaaaggcgtgcggactgccaattacatattcaagaagatatacagcgccaaaactgtgggaaaaaaccatgatgctccgcctcaatatcgcag

SEQ ID NO: 214369 - DNA, 2554 bp, Zea Mays
acgcggccacaccgcctactctgttctcctccccaccactgccgcagcaccgagaaccatggccgccacgtcgcccttctcctcgtacccccctcgcctacactccaaaaccttgaagcctcgtcattctcgcccgctccaccacaaggccgcgcccgccgcctccgccccgcgtccgctactcctctccttccccgcgcctgcacgccactgcggtgctgggctccgcgcttcagcggcgcagaaaaactctgctgattacaagttcgatgaagacgacgacgacgacgaggaggaggagtacgaatacgacggcgaagaggaggagtgggaggaggaggatgatgaggatgcgatgaacgtggaggcgatggaggaggaagcccgtggcgccgctgccgacctcgccaaacgcctcgctcgggagctccacatcgggagaaacgaagaaacatcagggataagacatctgtgtctaaacacattccagataatcttcttccaaaggtggcaattattggtaggccgaatgttggtaaatctgcactcttcaatcgtcttgtcggaggcaatagggctatagttgttgatgaacctggtgtgacaagggaccgcttatatggacgatcttattggggtgatcatgagtttatggttattgatactggtggggtaattactttgtcaaagtctcaagcaggtgtaatggaagaacttgccgtcaccactactgttggtatggatgggattcctctcgccactagagaagctgctattgcaaggatgccatcaatgattgaaaaacaagcagttgcagctgttgatgaagcatccgtcatactattcgttgtggatggtcaggctggtcttgtggcagctgatatagagatttctgattggttacgacgcaactactctgacaagtgtattctacttgctgtcaataagtgtgaatctccacggaaagggcaaatgcaagcattagacttttggtcactcgggttttctcctctgccaatttctgctatcactggcacaggaactggagatctccttgacctggtgtgttcagagttgagaaaatttgaggtattggatgccgttgaagaagagaaaaataaggttcctgctattgccattgtgggaagaccaaatgtgggtaaaagtagcattctaaatgctttggttggagaagatagaactattgtcagcccagttagtgggacaacacgtgatgccattgatactgagtttactacagcagatggggagaagtacaaactcattgatactgctgggatccggcgcaggacagcagttatttctgctggcagcacaaccgaatcactttcggtaaagcgtgcatttcgagcaattcggcgctctgatgtggttgcccttgttattgaagcaatggcctgtgtcacagagcaggattataaaattgcagagaggattgaaaaagaaggaaaggcttgtgtcattgttgtgaacaaatgggatacaatcccaaacaagaaccacgagagtacaacacattatgaacaagatgtaagagaaaagcttcgcatacttgattgggcacctattgtctactgttctgcgacaaatggcaccagtgttgaaaagataatttctgctgctgctttggttgagaaggaaaggtctagaagactcagcacctccattcttaatcaagttattagagaagctatagcattcaaatcaccaccaagaacaagaggtggcaaaagaggtcgtgtctattatacaacacaggctgccgtcggtccaccaacattcgttctatttgtaaatgatgcgaagctcttccctgacacgtaccgccgttacatggaaaagaaactccggtcagacgccggttttccaggcacccctattcggttactgtggcgtagcagaaggcggccagacaaacgaggtaaatctgctgacagtagagcgcagagcccaggaacccctagtgaagtggctctagccgcctaactaaaccgcggcctccagaaatgctcgccacagatcagctcgaccactgggaatggaattctatcgaggcggcggcagttgcttgctccaagaacctggatcggctgaggagctagctgttcatggagtagcgctctcatgttcgggccttggagattttgttgcgtctatatactactagtacggatcagacggagaaagcacattgggccaatgaatgaatagtcacacttcaccgacagagctccaagcacgctttttccacagcgctcttggaacatgtaagattgtaccgaaagaatggcgttagaatgaccatgtaaatgtaatcgtagactgagttctcggatgtgtgggtaaacagcatacttaggtgccgtttggttgttttgtttacgaaatgtaacttaattggtaacggtaatatgttaggagtattttattttgaacgagaaaaaggcgtgcggactgccaattacatattcaagaagatatacagcgccaaaactgtgggaaaaaaccatgatgctccgcctcaatatcgcag

SEQ ID NO: 214370 - DNA, 2694 bp, Zea Mays
acgcggccacaccgcctactctgttctcctccccaccactgccgcagcaccgagaaccatggccgccacgtcgcccttctcctcgtacccccctcgcctacactccaaaaccttgaagcctcgtcattctcgcccgctccaccacaaggccgcgcccgccgcctccgccccgcgtccgctactcctctccttccccgcgcctgcacgccactgcggtgctgggctccgcgcttcagcggcgcagaaaaactctgctgattacaagttcgatgaagacgacgacgacgacgaggaggaggagtacgaatacgacggcgaagaggaggagtgggaggaggaggatgatgaggatgcgatgaacgtggaggcgatggaggaggaagcccgtggcgccgctgccgacctcgccaaacgcctcgctcgggagctccacatcgattccagataatcttcttccaaaggtggcaattattggtaggccgaatgttggtaaatctgcactcttcaatcgtcttgtcggaggcaatagggctatagttgttgatgaacctggtgtgacaagggaccgcttatatggacgatcttattggggtgatcatgagtttatggttattgatactggtggggtaattactttgtcaaagtctcaagcaggtgtaatggaagaacttgccgtcaccactactgttggtatggatgggattcctctcgccactagagaagctgctattgcaaggatgccatcaatgattgaaaaacaagcagttgcagctgttgatgaagcatccgtcatactattcgttgtggatggtcaggcaggtttaggaaattatctttcttttctgctcatggaagtgctggtttaatatttgaattcacaacaaccttaaatatatgtacttctaatgctttccttgaacatttttgaccagaaattgttgttctataatttctcatttaagttccttttttactagtataatggtgtcaacatatttcaggctggtcttgtggcagctgatatagagatttctgattggttacgacgcaactactctgacaagtgtattctacttgctgtcaataagtgtgaatctccacggaaagggcaaatgcaagcattagacttttggtcactcgggttttctcctctgccaatttctgctatcactggcacaggaactggagatctccttgacctggtgtgttcagagttgagaaaatttgaggtattggatgccgttgaagaagagaaaaataaggttcctgctattgccattgtgggaagaccaaatgtgggtaaaagtagcattctaaatgctttggttggagaagatagaactattgtcagcccagttagtgggacaacacgtgatgccattgatactgagtttactacagcagatggggagaagtacaaactcattgatactgctgggatccggcgcaggacagcagttatttctgctggcagcacaaccgaatcactttcggtaaagcgtgcatttcgagcaattcggcgctctgatgtggttgcccttgttattgaagcaatggcctgtgtcacagagcaggattataaaattgcagagaggattgaaaaagaaggaaaggcttgtgtcattgttgtgaacaaatgggatacaatcccaaacaagaaccacgagagtacaacacattatgaacaagatgtaagagaaaagcttcgcatacttgattgggcacctattgtctactgttctgcgacaaatggcaccagtgttgaaaagataatttctgctgctgctttggttgagaaggaaaggtctagaagactcagcacctccattcttaatcaagttattagagaagctatagcattcaaatcaccaccaagaacaagaggtggcaaaagaggtcgtgtctattatacaacacaggctgccgtcggtccaccaacattcgttctatttgtaaatgatgcgaagctcttccctgacacgtaccgccgttacatggaaaagaaactccggtcagacgccggttttccaggcacccctattcggttactgtggcgtagcagaaggcggccagacaaacgaggtaaatctgctgacagtagagcgcagagcccaggaacccctagtgaagtggctctagccgcctaactaaaccgcggcctccagaaatgctcgccacagatcagctcgaccactgggaatggaattctatcgaggcggcggcagttgcttgctccaagaacctggatcggctgaggagctagctgttcatggagtagcgctctcatgttcgggccttggagattttgttgcgtctatatactactagtacggatcagacggagaaagcacattgggccaatgaatgaatagtcacacttcaccgacagagctccaagcacgctttttccacagcgctcttggaacatgtaagattgtaccgaaagaatggcgttagaatgaccatgtaaatgtaatcgtagactgagttctcggatgtgtgggtaaacagcatacttaggtgccgtttggttgttttgtttacgaaatgtaacttaattggtaacggtaatatgttaggagtattttattttgaacgagaaaaaggcgtgcggactgccaattacatattcaagaagatatacagcgccaaaactgtgggaaaaaaccatgatgctccgcctcaatatcgcag

SEQ ID NO: 214371 - DNA, 2440 bp, Zea Mays
atgggccaaagttatgtgactgctgggaagcacgaggagactccagaggcttttccacttcctagaggcgtcgcaatagtgcgggcagatgctggatgggctcactgtgttgcaataacagatgaaggtgatgtttatacatggggttggaaagagtgtgttccaactggaagggttattggagaccaatcttcagttggaaccaaggagaaggatgaaagacaaatggcaatggccactgaccaaggtgtgagccccaggtcgcaggtgtctaggacaagcagcggggcagcatctggtccttctgaaagcagaggcactgatgatagcacaaagcgacgaaggttgtcttcagcaaaacatggccctgagagctcgacatccagtgacgaaagtctttccgcacccccttgtgttgtgacatttaatacaggagtgaaaatagtgtctgtagctgctggtggtcgtcatacattagcactgtcagatttaggtcaggtatggggttggggatatggaggagaagggcaactaggtctgggctctagaatccgaactgtttcttctccccatcctgtaccgtgcattgaatcagcactatacagcaaggatcgcccatcagctatgaaagattcaggagctcttcttacatttgggtgggggctgtatggacagtgtggacaagggaatacagatgatgttttaagtccaacgtgtgtatcgtctatcctgggatccaagatgcaagacgttgctgcgggtctgtggcacactgtatgtacatccgtagatggtgatgtttattcctttggaggaaaccagtttgggcagcttggcactggttctgatcaggctgagactgttccaaaattggtagatgctaccagcctagagaataagaatgccagatctgtttcttgtggagctcgccatagtgctattataacaggtaactttaagttgttctaatgtttgtttgtagggatctcaattgtatcatcttgtacgcccatttgcctttcttacaagaccacactactaatacatgctcatgcagggtacgagttctaatcttcgcttacatgcatcttgctattagctttgttatatatacgcgtgccttgctgcaaatggacctaatgttacctcctctttttttattgctacctcatccttggatgctctcgtttgaatcgagaacaaaaggttctgtgctaatcagtgactgaacttaccattgggtaacccaggagtattttttttatttcattaagttattcttgccgtgctgagccaccaggccttgcctcggtttatttcttccctagactccactcatacaaaggtctatggcttttttctcagagctacacatcattatattaagaagaaaaataaggtgtccaaaatagaccaataccaaaaggaatgccaccttcccgtggccaaaatcgagaaatacataaaggtatccataagaccaaaatatcgagaacaaactaccaaagacgacaaatcctagtcctgggatagtggcagtagggagagacactgctggctcttctagccacattcacatttggagtaagcctctctaagacacatccatccattcctgtgatttcaaagcggccaaaacccaagaataattagggagttaagcccctttgcagtaatgctttgcacctgatcattggccttgatctgtttttttttcctggccgagctgagccggtagaagttcacaagggggcagcagccatttacacgtacatactgatcacttaggcctactggaagtagaccaggggcagaactaaggcggtgaacaaaaatgtatctagagaaatcgaaaggggtaactatatcctcaggaagtcttctcatctgacaaaggttacacaactattgcagatgaaggcgaggtattctgctggggatggaacaagtacggccagcttggccttggcgactcaatggacaggaacgtgccttgcagtgttcctgtggacgcttaccaccccctaaacgtgtcctgtggctggtggcacaccttggtgctcgcggactcgcctacttgaaacctgacaaagaaattaccttagattgacaattttgttaggaactcgtaggctcgtgcagatgcggtgatgctgcatttcatcgtgtacatacatggcagtgcatgcagatatgtgtattcattctttggcggtgcactcttcaacctgtgcaacgtagacaaagcttgtatcgcaccgcgtatacagttgagtaggattgcctcgacaaattgtgcatttcctccgttgctgctaatgtacaaaattccacaagctagacagggcaaccgatgcgttcctcgttgcagaagacagatctccaaaataattaatgtttgtgtatcgtgatggttgcgattccgatattgtttggccgg

SEQ ID NO: 214372 - DNA, 1558 bp, Zea Mays
atgggccaaagttatgtgactgctgggaagcacgagaggcttttccacttcctagaggcgtcgcaatagtgcgggcagatgctggatgggctcactgtgttgcaataacagatgaaggtgatgtttatacatggggttggaaagagtgtgttccaactggaagggttattggagaccaatcttcagttggaaccaaggagaaggatgaaagacaaatggcaatggccactgaccaaggtgtgagccccaggtcgcaggtgtctaggacaagcagcggggcagcatctggtccttctgaaagcagaggcactgatgatagcacaaagcgacgaaggttgtcttcagcaaaacatggccctgagagctcgacatccagtgacgaaagtctttccgcacccccttgtgttgtgacatttaatacaggagtgaaaatagtgtctgtagctgctggtggtcgtcatacattagcactgtcagatttaggtcaggtatggggttggggatatggaggagaagggcaactaggtctgggctctagaatccgaactgtttcttctccccatcctgtaccgtgcattgaatcagcactatacagcaaggatcgcccatcagctatgaaaggtaacaaggctgctgaaggacatgtcagtaaagtcttgggaaattgtgtgagggccattgcttgtggaggtcgtcacagtgctgcagtaacagattcaggagctcttcttacatttgggtgggggctgtatggacagtgtggacaagggaatacagatgatgttttaagtccaacgtgtgtatcgtctatcctgggatccaagatgcaagacgttgctgcgggtctgtggcacactgtatgtacatccgtagatggtgatgtttattcctttggaggaaaccagtttgggcagcttggcactggttctgatcaggctgagactgttccaaaattggtagatgctaccagcctagagaataagaatgccagatctgtttcttgtggagctcgccatagtgctattataacagatgaaggcgaggtattctgctggggatggaacaagtacggccagcttggccttggcgactcaatggacaggaacgtgccttgcagtgttcctgtggacgcttaccaccccctaaacgtgtcctgtggctggtggcacaccttggtgctcgcggactcgcctacttgaaacctgacaaagaaattaccttagattgacaattttgttaggaactcgtaggctcgtgcagatgcggtgatgctgcatttcatcgtgtacatacatggcagtgcatgcagatatgtgtattcattctttggcggtgcactcttcaacctgtgcaacgtagacaaagcttgtatcgcaccgcgtatacagttgagtaggattgcctcgacaaattgtgcatttcctccgttgctgctaatgtacaaaattccacaagctagacagggcaaccgatgcgttcctcgttgcagaagacagatctccaaaataattaatgtttgtgtatcgtgatggttgcgattccgatattgtttggccgg

SEQ ID NO: 214373 - DNA, 1627 bp, Zea Mays
tggacagtggtttcaatgctgaagagtctggaaaactcctcacttggggttctgctgatgacatgggccaaagttatgtgactgctgggaagcacgaggagactccagaggcttttccacttcctagaggcgtcgcaatagtgcgggcagatgctggatgggctcactgtgttgcaataacagatgaaggtgatgtttatacatggggttggaaagagtgtgttccaactggaagggttattggagaccaatcttcagttggaaccaaggagaaggatgaaagacaaatggcaatggccactgaccaagtgagccccaggtcgcaggtgtctaggacaagcagcggggcagcatctggtccttctgaaagcagaggcactgatgatagcacaaagcgacgaaggttgtcttcagcaaaacatggccctgagagctcgacatccagtgacgaaagtctttccgcacccccttgtgttgtgacatttaatacaggagtgaaaatagtgtctgtagctgctggtggtcgtcatacattagcactgtcagatttaggtcaggtatggggttggggatatggaggagaagggcaactaggtctgggctctagaatccgaactgtttcttctccccatcctgtaccgtgcattgaatcagcactatacagcaaggatcgcccatcagctatgaaaggtaacaaggctgctgaaggacatgtcagtaaagtcttgggaaattgtgtgagggccattgcttgtggaggtcgtcacagtgctgcagtaacagattcaggagctcttcttacatttgggtgggggctgtatggacagtgtggacaagggaatacagatgatgttttaagtccaacgtgtgtatcgtctatcctgggatccaagatgcaagacgttgctgcgggtctgtggcacactgtatgtacatccgtagatggtgatgtttattcctttggaggaaaccagtttgggcagcttggcactggttctgatcaggctgagactgttccaaaattggtagatgctaccagcctagagaataagaatgccagatctgtttcttgtggagctcgccatagtgctattataacagatgaaggcgaggtattctgctggggatggaacaagtacggccagcttggccttggcgactcaatggacaggaacgtgccttgcagtgttcctgtggacgcttaccaccccctaaacgtgtcctgtggctggtggcacaccttggtgctcgcggactcgcctacttgaaacctgacaaagaaattaccttagattgacaattttgttaggaactcgtaggctcgtgcagatgcggtgatgctgcatttcatcgtgtacatacatggcagtgcatgcagatatgtgtattcattctttggcggtgcactcttcaacctgtgcaacgtagacaaagcttgtatcgcaccgcgtatacagttgagtaggattgcctcgacaaattgtgcatttcctccgttgctgctaatgtacaaaattccacaagctagacagggcaaccgatgcgttcctcgttgcagaagacagatctccaaaataattaatgtttgtgtatcgtgatggttgcgattccgatattgtttggccgg

SEQ ID NO: 214374 - DNA, 2100 bp, Zea Mays
tcccaatccagcggcccagcgcgcgccacgtgtcaagaaccggccatgtcagcatccgatgtggcgcccccgccccgaagaaattgatacggccccaagcccccaaacctcgcggctctcagcctcacgcttggaaaagcaattgcccgccgctgccccattccgacgcaatcaacaccaacgccttgcttgcttgctccgctgccctctaccatctgcggtccggccgacagtgatcgaaatcggtggattcggagaggccaaggctcctggaggagatgaacggcagcggcggaggaggagagggagggggaggggcggttgttcctcttgaattgaatcggtgcttaaagttaaagctgagctcagagaggagaggtttccttagtgtgattttgctttaggtgtaacgttcgattaggaatggagtagggatttgattatgagtggacagtggtttcaatgctgaagagtctggaaaactcctcacttggggttctgctgatgacatgggccaaagttatgtgactgctgggaagcacgaggagactccagaggcttttccacttcctagaggcgtcgcaatagtgcgggcagatgctggatgggctcactgtgttgcaataacagatgaaggtgatgtttatacatggggttggaaagagtgtgttccaactggaagggttattggagaccaatcttcagttggaaccaaggagaaggatgaaagacaaatggcaatggccactgaccaagatataacaaaggcaactccattacagtgagccccaggtcgcaggtgtctaggacaagcagcggggcagcatctggtccttctgaaagcagaggcactgatgatagcacaaagcgacgaaggttgtcttcagcaaaacatggccctgagagctcgacatccagtgacgaaagtctttccgcacccccttgtgttgtgacatttaatacaggagtgaaaatagtgtctgtagctgctggtggtcgtcatacattagcactgtcagatttaggtcaggtatggggttggggatatggaggagaagggcaactaggtctgggctctagaatccgaactgtttcttctccccatcctgtaccgtgcattgaatcagcactatacagcaaggatcgcccatcagctatgaaaggtaacaaggctgctgaaggacatgtcagtaaagtcttgggaaattgtgtgagggccattgcttgtggaggtcgtcacagtgctgcagtaacagattcaggagctcttcttacatttgggtgggggctgtatggacagtgtggacaagggaatacagatgatgttttaagtccaacgtgtgtatcgtctatcctgggatccaagatgcaagacgttgctgcgggtctgtggcacactgtatgtacatccgtagatggtgatgtttattcctttggaggaaaccagtttgggcagcttggcactggttctgatcaggctgagactgttccaaaattggtagatgctaccagcctagagaataagaatgccagatctgtttcttgtggagctcgccatagtgctattataacagatgaaggcgaggtattctgctggggatggaacaagtacggccagcttggccttggcgactcaatggacaggaacgtgccttgcagtgttcctgtggacgcttaccaccccctaaacgtgtcctgtggctggtggcacaccttggtgctcgcggactcgcctacttgaaacctgacaaagaaattaccttagattgacaattttgttaggaactcgtaggctcgtgcagatgcggtgatgctgcatttcatcgtgtacatacatggcagtgcatgcagatatgtgtattcattctttggcggtgcactcttcaacctgtgcaacgtagacaaagcttgtatcgcaccgcgtatacagttgagtaggattgcctcgacaaattgtgcatttcctccgttgctgctaatgtacaaaattccacaagctagacagggcaaccgatgcgttcctcgttgcagaagacagatctccaaaataattaatgtttgtgtatcgtgatggttgcgattccgatattgtttggccgg

SEQ ID NO: 214375 - DNA, 1829 bp, Zea Mays
ataaaatacccttcagttcacaaggccaccacgcgcgcccaaaggcccccaaccccaaccttgcaggaaaagagagagagagagacgaccccccaaatcggaatccgcacacccccatccatggccgccgccctgctccgccgctcgccggcggtgcgcgcgctcctctcgccggcactctcgtcccgcctcgtcgcgtccaagccccactcctcgtcccccgcgccgccgccacctgccaaggccgcctccagcacgaagaccttctcgatctaccggtgggacccggactcgccgtcgacgaagccgcacctcaaggactaccaggtggacctgtccgactgcgggccgatggtgctggacgcgctgctcaagatcaagaacgagcaggacccgtcgctcaccttccgccgcagctgccgcgagggcatctgcgggagctgcgccatgaacatcgacggcgacaacggcctcgcctgcctcaccaagatctccggcgcctcctccgcgtccacggtctcgccgctgccccacatgttcgtcgtcaaggacctggtggtggacatgaccaacttctacagccagtacaagagcgtcgagccatggctcaagcgcaaggaccagcccccgcagcagggcaaggagatcccgcagaccaaggccgaccgggccaagctcgacggcatgtacgagtgcatcctctgcgcctgctgctccacctcctgcccgtcctactggtggaacccggaggagtacctcggcccggccgcgctgctccacgccaacaggcttccgctgtgggggacgcttatcaaaccgaaacccaacatgttcatgcaccttcaagctcgaggatatcacggggtgtcagagaagagaaacctgcgggaccacaaacgtagactgcttgcagaaaaatatgagctaagaggaaagatgtataaggccgtctgtagggaccctgatcttccattggatatgcgggagaagttccgctataaactgtccaagttgccaagaaatagctccatgacacgtcttagaaaccgctgcattttcacaggacggtctcgcgctgtctacaagaaatttcgcatgtcccgtatcgtgttccgcaccttggcaaacaagggtgaactgatgggcgtaaagaaggcatcgtggtagatgctaaagagccagtagaaaaaggcgctagctctgcattagtccaggaaaataaggtggatacaggacagccgtgaccagttcaccaaggagcgcctggacgccatcaacgacgagttcaagctgtaccgctgccacaccatcaagaactgcacgcacgcctgccccaaaggcctgaacccggcaaagcagatcgacacgatcaagaagctccagttgggtgccccaagtgcctgaaaccgagcgtgtcttcccttgaaaacggtcgtggaacagacctgtggaaaaaattgggatgaacttgccacttatttcgttgttgttgttgttctttggtcttcgcgcggtggtttctacctgccaaagacgaataattcccggctggggcccctccagtccactccacccatgcttttgtgtcaggcggagcggacgtagagcatagggagtgaataaccgctaccttatttcatttctatgatgtatctatctaatttggtcctcccctgataatgcacgacccgtagtgttaacaggcgtatttggaccttcaggaagtatttggacatggcaaatgtattttggaatgctcttatctaccgtgagatgcgaaaggaactatagcgtaatggttatggatttccactagcatcttctggtcc

SEQ ID NO: 214376 - DNA, 2588 bp, Zea Mays
cggctgcgagagagtgcggcaggggccgtcgcctttcggtttactctcccactgcccaagtttaaaaatagcaagcagagaaagagacaggccgcaaacggagggagagaagaagagacacggaggagaggagaggagcgggctagccagtctcgatctcaggttctcaagaaagaccctgcagggagagcgatcaaaaaggctgccggcacggccgggtagcagctacaactacaagctggcctatagctagctagctagctatagctgctacagccgccgagctcgatcctcggactcggactgcaacgaggaaggagaggaaatggtgggctccggcgcggatgggggcggcggaggggatgacgcgcggagcaaagaggccgcggggatgatggcgctccacgaggccctccgcaacgtctgcctcgactcggactggacctactccgtcttctggaccatccgtcctcgcccgcgctgccgcggcggcaacgggtgcatggtcggcgacgacaacggcagcctgatgctgatgtgggaggacggcttctgccggccacgggtggcggagtgcctggcggacatgagcggcggcgaggacccggtgcggaaggccttcatcaagatgtccatccaactctacaactacggagaagggctgatgggaaaggtggcctctgataaatgtcacaaatgggtcttcaaggaaccttctgaatgcgagcccaacatctccaactactggcagagctccttcgacgcacttcctccggaatggactgatcagttcgcatcaggcatccagaccatagctgtgatccaagccgggcatggcctcctgcagctgggctcttgcaagattatacccgaggacctgcacttcgtgctgcggatgcgacacacgttcgagtcgctgggctaccagtcgggcttcttcctctcccagctcttctcgtcggcgcggggcgcctcgccgacgccgcctcctccggccgcgcgtcccccgccggcgcagcttttcaactggccgggcgcccaccagccgcagctcttcccgcccggtccgggcgcgttccaccacccgtcggcgcgggcgatgccgccattgttcccaggcggcggcaaggacgagggccacatgttccacattccaccggcacaccatggcagcaagccactgcacatggacgagctccagcaccggcaccagcagacgatgggggccggtggcgaggcgcccgacggtgaactccggtggcccaacgggctgtccttcttcaccgcgctcaccgggcgagacgacgacgcgaagctgctattcggtggccccggcgccgcggacgacgagaaggcggcgccggacgcgcagaccgggcacggcggggctgggaacgtggaggagtacctgagcctggagagccactcggacaaggcgccgagcaaggtggagaacggcgcccagcacagcaccaagtccaagaggagcttcacgttgcccgcgcgggtgagctcgtccacgaccacgtccccgtccgtgtcggcctccacggcgccgcaagggatggagtaccgagggacgcacgagggcggcgtctactcggacctcatggagacgttcttggagtagctagctagatccgtagcatgcatgatcggttggttcaagccttcaaggtcactacaacaacaagtgcacgcttctttttttttcttttcctcaccgccctcccaagtcccaagctttgttttaggtctggagttttaatcgcataatatctttaattagatttgtatgttctttgtttttttcttcttttctcctcttcttggaaaaaaaattctttgcataccagatgcaaagcccaacttttgcagcccctcacataccccattgctggtccatacaaataaattaaaaataaattactaaagggttattttgtaaattttgatctgtctttgtgggccttcaagtggtatatgtgaggggctgcaaaaggtagagtttgcatccggtatgcacagaattttttccccctcttcttatagttgcattgcagcagctcgatcgtaacgctaaaaaaaacctttgatggatacatgcatgcatgcaagcaagaagggcatgagtttgcttccatgatggctggcaattgtatggtgcattggtgcaaccgccatgatggcgaggtacaatgatatgcaacaccccaagattatgggcctttttttcgcgccaaaagctatcttggtcacaacactgttgcccacttattgcaggctccgttctgcacaagcatctgtgttgtaccttcagctgcatgcacacaagagtaacagctaggacagtatgatctcagtcaaaccttgttgtccttgtgcatggtcactcaaatgcaccggaaaatttcatctgcatggattattagcactgttcatgaacactgactagttaacctgctcaccaccctacaagatattattatgtactctcgagtcatttgcatacacctctgattcgctctagcttcgtcacttattgtaagaacgtgtcatgggacctattgacgaaagttccatgaaat

SEQ ID NO: 214377 - DNA, 3788 bp, Zea Mays
ctcagataggagaaaaaaaaactactgctacaaaaacatgcatggggtgccgcgcagtgagtcgggagtccgttccttcctattcgctctgcgtctgcggctgcgagagagtgcggcaggggccgtcgcctttcggtttactctcccactgcccaagtttaaaaatagcaagcagagaaagagacaggccgcaaacggagggagagaagaagagacacggaggagaggagaggagcgggctagccagtctcgatctcaggttctcaagaaagaccctgcagggagagcgatcaaaaaggctgccggcacggccgggtagcagctacaactacaagctggcctatagctagctagctagctatagctgctacagccgccgagctcgatcctcggactcggactgcaacgaggaaggagaggaaatggtgggctccggcgcggatgggggcggcggaggggatgacgcgcggagcaaagaggccgcggggatgatggcgctccacgaggccctccgcaacgtctgcctcgactcggactggacctactccgtcttctggaccatccgtcctcgcccgcgctgccgcggcggcaacgggtgcatggtcggcgacgacaacggcagcctgatgctgatgtgggaggacggcttctgccggccacgggtggcggagtgcctggcggacatgagcggcggcgaggacccggtgcggaaggccttcatcaagatgtccatccaactctacaactacggagaagggtgggtactatactgggtaggtgctgtgcaggtgcaggtgcaggccgtcgagttcggtcggagtcgtgtcgtgtgcaatttctttccgactttccaatctccactcccggcttagcttagcttagcttatggcactactagtattaggcggtaattatggtgtgatgtagacacgtacggcgcccattttttttcaagtcgtggctgctgctgctgctgctttctgcgaggatcaagcacgggcgctgctgtcacgtgagggaggggacacggctggagtggggcggtgcctcgtgaggcttaaacaatcccacccgcgtcagtgggctataacagccggatcagctcgtgattaacatattcacgattgtgctacgcacgctacatgcacagccaggtgctacacggcgtcgggggcagtgtcttttttttatttatcttagaggacgatgtgaaatgaaagagcgacatgtcgtcagagttgcgtgtcacacgttagctgtcagtcagtcagtcagtcgttctgtgtatttttgtgtgtgtctcggcctcttttgatctcgctttgctgctgtaccgagatttcggaggcatacaatacatacatgagtcatggacgataatgtgctaatagacagacccatgggtccgtttgatttggaccgtcgctcccgcatgcaggctgatgggaaaggtggcctctgataaatgtcacaaatgggtcttcaaggaaccttctgaatgcgagcccaacatctccaactactggcagagctccttcgacgcagtacgtactatcagcagcagctgtgcctctgcacccgcttctttctctttctgcactctgtaacgtacacgtactccatccccacctgttccaaaacaaagggtacttctcatttactaatgggttaaaagaaaatgtttccaatttcaattatgtatgtgttaatatccacagtatacagttaatatcattacatagatcagtaaatctattttttataatggatttgtttaaaggtataaatattattaaaatttagatataaatattattaagattcattacaaatttagtttttggagattttactttcatccatccttgtacacatccccgcggagctctcagacttttgcatcagatctgctccgcgaaaagaagagaagaattggatgctccgtcagagcagcaatcgcctgtctgtctgtctgtctgtcaccaagaattaacgccacgaacgcagtaacctttattccctctcgatcggcttttgcttttgcagcttcctccggaatggactgatcagttcgcatcaggcatccagaccatagctgtgatccaagccgggcatggcctcctgcagctgggctcttgcaagattgtgagtgccaactggaggccctctctacctccaccacctgtgtttctatgcttgaccttttgttttgtcgtttcgtttggtcgtcgaggacgtctcacggaagcgtaggcaggcgagctaggctaattaacagcgacgtgacactgtgcgcgcgcagatacccgaggacctgcacttcgtgctgcggatgcgacacacgttcgagtcgctgggctaccagtcgggcttcttcctctcccagctcttctcgtcggcgcggggcgcctcgccgacgccgcctcctccggccgcgcgtcccccgccggcgcagcttttcaactggccgggcgcccaccagccgcagctcttcccgcccggtccgggcgcgttccaccacccgtcggcgcgggcgatgccgccattgttcccaggcggcggcaaggacgagggccacatgttccacattccaccggcacaccatggcagcaagccactgcacatggacgagctccagcaccggcaccagcagacgatgggggccggtggcgaggcgcccgacggtgaactccggtggcccaacgggctgtccttcttcaccgcgctcaccgggcgagacgacgacgcgaagctgctattcggtggccccggcgccgcggacgacgagaaggcggcgccggacgcgcagaccgggcacggcggggctgggaacgtggaggagtacctgagcctggagagccactcggacaaggcgccgagcaaggtggagaacggcgcccagcacagcaccaagtccaagaggagcttcacgttgcccgcgcgggtgagctcgtccacgaccacgtccccgtccgtgtcggcctccacggcgccgcaagggatggagtaccgagggacgcacgagggcggcgtctactcggacctcatggagacgttcttggagtagctagctagatccgtagcatgcatgatcggttggttcaagccttcaaggtcactacaacaacaagtgcacgcttctttttttttcttttcctcaccgccctcccaagtcccaagctttgttttaggtctggagttttaatcgcataatatctttaattagagaattttttccccctcttcttatagttgcattgcagcagctcgatcgtaacgctaaaaaaaacctttgatggatacatgcatgcatgcaagcaagaagggcatgagtttgcttccatgatggctggcaattgtatggtgcattggtgcaaccgccatgatggcgaggtacaatgatatgcaacaccccaagattatgggcctttttttcgcgccaaaagctatcttggtcacaacactgttgcccacttattgcaggctccgttctgcacaagcatctgtgttgtaccttcagctgcatgcacacaagagtaacagctaggacagtatgatctcagtcaaaccttgttgtccttgtgcatggtcactcaaatgcaccggaaaatttcatctgcatggattattagcactgttcatgaacactgactagttaacctgctcaccaccctacaagatattattatgtactctcgagtcatttgcatacacctctgattcgctctagcttcgtcacttattgtaagaacgtgtcatgggacctattgacgaaagttccatgaaat

SEQ ID NO: 214378 - DNA, 998 bp, Zea Mays
agaaacgatagtaatgcagagagaagcaagagaaggcataaataggtagtgtagaccaggcgcttttagtagaagagagcattaagcatgcaaaagaagctattatgctggatattagagatggcaattcttggtataatatgggcaatgcttatctcactagcttctttgtgggaggagcctgggatcacactaagcttcatcattcagtgaaagcatatcaaaatgctgagaaggataaaactatgaatttaaatccagacctctactataattgggccacaggacaattacgatccaaaagattagcatcatttgtgtcatccttgagtggagtcaaattgaaatcatcgcacaagaaagccaccataagcactctatcagtgggtttgaacaaagccgttgctgttttgggaaaagtaattctgttcataagacatgacaatgttgctccgctgtattatttaatatgtgacttggaacggtcatattttatactgtcagtgtatgggctacataatgatgcaattaaagacggtgatcaagtggtattatttgaaccatactaccgaatccttgatgcatcatgtaaagacaagcactatcagttcaaatcaatacgagtggactttccagaacaaattctagttaacgagagagttccagcacctcatcatgttgcacgggcatcaatccatgcacacaacaaatcttgaccgggtactgtgtggcgtcaataccgtgagcaactgccagctgggcatatcatgtgtactcgcgtaaatgtgtagtgacatgttaccctatggctcaaaatgtgtaaggaagacttgggaacatattaaccatctcatttctccaattttcgttagttgttttcatcaaccttagaccatgatgacacctcaagccgtaagaatcacaagtagtttgcgtgcgtccatgcacgtgtgaagtttttacaattccacataataattgattccagacaaaaaaat

SEQ ID NO: 214379 - DNA, 1278 bp, Zea Mays
gggtcttgcaggcgcagtttgaagttagtctgtttgctggcctctgaacaaaagaagtctcgacaactgcgtggtgtttatgaatttttgaggggaaaaatactggatgtctttcctgattatcataaggaggctgaagatcatttatccaaagcagtaaagttgaacccatctcttgtagatgcatggttatgtttgggtaactgcatttggaagaagggggatctatctgcagcaaagaattgtttttcattagcactaagcaagggttcagataagaaaatactgtgccagatctccatgcttgaaagaagtatggctcaaggtagtgtagaccaggcgcttttagtagaagagagcattaagcatgcaaaagaagctattatgctggatattagagatggcaattcttggtataatatgggcaatgcttatctcactagcttctttgtgggaggagcctgggatcacactaagcttcatcattcagtgaaagcatatcaaaatgctgagaaggataaaactatgaatttaaatccagacctctactataattgggccacaggacaattacgatccaaaagattagcatcatttgtgtcatccttgagtggagtcaaattgaaatcatcgcacaagaaagccaccataagcactctatcagtgggtttgaacaaagccgttgctgttttgggaaaagtaattctgttcataagacatgacaatgttgctccgctgtattatttaatatgtgacttggaacggtcatattttatactgtcagtgtatgggctacataatgatgcaattaaagacggtgatcaagtggtattatttgaaccatactaccgaatccttgatgcatcatgtaaagacaagcactatcagttcaaatcaatacgagtggactttccagaacaaattctagttaacgagagagttccagcacctcatcatgttgcacgggcatcaatccatgcacacaacaaatcttgaccgggtactgtgtggcgtcaataccgtgagcaactgccagctgggcatatcatgtgtactcgcgtaaatgtgtagtgacatgttaccctatggctcaaaatgtgtaaggaagacttgggaacatattaaccatctcatttctccaattttcgttagttgttttcatcaaccttagaccatgatgacacctcaagccgtaagaatcacaagtagtttgcgtgcgtccatgcacgtgtgaagtttttacaattccacataataattgattccagacaaaaaaat

SEQ ID NO: 214380 - DNA, 1848 bp, Zea Mays
gccgtcccattttgtaagctccccttccccgtctggccgtctcgactgccccagtcctttctcagatccatgtctacccagaatctgctaactggcgcgtgcacgagctccgccccggccccgtccgaggcggaggaaggggacaggacgcctttggctgacgctgcgaacgcggcggaagagctgtaccgcctccgtgacacctttttcccccgggacccttccgagaaagtcgccgcactccgcgcccgcgccgacgccgccctcgcgctcctcgacgccttcccgtccgaacaaaagaagtctcgacaactgcgtggtgtttatgaatttttgaggggaaaaatactggatgtctttcctgattatcataaggaggctgaagatcatttatccaaagcagtaaagttgaacccatctcttgtagatgcatggttatgtttgggtaactgcatttggaagaagggggatctatctgcagcaaagaattgtttttcattagcactaagcaagggttcagataagaaaatactgtgccagatctccatgcttgaaagaagtatggctcaagcaaagacatctagaggcaccagtgcctagtaggatcctaagaaacgatagtaatgcagagagaagcaagagaaggcataaataggtagtgtagaccaggcgcttttagtagaagagagcattaagcatgcaaaagaagctattatgctggatattagagatggcaattcttggtataatatgggcaatgcttatctcactagcttctttgtgggaggagcctgggatcacactaagcttcatcattcagtgaaagcatatcaaaatgctgagaaggataaaactatgaatttaaatccagacctctactataattgggccacagcagacaaatatttagagaattatgaaagggcccttcgtggttttgaagttgcagctttaaaagatcccgggcttggtgctaatacagaagttcagaagatcatcagtctccttgataagcttgataatgcaatgaagggacaattacgatccaaaagattagcatcatttgtgtcatccttgagtggagtcaaattgaaatcatcgcacaagaaagccaccataagcactctatcagtgggtttgaacaaagccgttgctgttttgggaaaagtaattctgttcataagacatgacaatgttgctccgctgtattatttaatatgtgacttggaacggtcatattttatactgtcagtgtatgggctacataatgatgcaattaaagacggtgatcaagtggtattatttgaaccatactaccgaatccttgatgcatcatgtaaagacaagcactatcagttcaaatcaatacgagtggactttccagaacaaattctagttaacgagagagttccagcacctcatcatgttgcacgggcatcaatccatgcacacaacaaatcttgaccggtgaaaatttggtattgtgatttagttggtagccagtacttattttgtttttgatgtttattagacttattacaggaaaaccattctgcaagtttttatcagggtactgtgtggcgtcaataccgtgagcaactgccagctgggcatatcatgtgtactcgcgtaaatgtgtagtgacatgttaccctatggctcaaaatgtgtaaggaagacttgggaacatattaaccatctcatttctccaattttcgttagttgttttcatcaaccttagaccatgatgacacctcaagccgtaagaatcacaagtagtttgcgtgcgtccatgcacgtgtgaagtttttacaattccacataataattgattccagacaaaaaaat

SEQ ID NO: 214381 - DNA, 1551 bp, Zea Mays
gccgtcccattttgtaagctccccttccccgtctggccgtctcgactgccccagtcctttctcagatccatgtctacccagaatctgctaactggcgcgtgcacgagctccgccccggccccgtccgaggcggaggaaggggacaggacgcctttggctgacgctgcgaacgcggcggaagagctgtaccgcctccgtgacacctttttcccccgggacccttccgagaaagtcgccgcactccgcgcccgcgccgacgccgccctcgcgctcctcgacgccttcccgtccgaacaaaagaagtctcgacaactgcgtggtgtttatgaatttttgaggggaaaaatactggatgtctttcctgattatcataaggaggctgaagatcatttatccaaagcagtaaagttgaacccatctcttgtagatgcatggttatgtttgggtaactgcatttggaagaagggggatctatctgcagcaaagaattgtttttcattagcactaagcaagggttcagataagaaaatactgtgccagatctccatgcttgaaagaagtatggctcaaggtagtgtagaccaggcgcttttagtagaagagagcattaagcatgcaaaagaagctattatgctggatattagagatggcaattcttggtataatatgggcaatgcttatctcactagcttctttgtgggaggagcctgggatcacactaagcttcatcattcagtgaaagcatatcaaaatgctgagaaggataaaactatgaatttaaatccagacctctactataattgggccacaggacaattacgatccaaaagattagcatcatttgtgtcatccttgagtggagtcaaattgaaatcatcgcacaagaaagccaccataagcactctatcagtgggtttgaacaaagccgttgctgttttgggaaaagtaattctgttcataagacatgacaatgttgctccgctgtattatttaatatgtgacttggaacggtcatattttatactgtcagtgtatgggctacataatgatgcaattaaagacggtgatcaagtggtattatttgaaccatactaccgaatccttgatgcatcatgtaaagacaagcactatcagttcaaatcaatacgagtggactttccagaacaaattctagttaacgagagagttccagcacctcatcatgttgcacgggcatcaatccatgcacacaacaaatcttgaccggaaaaccattctgcaagtttttatcagggtactgtgtggcgtcaataccgtgagcaactgccagctgggcatatcatgtgtactcgcgtaaatgtgtagtgacatgttaccctatggctcaaaatgtgtaaggaagacttgggaacatattaaccatctcatttctccaattttcgttagttgttttcatcaaccttagaccatgatgacacctcaagccgtaagaatcacaagtagtttgcgtgcgtccatgcacgtgtgaagtttttacaattccacataataattgattccagacaaaaaaat

SEQ ID NO: 214382 - DNA, 1098 bp, Zea Mays
cagagatatatcgcagggaacaaaacacaaggaggccaccagccgtagccgacacatggacacgcagcagagcgtcgtcgccgccgcgatccagtccagaggcatggtggccgccgccgcaaaccaccccgtgagtgtggcggcggtagcgagcggcccgcagcttgttccgtgcacgtggcggccggcgaactcggggacgcgccccggcagcgcgcggctggtcgtccacacgccgctggccggcacgcccggaagcaagtcccggcggttcggcaggcggcggcgccgtggctcgatccccggagggtggtcctcctcttccccacgctgtccagcgtgggaacgctgatcctcctctacttcacgctatccatgagcagggcggacaccagtagtggcggcgccagcgacgctcggtgagacgccggcggtcgaaagcgaagggggcatttttgcctcgtctgagaattttcaaacttgcaaagattgacaagaatcaatacaagtagggccaggcatatcgacggtgaagagatcgagccggctggggattttgtggacaagtttgtgatggtagacatacttgtttcttcttgtattatctctctctctctctccttttttttcggattctctcaaaaagggatacatgtcgctttacagcgtaacagataatactgaaatttttactcccctctgatgctaaaaacacaaccaaaccattttcgccacatgtcttaacagggatggccaattgtctttgagctcggatgccgttcattcaacagtggtgtgtgtgtatttgttccctgaacctaacctcaacgaacaaacaaaccatgttgcaaatcacaaggggtgatccaagataatttgggaccctctatgcacactggcattaagaacaagttcaataataaagtcaagcgcttcactattgagtcaaattatagaatagtagtctcctaattgtgcataagaatttttttattgttaatttacccatgttccactttctctttctcctcacatcgttgtgttgttgagtggtggcccaccactatatagactctcgtgtccaacttagggtttgtt

SEQ ID NO: 214383 - DNA, 1246 bp, Zea Mays
gaacggcaccgccgcggtgctcgtggacgccgccccggccggctgctgcacccccgcctcgccggcctcagcgtccatctccgaccaggacgagagcactgcagcacagcagggcggcgggtccgcacacgcgatggcgcgaagacgacggggtttccttccctcctcgagctcgaggtcgaggaccgaccgagaggctcggacggcgcggcgccgtgcgcaggggcagggctcgtcacgggcgcgctggtacttgctcagatggtgccgtgtcagaatacgcgcacaagtcagggggcaatctgcaaaccagacatccgatgctgcgtgagtggacgagagggctccggctcacatctgctgcgcccgccgcagcaagacgcgccggaggaggccaagcaagcagctctagtcttcgtcgcgtgcggctctcgccggtggcctgcagcagcagcagccatgatgatggcgtgtgccctcgccgtcgcccagccagcagcatctctcgcgccgccatccggcaagaggaccctctccggcggccgccccccgcggctgccacctcccaggctttcaggcaagctaataaggagccgcgctgtcgttgccaaggctgcgcaggacgggtcggaatcgtccgggaccgggagcatagtgaaatacgtcacgagctctttcagcaccgcggaagacattttcgccctagctggtataggctttgccgcagtagctgcattatgggcttcggtcaacctcattgagatcatcgacaagctcccggtccttcctcttctctttgaactagtcgggatattggttgcatggcttttcatctacaacaatctcctcttcaagccaaaaaggaaagaatttctagagaacatcaaaagctcaggatctcgaatcctggggcagtaacctttgtaggcgacagttgacagcaaccactctgtcatgggttctctgcaagcatgccgaatgtaattatgcaatgtaactgtatgcgagctatgggtgttaacattttttattgtataagcatcaccaattttctgtacaggttagtgtgattaaaatcgttctcctagtaccaggacttggacttgtacgagcctaataagaacatacgcccgaatccttcctgaactgaatgcttcggctattgaatttcacgttcaagggcgaagggggtattttacatctaaaattatggaaaacaacgcaacaaagacgaaaaaggtgccaa

SEQ ID NO: 214384 - DNA, 1287 bp, Zea Mays
gaacggcaccgccgcggtgctcgtggacgccgccccggccggctgctgcacccccgcctcgccggcctcagcgtccatctccgaccaggacgagagcactgcagcacagcagggcggcgggtccgcacacgcgatggcgcgaagacgacggggtttccttccctcctcgagctcgaggtcgaggaccgaccgagaggctcggacggcgcggcgccgtgcgcaggggcagggctcgtcacgggcgcgctggtacttgctcagatggtgccgtgtcagaatacgcgcacaagtcagggggcaatctgcaaaccagacatccgatgctgcgtgagtggacgagagggctccggctcacatctgctgcgcccgccgcagcaagacgcgccggaggaggccaagcaagcagctctagtcttcgtcgcgtggttccacccacccccacacgcatcacccaccgcgcgccgcctcgtgcgtgcctctcaattccgtctcgttctgcagcggctctcgccggtggcctgcagcagcagcagccatgatgatggcgtgtgccctcgccgtcgcccagccagcagcatctctcgcgccgccatccggcaagaggaccctctccggcggccgccccccgcggctgccacctcccaggctttcaggctgcgcaggacgggtcggaatcgtccgggaccgggagcatagtgaaatacgtcacgagctctttcagcaccgcggaagacattttcgccctagctggtataggctttgccgcagtagctgcattatgggcttcggtcaacctcattgagatcatcgacaagctcccggtccttcctcttctctttgaactagtcgggatattggttgcatggcttttcatctacaacaatctcctcttcaagccaaaaaggaaagaatttctagagaacatcaaaagctcaggatctcgaatcctggggcagtaacctttgtaggcgacagttgacagcaaccactctgtcatgggttctctgcaagcatgccgaatgtaattatgcaatgtaactgtatgcgagctatgggtgttaacattttttattgtataagcatcaccaattttctgtacaggttagtgtgattaaaatcgttctcctagtaccaggacttggacttgtacgagcctaataagaacatacgcccgaatccttcctgaactgaatgcttcggctattgaatttcacgttcaagggcgaagggggtattttacatctaaaattatggaaaacaacgcaacaaagacgaaaaaggtgccaa

SEQ ID NO: 214385 - DNA, 1787 bp, Zea Mays
ccaatgggcaatgctccccgaagccgaagcggaacgaaacggtccacacgctggctagcccccgtcccgactccgaaatccgaatccatggccgtcctccgcgcgtcgccgccgccctttctcccccatccgctctcgcgcccctctcagtgcaagcggcgccccacctgccgcgtggtcgcagccacagccagacccagtcctgctccttccaggcccaggagcggcggcgtccatggaggccgccccaagagggggcttcttgcggcaaggagaaggccggcggaggggcgggtgccctgcttgcgggccacggaggcgggggtcggtgcggcaggcgtcgcgaaggaggaagacgagtacctggcgcgggaggccgggtggggcgtgcggcggatggcacgggttggggaggagatgcggcgggtggcgcaggtccaggccgaggccttccacgtccccgtcgcgctcttcaacgacttcttcttcgacttcttcaaagccgaggtgctgtcggcgctcatctacagagtgaggaactcgccgcctgacaggtgcgatcaatgctcttgattgctgtgctacttcataacgctggtagcaatgccaaatagtacttgtactggattttgattagaaagtttaatttgtctagagcaacgtggtggtgtttttggtaggagttcttattcgaatgaacaagttaatgtaatgttcaaatttacatgttctctgatcatatattttacacctgaaatgcattcttgttgctctcaatctgtgctccgaaggcggcaaacatctatgtttttgggtttttttttgtaccagtatatcatcaatcttagttcggtagtgttatgtttgtcaaagacagtaatttaaatcaattgacatttgccatttagtatcgaaataatcccaggcatctgatttactggcaagttattacgttgtgcctcatgacccttctgctaaaattgcaattgacatgtgttggcctgcaggcttcgttaaatccacgcgttaggactagtcgatgcctgaaccttatttagttcgctaacaatgccgcctacaccaactgaactctgttctccttagatacgcttgtttggtggctgaagaagctgaggcagccgaccagccgtcaaaggcaccatatgagaagatcgtcggggttgtggattgcacggtgcaggacgaagacggcatcctaaagcaccttcgaggcgcggatgaatacctctacgtgtcaggaattgcagtcttgccaccattcaggaggaggaaggtagggaccgcactgctgaaggcctgcgaggcactggggctccaatggaggcacgtgttcatggttctgagggcgtacgaggatgacgacggcgctcgaggcctctactccaaggcagggtacagggtcgtgtcaagggatccagactgggtctcctgggtggggaggaggaggcgagttgtcatggtaaaggagctgccggttcacgatgatcaatgacgccggcacggttttgttgaatatgtgtgtgtgtgtcaccagctaatttgtactgtttcttgtccatattcgcggcatcatgcatgtctttttggacaatagaggagagacagttgcctatcttcccaccaaacacaaaatgaaaattgagaagttacagttgacaagttccgtttcagagtctgccaccggcaagtgtacagtatcagctgtattttgcgacattacacaagcactcgtaagcacatacagatagcatatggcacaataattt

SEQ ID NO: 214386 - DNA, 2489 bp, Zea Mays
gatcgctctgctctgccctcgataaaccccgcagtcccgctcccgcaccgccgcggcaagagcgagccggccacccctcgctggctccctgcatccgccgcccgaacgcatgaacctggtgacggtttcagtctacgttcctagcccgccactgcctactataactaggcctccaccccgttaccccgcggctgcagcgcccacacagtacacaccgccctcaagaagtagcagcagcggcgagggtgagccgggcactgggaggcgcgcggcgtgcgtgggctcgtctatcgccgagctccaggaaaccgcagggtttcgccgcggagctagattgtgcggggttccagtgtcaagccctgcctgcactgcgcatcctgatcgtgcacattctttggctttctcttctcctggataccgatgaaccaagtactcaagcagcaggcaattgattgatgttggctccatctttctatagcatcaaaatatgccatccagaaggcctcaaaagtactggtgtaaaatctgcaataagaacttcccttcagggagggttctcggaggccacatgtcgtgccaccggcatgctggcaagcagctgaagagcactcctgaccttgtcgtcaatctgcctgtgcccctgctgggttccagtgatgagaagtcttcactgtcatctttagaatctcaaagcctgcactgctcaaaggtgttatcttcttgccaatctccgaggggggacttggggattaacagtgagaagaaggtggtgacaaagtctgaagaacctgaaccagctgggttgatggaatcttgggccaatggtaatggtgatcatgggcacagtgtgatgctattttctccagtgaagcgtaagcgatcaaaaaggatgatgccagtcctcaaatcagagatggacgctgcagttgctctcttgatgctggcagagcattctgacaagacttctgcttatgaggattgctgtgggggagataaggatcgcaacatttcaacacccatggtgtcgaaggagataaatctgaatgcttttgatcagctggttcaatctgacgagtccacaaacagtgcaaggctgcaatctgacaagaatccagcttatgagggttttgatgaatactgtgagaaggaaaaggaaaacagtttgaatttggctgctgatgatcccaagaaggaagtgctgttggatgtgtttgattatgagatggatgtagatgctgagttcatgaagccaggggatggcatttcagttgaggagttgaagtccagtgaactttcagctgaaacgaacatcaagaggtaccagtgcaaggtgtgcagaaagttattaagttcaaggtatgcattgggatgccacattaggttacactgtgagaaggaaagcagtttgaatttggtcactgatgctcccaaaaaagaagtgctgcttgatgtgtttgatcatgggatggatgtagatgctgagtttatcaagccagggactgacatttcagttgaggagttgaagtccagtgacctttcagctgcaatgaacatcaagaagcaccagtgcaaggtctgtagaaagttactgaggtcaggacatgcattgggaggccacatgtcgctacactttaagaagaagaacaagttgaattcgggtgttgatgttccaaaggaggttcttctggatgcatttgttcatgaggttgatgcagatattgagttcatgaagccagctacagatttggagttgaaatccagtgacatttcagctgcagtgaacgtcaagacacaccagtgcaaggtctgtggaaaggtatttgggtcagggcatgctttaggaggacacatgaggttacactatgttcggaagagcaatcctcaacaagaggttgctgattgacctgattatgttgtgatggaagagcaaatacagaagcttgaattggatcctctccttttttatctacggagaccacattcacatggtacaaattaaatctgattctgagccatagtgtgtgctgagcagctttcagcaggctgtgtgggcctgtggccaaacctggttccacattttgtccaaaacagatacctattcagttactgatagattcattagtggttaggaaactaaagaactccatctgttgtagacagtagagattttgatactgatactttcttctcttgatcaacaaattttgctggataggaaggcaagggtcttctttaagtcactgcctgattctgaaacaatgtagcaggtaatgtgtggtatcatgcagtgtaatgcaaagcatgagcttgtgataggtctgaagatccctcacagttctcattggctgtacagtgatattgttctgtacatagttacatacttatacagagcatattcttgtcttgaaataatagttcaatacaaatactcggatgaaaacttaaacaatctagctgttttttatccatttgccccttttgagtgttat

SEQ ID NO: 214387 - DNA, 3460 bp, Zea Mays
tactcgcttgctccggtgctcccctcccctccccctccctaacctgcctgccccgtcaaaaaaagaatgctactcctaaccttgagagacgtttgaactgcaaaccttttctgggagctatcattatactatcgcaatgtcaagggtaccaaaatggaagatcgaaaagactaaagttaaggttgtattccggctgcaattccatgccacaaatattccatcaacaggatgggacaaattatttttgtccttcatctctgctgatacgggaaaggtgagtgcaaaaacaaataaggcaaatgtcaggaacggaagttgcaaatggccggatcccatctatgaagcaacacggcttcttcaggatcctcggactaagacatacgatgacaagctatataagcttgttgtggccatgaagcactgaagccgacttcaatagcacttcctcttcgtggttctgacttcgggacactgttacatatcacagcacaacttctcactacaaaaactggtttcagagaatttgagcagcaaagagaaactggcactagaagctctcagcagttattgaaccaaagaagtcatgatcctgttgaagttgctgcggcctcatcagacattggcactgataaggttaattcgaggattaagctaaaagaaaattctttggggttccccttggctgaagattctgcagggtcaacagacgactatgaaaattcttcacatacttcagatggtatttttactgaaaagaatgatccacacggtgctcatgaaatcaatagctttaggagctcaaatgacttacccctttgttctaccagtcaaagtcctacaccagaaaaaggtgcccattgggttaaacatcttttatcacaagggagcaatgattgggctcatagctcaagtcctgggtattgtgctgataaagatttagctgcggctcatgatgagaataaccggctcaggacaagattggaggtggctgagtcagcattttctcagcttaagacagaagcaacatctctggagcatgttactgacaagttaggcactgagacacagggccttgctcaacagcttgctgttgaacttatgtcacgtaatcaactcactactgaagtgtccttgctaagaacagaatgttctaatctgaaacaagagttggaagaaataaaatcttctaaacacttacagaacaagtttgacgtagaaggtaaaactatgactaagtatggtaaggatattcttgctacagagtccattcatcatctccaaactgaatggctgcaaggtttgctacttcttgaaagtaaactgcagcagaccagaaacaatgccctccatggactacaagcaagtgatcttgattttcttcttgctgatctgggggcacttcaacgtgtcattgagaacctcaagcaaggtgttcagccaggtcaaatgaaagaaaatcacaatgcagaacatttggttccaattgctggttatctatcaaactcaggacatgatgataccatcaagaaaagttccggtggtagtacaggcacaatggaggagaaaatgtgtgagctcctgcagaagctggaggactcaaaaactgagaaggagaatctcctggagaagatgagtcagatggagcgctactatgaatcttttatccataagcttgaggagagccagaagcagacaacaattgaattagaaaatctcaagaaagagcataactcttgcttttatacagtttctgtcctacaagctcagaagcaaaaaatgcacgaggaaatgaatgatcaattaatgagatttgtggaggaccgaacagctttagaagctcaaaataaggagtttgagaggagggctgttgctacagaaactgcactcaagagggttcgattcaattattctgcagctgtggaacgtctacagaaagaccttgagttactgtcgtttcaggttctctctatgtacgagtcaaatgaaactcttgccaagcaatcattactagaagattttgatagtttgcctgaggaacactctgccgtggaagatttatgtggcaataatgaacatgagcaatacaggcctggtgtcaaacaaatcagacctgaaggtctatatgcagagaaagaaactgatggccagaaaaatcttattcgggcactcaagattgaagacctccgtgcgaggtcagagtttcaagcacatactgattcacgggggaaccactcaaacttggaagggccaagaagggcctatagtgctatggagtctgagcatttagagatgtttatttctaatatcgagtggcagatattctctgatgtattacgtgagtctcactatgctacattggatatcattaaatgcatgcagggaaggttggacgtgttagaaatgcagcttcatgactctaatgatgctaggcaatctctagtgctcaagttgaactctgcactggcccaagccaaaagtgtcaaagagagcgaagcaggatatgttttgaagtgtgatgatctgactgtgaagaaccaaatattagaagcaaagcttcatgatattacagttgaaaatgctttgcttatggaaaagctcacggagtctgaaagacttgttcaggaacataaaacttgtgaaagcaagtacaaggtctgtactgaggaagttacgagattggacaaccttttaatcaaagaaactctactaaccaaccagcttaaggatgagctcacttcactaagagaaagttttgaggccatgaaagatgcgttaaataagcaatcatccataaacaatgatatacaaatgatttctacatcccttcaagatcaactgggtgacctatgctctaaaattatatcttttaacaaggaagcaaacatttcaggcttagaagaggcatctttgctgcatgaacttgagagtaagaattacgctgctgtgatgaaaagattggaatccttccatcagcaaacatgtgacaaggtacttcatcttcttgaggagaaggaagtaatggaaaaaatgtgtgatgctcttcagagaaggtcagagaaggctgagacaaaattgcatggtatggagcagcagtttatatgtgatatggatgccacaaaacagaagctaaacttgtctgaggaaattgtagagaagcttcagcaagaactccaggacatggctcacaaacttaggatttgctccgattctcaagaaaaatattctgttaccaatggtgatttaacatcaaaattgtcacaaatggaaattgagctacatcatgcaactagtgagaacaaggctcttgttgaaaaattgaaagagtttagtgttactgtagaggaactcgagaggacaaaatggtgtcttgtacaacatgaggaggatacccgtacctttggaccagtcattacagtctaaacatgaaattgttatgcattatggagagcgtaatctaatg

SEQ ID NO: 214388 - DNA, 4349 bp, Zea Mays
gtctccacaccttcgtcctccgtagcggctacttgctcatcgccgcagcccgctggtaccggcggtcgctcgccggccagaaacagaatgtttcgatcgatctacgagatggagtgcgtagctgcaacgacgatagagtttcgatgtcgcgtcggtccagtgcctgctccgggaccaggtcaagcggataccggatactttcacgtcatttgagagttacttggattcgtttacttggccgctgattgaagaagtacatgctgatgtattctcatcgctagatggttattctgaggcaaactttatagaagtaacacaggtgggaaatcttgatgctagtaaaccaatactcggttttcgagttgcagaaccagtgaaggatgagaagtcaagggagacatatgtaccagtggagaatgatataattgtcctgtcctcacataagccaaggcatgtgtctgatttgacacaaaacaagtcatcatttgtgttaggttcggtaattaaaactggagaagaagatgggttccctccggactggtgtgttgttcacttgtcatctgccattctcgttgaggcagactgtcatacaaaaattccaaaaaggccactgtttcttgtgttccttataaatatgaagacatacaatcgcatatggagatgccttcatttgggacaaaattgtagtaatctctttgagcttcagaacaaaaagagtagtggtcccgtaactaaggcgtgggagttcaagccaaaggtgtgttggtcctatgcacacaaacccgcggaagcggaaagttcccaatgctcccaaccatctcaatgttttgatggtaggttgattgaatggcttggccttgagaaattcggtctaaatgattcacagttgaatgcagtgtcagattgtgtatcattaatggatagcaactcttcatctataaagctattatggggtccccctgggacaggtaaaactaaaactatcagctctatattatgggccatgctcatcaagggcaggaggacacttgcctgtgcacctacgaatactgctgtgttagagattgcggctcggatcgtcagtctaactgtgaagtcttcggatggcaccgtcttcctgaatgacattgttctgtttggaaacaaaaagaagatgaagatagataatgactattatctttcaaaggtgtatcttaactttcgtgctgagcgcctgttgccatgcttcaagtcaaatacaggctggaggcattgtttatgcgtgctgatagatcttcttgtcaattctgtgaccaagtaccagttgaacaatgaggataaaacattcaaacaacatttgaaagatgattacaataaactttctcggaatttacatagttacataactatactatacaatgatcatccaagaaacctggaaacaggacagagctttcaatgtatgctggaggtccgtgagttgctcaaaattcttcacactttgataaatgctggtaatggtggtgatatatggagcgatgaactgctcagaagcactatagaagaggaggtcaaccctgagctttggccttcacagctagcctgcatacggaccaactcatgcaataaatccaagtttgtggctgcaagatctttgtgtctgcaagaattaatatatctttgtaagaacatggagctcccaaattgttacagtgcacaagatgttcgactatacctgctgtcaagaactagattgattatctgtacagtttgtagctcattcaagttgtacaatatacctatgagaaattcttctccaagtttacatcagctgctaaacaaacccaaaatattgattcctctggagttgctgataattgatgaggctgctcagctcaaagagtgtgaaaccttaattcctctgcagttgcctggcataaggcatgctgttctcatcggcgatgagtatcaattaccttcccttgtgaagagcaaaatatctgatagtgctaactttggacgaagtgtttttgagaggttgagttccctaggctatagtaagcaccttctcaatatccagtacaggatgcatccagacattagcaggaaaactgtttaggccatattcatttataaatattgatggcagccatgaaacaaatgaaatgcatggtcggagccttaaaaactcattagaagtcgatgcagttgtgatgatagtgcagagtttgttaaaagagacgctttctacacgaagcaagctttctattggtgttgtgtgtccatacaatgctcaagttagagctatacaggaaaaggttgggaagccctgcaggaagtatgattatttctcagtgaaagtaaaatctgtggatggtttccaaggcgcggaggaagatataattatcatatcaacagtcaggagtaatggagctggtacagttgggtttctatcaaacttacagaggactaacgtggctctaacaagggccaagcattgcttatggattgtggggaatggaaccactctgttcaacagcaattccgtttggcagaagatcgtcaaggacacaagagatagaggttgtttttttaatgccactgatgagaaagagttgctgaatgcaattttcaagcctgctgttgagtatcctcatgctgacaatttagctaaacatgagcaacacggacagaatatatccgacttatcagctactgacacaattcagcaacttgcatgtcagtttacccctggaagtgatctcccaccaaagttctctatcacactcaatgttggttatactacaagaaaattcagttcatcaagcaccctgcttaacagctctcctttgcaactcacagcaacagcggtaccaaacgcagaaccagcttctcatggctcttcagctactggagcagttgaattgcctgtaaccgaagatgggcgcttggttgatgggaaaatctcctttcagaatactgtgaggagcactttgatcagaatcgaccacgaccctagacttgcatttgactttctggcagtagcaactacacgggagcaagcagcacctcttacccgggagcagtttaagaagcatgacagaatggtcgaatctcctgctccagttaccgctgagggttcggaatgctgcatcagactcaatgaacaggagcaagtagcacctcctaccaagctgcaatcgaagaagcgtggtagaaatgttaaagatcctgctgcagctactacaggggctttgaaatgcagcatcggactcgatgaaatagctacccgccagcaagcagcacctcctactcctgagcaatctaagaagcgtggtagaaagagcgaacctcttcctcaagttatcacagagggtttgagacgcagcagccgacttagtgaaaaaggcaagcaccatcaagtagcgccgtctcaggagcaagccaagaagcatggtagaaagggagcgacactttctccagttaccacagaggccctgagacgcagcagcagactgaatgaaaagggcacgcatcagcagatagcgctttctatcccagagcaagctaagaagtgtggtagaaaggccaaaaggcttcctcgagtaaccatagagggtttgaaacgcagcaaaagaatgagtagaaacaacagcgaagaattggctgatgtggattgcaatccataaatggcaaggaagcgacgcctacctgccgagtgccgactacatcaaaggaggttacaacagaattgtataggttgggacatgtctgcagcaagcaacatgatcgacccttctcgcactacaggaaactggttaaagaacgtgggtgaaaaaccgtcaaacttaatgtaataggccgtcgaacttaccgtaagaacgtgggtttaccgacgaatatagccgacggcgatttttggacgaacttagagaagtaagttcgacggtacccacgttcttaaccttaagaacgtgggtaccgtcgaacttaacattaagaacgtgggtaccgtcgaacttaacattaagaacgtgcgtttttaagttcgacgggggccgtcgaattttttcccataagttcgacagcacccacgttcttaaggttaagttcgacggggtcacgtggccgtcgaacttatgtgtcctgcagaggtctgcgcggaatgcacaataagttcgacggtacccacgttcttaaccttaagaacgtgggtacccacgttcttaaccctttttcagaaaaaaaaaataaaaacacaaaaatgaaaaattagacacataatatcatatgcaacacaatatatcacatacaatacatatttcaaacacattgatatatgttcatatcacaaattcacacaagttcca

SEQ ID NO: 214389 - DNA, 3504 bp, Zea Mays
ctctacgttgttccggaacattctgcttcgccgtcccgcgaccgcgagcaccaccgctagcataaaccggcgacgcgctattaatccaacccaaaagtcaggcatcactgcgagccaagtatagcaggcgcggaaaggggccaagggggcgagtggagttgctgcggtgcccgtctatcttcggggagcgtctggggttgccggcggggaggccatggaccggggtcgaagcgagagcggcctgcggtcgcacgggtccggcaaggtctcctctcggccggggtcggggtcgcttgcgttcccagaggagcaaccgatactagccgatcgcgacggcggcgaccgccgagaggttgtcgtgaagatcgatgggagcgggaacgggcacgcgccgttctccttccatggagcggacgcaggtgctgacggtggcggggggaaggcggagaatgcgacctccagcacgaactccacagcgaccacgccgcaggccgagagcaggtcgatgtcgagcgagaccaactatcctatgccaccggccaatgtgtgccggcgggaggggagctacgagttctggaacaatgacggcggcagcgccgaggcgttcagcttccagaaccgtccgccgcaggggccgcactcgtcgtccccttcaatatcgccgccgctgccgccagaagggggcggcatggacccacccgcccggctcaacggcagcttccaccggaagcaggtggcgtccgacggcgagatgtcgctcgacctcgacctggagatggacgagctcgggaggacggccgcgcagctgcgctcgcacccatccttttccagctcgctcgaaagggacgaccgcgtctcgttgcaggagccacaaaagcggcactccgcgtcgtcctgctcattcgattccgacaccggcgacggccgaaagcgccgcggcgacgacggcgaggtcgttcggtgcacgtcctcctctagtgctgcgggagcggggccgttgctgcgagtcaacacgcgctcccggctcatggacccgccgccgcagtcgcagcgggcgccggcacctgccgcgtcttctgtcgtcgacgaggagcgaaaatcttcaggcttgcggactcctacaaagtcgggccgcctcttctccaggcttatgtccggcaacaagtccggtcccattgctggcaagtcaggtcccatggacgacgaggaggacgatccattcgtggacgaagacattcccgatgacttcaagcgtgggaagctggacgctttgacggtcttgcagtggctcggcttgttccttatcatcgcggccttggcatgcagtctcagcataaagatcttgtccacgaagaaggtgctgggtttgcacctctggaagtgggagctcctcgtgttcgtgctcatctgcggccgtctcgtctccggatgggtcatcaggattgccgtcttcggtgtcgaacgcaacttcttgctgaggaagcgcgtgctctactttgtgtatggagtgcgcagcgccgtgcagaacgcgctctggctcggcctggtgctcgcctcttggcacttcttgtttgacgagaatgtccagcaggagacgaactctccagtactgccctatgtgacgaaggtactattctgctttcttgttgccacgctcatccgccttgtcaagacattgctgctgaaggtactggcctcctccttccatgtctcgacgtactttgatcggattcaagaggcattgttcaatcaatacgtcatccagacactctctgggccgccactagtagaagaaaaccatgtgcttgaggaggttcatgagctccaacgtgcaggtgcaactataccaaaggagctgcgtgatgcagtaccaaccaaacatgtatctgagcagaggaacattcagttatcaggggtcatgcctgagggacaaggtagcaagcagctgtcgaaagagaaaagggacgggatctctattgatgcacttaacaagctcaaccagcgaaatgtctcagcttggaacatgaagaggctgatgaggattgttcaatttgggacattaacgactatggatgagcagatacaacaggcaagaggtaagggagatgaatcagcaacacagatacgaagtgaatatgaggcaaagatagctgccaagaagatctttagcaatgtagcaaagccaggttccaagtacatatacttgtcggacttgatgagattcatgaggcaggaagaggctgttaaagcaatggatctttttgaaggggcacaggagcacagcagggtcagcaagaggtctctcaagaactgggtggtgaatgcatttagagagcgcaaagctcttgcccttacactcaatgatacgaaaactgcagtaaacaagctgaaccagatggctaacgttattgtggggatcattgtgtttgctctctggcttcttatcctgggaatagcaacagcaaatttctttgtctttctcacttcacagattctcctggcagttttcgtgtttgggaatacgttgaagacgctctttgaggcaattgtcttcttgttcgtgatgcatccctttgatgtcggtgaccgctgtgaaattgaaggtgttcagttggttgttgaggaaatgaatctcatgacaacggtgtttctccgatctgataacctgaagatatattatccgaacagtgtactcgcaacaaaaccaattatgaatttctacagaagtcctgatatgggcgaagcaattgacttctccattcatgttgcaactcctgccgagaaactggccctgatgaaggaacggatactgcgctacattgacaacaagaaggaacattggtacccgggcgcgatggttgtactccgggacgtcgatgataccaacaaactgaaagtgtcaatatggctgcgacacacactcaacttccaggacatgggcacgcgtttcgtgaggcgagagctagtgctccaggagatgatcaaagtcctgaaggacctcgaggttgagtatcggatgcttccacttgatgtgaacgttcgcagtgcgcctccaatccagtccacaaggatgcctacaacatggagttattcgtgaagccagtgaccaggaaccggaccatttggccgtggcattccggatgaggacttgctacgttcctccatggatttggtgggtttaagctgcaagatcttgttggcagcgcaaatggcgtgatggtggtgatcttggtagcaaatcgagctagagattagcatattactatattagcatgtagagagctgttagttgtgcctgcactcgtcacttgtgcagaatggatgggatggaacgcatgccggatgcgacagcggcaacgaagatggtgggcggatggcaataatgtagtgctctgttgatctgttgtatacttgtatctgtgagttgtgacgagaaacctgttgtatacggaggtcctgaacttgcagaattcaaattggcaatgtaatgtgacgaaatacctt

SEQ ID NO: 214390 - DNA, 3560 bp, Zea Mays
ctctacgttgttccggaacattctgcttcgccgtcccgcgaccgcgagcaccaccgctagcataaaccggcgacgcgctattaatccaacccaaaagtcaggcatcactgcgagccaagtatagcaggcgcggaaaggggccaagggggcgagtggagttgctgcggtgcccgtctatcttcggggagcgtctggggttgccggcggggaggccatggaccggggtcgaagcgagagcggcctgcggtcgcacgggtccggcaaggtctcctctcggccggggtcggggtcgcttgcgttcccagaggagcaaccgatactagccgatcgcgacggcggcgaccgccgagaggttgtcgtgaagatcgatgggagcgggaacgggcacgcgccgttctccttccatggagcggacgcaggtgctgacggtggcggggggaaggcggagaatgcgacctccagcacgaactccacagcgaccacgccgcaggccgagagcaggtcgatgtcgagcgagaccaactatcctatgccaccggccaatgtgtgccggcgggaggggagctacgagttctggaacaatgacggcggcagcgccgaggcgttcagcttccagaaccgtccgccgcaggggccgcactcgtcgtccccttcaatatcgccgccgctgccgccagaagggggcggcatggacccacccgcccggctcaacggcagcttccaccggaagcaggtggcgtccgacggcgagatgtcgctcgacctcgacctggagatggacgagctcgggaggacggccgcgcagctgcgctcgcacccatccttttccagctcgctcgaaagggacgaccgcgtctcgttgcaggagccacaaaagcggcactccgcgtcgtcctgctcattcgattccgacaccggcgacggccgaaagcgccgcggcgacgacggcgaggtcgttcggtgcacgtcctcctctagtgctgcgggagcggggccgttgctgcgagtcaacacgcgctcccggctcatggacccgccgccgcagtcgcagcgggcgccggcacctgccgcgtcttctgtcgtcgacgaggagcgaaaatcttcaggcttgcggactcctacaaagtcgggccgcctcttctccaggcttatgtccggcaacaagtccggtcccattgctggcaagtcaggtcccatggacgacgaggaggacgatccattcgtggacgaagacattcccgatgacttcaagcgtgggaagctggacgctttgacggtcttgcagtggctcggcttgttccttatcatcgcggccttggcatgcagtctcagcataaagatcttgtccacgaagaaggtgctgggtttgcacctctggaagtgggagctcctcgtgttcgtgctcatctgcggccgtctcgtctccggatgggtcatcaggattgccgtcttcggtgtcgaacgcaacttcttgctgaggaagcgcgtgctctactttgtgtatggagtgcgcagcgccgtgcagaacgcgctctggctcggcctggtgctcgcctcttggcacttcttgtttgacgagaatgtccagcaggagacgaactctccagtactgccctatgtgacgaagaggcattgttcaatcaatacgtcatccagacactctctgggccgccactagtagaagaaaaccatgtgcttgaggaggttcatgagctccaacgtgcaggtgcaactataccaaaggagctgcgtgatgcagtaccaaccaaacatgtatctgagcagaggaacattcagttatcaggggtcatgcctgagggacaaggtagcaagcagctgtcgaaagagaaaagggacgggatctctattgatgcacttaacaagctcaaccagcgaaatgtctcagcttggaacatgaagaggctgatgaggattgttcaatttgggacattaacgactatggatgagcagatacaacaggcaagaggtaagggagatgaatcagcaacacagatacgaagtgaatatgaggcaaagatagctgccaagaagatctttagcaatgtagcaaagccaggttccaaattattgattttgaatgtgggaaacatgaaggtacatatacttgtcggacttgatgagattcatgaggcaggaagaggctgttaaagcaatggatctttttgaaggggcacaggagcacagcagggtcagcaagaggtctctcaagaactgggtggtgaatgcatttagagagcgcaaagctcttgcccttacactcaatgatacgaaaactgcagtaaacaagctgaaccagatggctaacgttattgtggggatcattgtgtttgctctctggcttcttatcctgggaatagcaacagcaaatttctttgtctttctcacttcacagattctcctggcagttttcgtgtttgggaatacgttgaagacgctctttgaggcaattgtcttcttgttcgtgatgcatccctttgatgtcggtgaccgctgtgaaattgaaggtgttcagttggttgttgaggaaatgaatctcatgacaacggtgtttctccgatctgataacctgaagatatattatccgaacagtgtactcgcaacaaaaccaattatgaatttctacagaagtcctgatatgggcgaagcaattgacttctccattcatgttgcaactcctgccgagaaactggccctgatgaaggaacggatactgcgctacattgacaacaagaaggaacattggtacccgggcgcgatggttgtactccgggacgtcgatgataccaacaaactgaaagtgtcaatatggctgcgacacacactcaacttccaggacatgggcacgcgtttcgtgaggcgagagctagtgctccaggagatgatcaaagtcctgaaggacctcgaggttgagtatcggatgcttccacttgatgtgaacgttcgcagtgcgcctccaatccagtccacaaggatgcctacaacatggagttattcgtgaagccagtgaccaggaaccggaccatttggccgtggcattccggatgaggacttgctacgttcctccatggatttggtgggtttaagctgcaagatcttgttggcagcgcaaatggcgtgatggtggtgatcttggtagcaaatcgagctagagattagcatattactatattagcatgtagagagctgttagttgtgcctgcactcgtcacttgtgcagaatggatgggatggaacgcatgccggatgcgacagcggcaacgaagatggtgggcggatggcaataatgtagtgctctgttgatctgttgtatacttgtatctgtgagttgtgacgagaaacctgttgtatacggaggtcctgaacttgcagaattcaaattggcaatgtattacagattctccagcctctgcatattatgcggcctctgcatattatgcgggtaaggcttgacacttaaagatacatttccccacacctcgtacagtgcgggaagcctacggtactgggtacgcatttaatgtaatgtgacgaaatacctt

SEQ ID NO: 214391 - DNA, 909 bp, Zea Mays
cgcttccaccatcgcacccacccggagcgcctcctcttctccagcgtccgatccccattccccacctctcctccctccgccgccagctcccgcccccttctctcccctcctcgcctccccgcgcgcgcgtttttataagggtttcggcggaggcgcccggtcgctggcgatggccgacgacggcgggagccacgagggcagcggcggcggcggaggcgtccgggagcaggaccggttcctgcccatcgccaacatcagccggatcatgaagaaggccgtcccggccaacggcaagatcgccaaggacgctaaggagaccctgcaggagtgcgtctccgagttcatatcattcgtgaccagcgaggccagcgacaaatgccagaaggagaaacgaaagacaatcaacggggacgatttgctctgggcgatggccactttaggattcgaggagtacgtcgagcctctcaagatttacctacaaaagtacaaagagatggagggtgatagcaagctgtctacaaaggctggcgagggctctgtaaagaaggatgcaattagtccccatggtggcaccagtagctcaagtaatcagttggttcagcatggagtctacaaccaagggatgggctatatgcagccacagtaccacaatggggaaacctaataaagggctaatacagcagcaatttatgaaaacaggaggcacttacaaagggtgttaatctctgcgatggctgcctctcaggattcatgcttagctttccctcctgtctgaatgtgatggttgcctgaatcctaatttgcctgtctgtggtgtgagaccatctccaaccattcccctcatatttctcctcctatctgtactttctattatattttactactttacctcaaaagatactcctacat

SEQ ID NO: 214392 - DNA, 1094 bp, Zea Mays
cgcttccaccatcgcacccacccggagcgcctcctcttctccagcgtccgatccccattccccacctctcctccctccgccgccagctcccgcccccttctctcccctcctcgcctccccgcgcgcgcgtttttataagggtttcggcggaggcgcccggtcgctggcgatggccgacgacggcgggagccacgagggcagcggcggcggcggaggcgtccgggagcaggaccggttcctgcccatcgccaacatcagccggatcatgaagaaggccgtcccggccaacggcaagatcgccaaggacgctaaggagaccctgcaggagtgcgtctccgagttcatatcattcgtgaccagcgaggccagcgacaaatgccagaaggagaaacgaaagacaatcaacggggacgatttgctctgggcgatggccactttaggattcgaggagtacgtcgagcctctcaagatttacctacaaaagtacaaagagatggagggtgatagcaagctgtctacaaaggctggcgagggctctgtaaagaaggatgcaattagtccccatggtggcaccagtagctcaagtaatcagttggttcagcatggagtctacaaccaagggatgggctatatgcagccacagtaccacaatggggaaacctaataaagggctaatacagcagcaatttatggaggcacttacaaagggtgttaatctctgcgatggctgcctctcaggtgtaaattggcttcggtttagcgctgcttttgtccgtatatttaggatgatttgactgttgctacttttggcaaccttttacatttacagatatgtattattcagcataaatataatatagtagtcctaggcctaaataatggtgattaacataccaagtcttttatcaggctactcgttttctggaacaggattcatgcttagctttccctcctgtctgaatgtgatggttgcctgaatcctaatttgcctgtctgtggtgtgagaccatctccaaccattcccctcatatttctcctcctatctgtactttctattatattttactactttacctcaaaagatactcctacat

SEQ ID NO: 214393 - DNA, 1145 bp, Zea Mays
cgcttccaccatcgcacccacccggagcgcctcctcttctccagcgtccgatccccattccccacctctcctccctccgccgccagctcccgcccccttctctcccctcctcgcctccccgcgcgcgcgtttttataagggtttcggcggaggcgcccggtcgctggcgatggccgacgacggcgggagccacgagggcagcggcggcggcggaggcgtccgggagcaggaccggttcctgcccatcgccaacatcagccggatcatgaagaaggccgtcccggccaacggcaagatcgccaaggacgctaaggagaccctgcaggagtgcgtctccgagttcatatcattcgtgaccagcgaggccagcgacaaatgccagaaggagaaacgaaagacaatcaacggggacgatttgctctgggcgatggccactttaggattcgaggagtacgtcgagcctctcaagatttacctacaaaagtacaaagagattttcgtagggtgatagcaagctgtctacaaaggctggcgagggctctgtaaagaaggatgcaattagtccccatggtggcaccagtagctcaagtaatcagttggttcagcatggagtctacaaccaagggatgggctatatgcagccacagtaccacaatggggaaacctaataaagggctaatacagcagcaatttatgctagggaagtctctgcattgcttaccatgtgtattggcagaaaacaggaggcacttacaaagggtgttaatctctgcgatggctgcctctcaggtgtaaattggcttcggtttagcgctgcttttgtccgtatatttaggatgatttgactgttgctacttttggcaaccttttacatttacagatatgtattattcagcataaatataatatagtagtcctaggcctaaataatggtgattaacataccaagtcttttatcaggctactcgttttctggaacaggattcatgcttagctttccctcctgtctgaatgtgatggttgcctgaatcctaatttgcctgtctgtggtgtgagaccatctccaaccattcccctcatatttctcctcctatctgtactttctattatattttactactttacctcaaaagatactcctacat

SEQ ID NO: 214394 - DNA, 3602 bp, Zea Mays
cccactttggcccttagagttgattcggtgcacatgcttgcttgccattgccaggttgttagttgatcatgcgaatatggattaaacttgtggaatgactcgattaatctaatggttgtacctgttgttgttggcattcacatattatcttttaacaccggattggagcttcataaaatgttgtctgccatcaaaatttcacagcaaaagggtacttaaggtttgcttggtagcacgtgaattaaattgatgcctttggcgatggaaatttccattgacatccctagtcattagtacatttatgttgctgtcatggaaccatttgtagtttgttatgttcactgattgaaggatgatcattcgagatggctctttattatgattagaagggttaaaagtattttccttcattctgtatttctgttgctccaaagttagaccttgggatgggtcctgtgctcaattttctatgtacacacagtttacaaagtactactaaactaaatttatgaacaaaaaaaatactgtacgctgcaggttgtgaaggatctgattgcatctttcgatatagcgaactgtgtagatgaccaagggaacacggcgctgcatatagcagccttccgaggccatgtccaagtggtcgaggctctcatcaccgcatctccgtctcttatatcagcaacaaacgaagccggcgacacgttccttcacatggcactgactggcttcgggactcccgagttccaaaggcttgatcgccagacggagctcattaggcaattagcgagtggagcaatcgtggatatcagcagcagcactattatcaacgcgcagaatgacgacgggaagacagctcttcacttggccgtggtttgcaacctgcattcggacgtcgttaagctcctgatgagcgtgccttgtattgacctcaacatctgcgacaaggacggcatgactcctctggatctactcaggaagcagccacggacgacggcgtcagagatactgatcaaacaactgatcctggccggtgggttcacaagctcaagggaccacgagactaggtcggctatcgcttctcagctgaagatgcactccattgtaggaagcccggggacatcgttcaagataccagacggcgagatcttctttctccacgctgctggagtcgacgtgtcgggcggcatcggcgaaggaggagcagcagtaccgttttcctccgttattgctagggctgacgtcctgcatggacccaaactgaagaggctcaactctttccaagacgcggcgaagcatatcaaggtcctattcagatggcctcgccgcggatggaacaagtcaggcagcggcggccgaaagggtctggacgacgacgatgcctcgtctgtggactctgccaagacctggagccacgaggagaccccgacaccgctgaggcagaggtattccaggatcggctcgctgttcaacaagcggacctacgcagcaggcagggcttcacctagcgaagcagtgaagaagggtggagtggtacagccagctggttctactctactttcgacatctctgtcgtcgtcgtcggcgtccttggttgacagtcatggctagagcttcatggaatatgaactatgagaaggttcttgttgacatcttgcacgagcacaatcatgtgaagtaccggggccagaatggttgggcaccagaaggttggcgttctatgacacaaatgttcaatgagaagtgcccgttggctaagtttacaaaggcacagatccaggaaaaagaaaaggaacttaaggcaaactataaggtgctgaaggaagcccgcaagcaaagtggtgttggatggaatgaggccatgggtatgatcattgctgaaccaccaatatgggcaaatataattgtttaatccaaaggtcaagaaatttcagtcaaggccattccctttgtataatcagttgtcagcactctatgatggcagttgtgccaccggtgatctcaattttacatcaactcagcaacatacatcatcccgacaacaattacatattcaagctgaagttgaagctgaagctatgagctctttcaggattgatgatgacctcggggttaaccctgatttgaaccaaatctcttcaaatttgcatgggttgggatcttcaagtacccgtgttgagattggtggacatgaccgcaccccggcatcttcagaacagcgagcggagagtcatggaaggaagcgtaagcaaagtcagattgctggggttcttgaggaatatttggattacaaaaggcaacataatgataagttgcttgatgtggtaaatcagattgatcaacaagctgagggatgtaacaagaaggaagaatattgtattggaaagtgtgttcgtgtgttagagtcgatggaagatataactgaagaggagatggcagcggcaatgggtgtgtttaagtgcgaggagaacagagaaatatttctgaacagccagaggccacgtgtccgattgttgtggcttagaaacgagatccacaagcaggtagttatataaagcactcaatttctacaattttttttgcttcatggtcacatttactaatttctgcaatattttcagatgtccaccaatctcaatattttcagatgtccaccaagcctttagtttcctgggaggcaatggatggagctctgcgacaataaatacaagatgttcaaaagaacgttattgttgtgttaacattttgggcataccaagtacttttttttgttatgagtctgtcaaacatatgttaaatttgtcactaatttcttatgagctatttctgtggtcaaagaaagttgtttatttaagtggcatgaatcaaaaaatcttaggagacttctgtttgattttgtttatttttaaaagaaagttgcttcagcgtacaaattttgaggggcatattgttgtttttgcgtacaaatttctgtttgattttgttgatttttattttttctattttacttgtgatttgatgatgatcacacttctagcagctgccgatgtgtggctccagagggcagcagggcagctgacccatggggcaccaaaggatgtcagggcagcgcagccccgctgggcaatgcccacccagggaattcgtatgacaggaatttgccccctccggtgctagctcccctgtgttttattggccccggtcaccaaaggatgtcttaggtgccgtggaagcccctgaacctgaactgtccgtcggcgtcgaggcggccccgcgcgtcggacatccactcgctcctgaggtcgatgagcctctggccggcgtcgttgacggtgccgtcggcgttgacgagcgcggcgtcctgcctccacatgtggccctgcatgaacccccagagcacgacgccctgcaccgccgggtgcgcgaacgcctcgcgcaggaccacctcgaggtcgtcggcgcggagcgcgtcgtcgggctcgcagacgtcgacctccgtgaaccagacgggcaggccggtggcggcgtagaccgtgtcgagcgcgtcgcagatgacctcgccgacggggtgggtgacgtggccctgcatcccgacgccgccgacc

SEQ ID NO: 214395 - DNA, 1015 bp, Zea Mays
tcgtgcatggtttatctgaagtatttcctgcatgaaagatctttccacctcatgagaagatagagaacataaatgatcagtactggacattacgagctgaggagatcccagaggaagagaagaatcttggcccacatgatcgattgattcatgtttaccatttcatgaaagaccctaaccagaatcaacaaattcaaaattttggagatccttttttgatggttattcgggaaggtgagactgctgcagaggtaatggagcgcatccagagaaaacttagagttcctgatgatgagttctccaagtggaagcttgcattcatatccatgaaccggccagagtacctccaggacactgacgttgtatcagcacgttttcagcggagagatgtatatggtgcttgggaacaataccttggcttggagcacactgatacaacatcgaaacggtcttacacatccaatcagaatcggcacacctatgagaagcccgtaaaaatttataattgagaaaccttcatcaaagttcaatccattgtcaaaggcgtcgacagcagcatgcccaaggtgatacgacgcttcaaacagaaaaatctggtatagtatttgcctgtgctaaggcctgcaaggcgcaagcccaccaggccaccaatgctgcttccaaccttcattgttccaagcaaccaagcatgtgtttggtttttcttcgtcgtgtcgagtatgacggcccctgacaggctgtgggaacaatggcagagattgtataatgggtttggtataattcttcgtgctgttgagaaacgtacgaggataacccgatcagatagtagagttttgagacctgtcaaacagaaccttttgaaactaacctacccgttataccagaagggccgtttgcaagtcttctattatacatagtttttattatatatatatatatatatgcatctagaaaataagaacaatttagaatttagaatggagtagaatacatttctacccttatttagaaatag

SEQ ID NO: 214396 - DNA, 1282 bp, Zea Mays
gatgacctgaaatttatgtttggctacttattcttagttagccttcgagagaaagctttggcatcattttctgctctttcaagtggcgttctagtctgcactgatgttgcagcaaggggtcttgacataccaagtgttgatctgattgtgcagtatgatccacctcaagatcccaacgttttcatacatagagctggccgtacagcacgctatgatcaagaaggggatgctattgtttttctcttaccaaaggaggatacttatgttgagttcttgaagcttcgaggtgttcctctcacagaaagggaatgcctcgcaaacactgatgatgtcataccgcagattagaagtgctgcgctcgaagatcgtaatgtcatggagaaaggacttagagcgtttgtttcgtttgttcgagcatacaaggagcaccactgctcttacatttttaggtggaaagatctcgagattggaaaactagctatggagtatggtttactccagatcccatccatgccagaagtgaagcatcattctctttcactagagggatttatttctgttgatgatgttgatattacacaaatcaagtacaaggataaagctcgagaaaaacaacgcaagaaggcgctgaaaaggaaagcagaagaggaggctcaaaatccaaagccggagaggaagagacctccagagaagccggagaagccaaagcggaagaagacgggcaagcagcgtcagtcaatccaaaccaaggaggacctggatgagctggcgcacgagtaccggcttctgaagaagctcaaacgtggagacatcgatgaagaggagtacgagaagctcactgggttcggagattctgatggcgaagcttccgatggggatgggagcaacttggacgagaggaagaagggcaacaaggcgcagaagaaaaccaagcagagaggaaaatgcaaaagtgggtctaagaagttcgaagggaggagtaaattgaggagcaaaagaagataggaaaccataaaaatgttttttttttgaaatgctgatccaattttacagcaattggaattttgcacagaagctgtgcatgccccacggctaagtagtgcctttttctttggtttgatgattaatgatgggtggtgactgctgagcgggaactggatggggcctatgatatggcctgcttatctgaatcctttcagtttggctgaacgccgaaagaaaggattacataaattcttcagcaggttgcatctttgcactctgcagtaaccctctaactgat

SEQ ID NO: 214397 - DNA, 1399 bp, Zea Mays
ccccaatccggccgcctcgacggatttcgactgcttccagatagctcggtcttccgataatagcatcgctcgcgcgcctccgtttgcttcgcattcttaaaacctagcatatgatttgattccgccagctgcttggtccggaaccgaggaggtggcgagggagtgggggtcacccggccatggcgacgatggacgcacgactgcaccttccacgccctcgccgcgctctacggcgtcgtttcattcctagccctagtaagccgaatccccccgcacgttttttgtttttttacccacctcctgcttagcttagcttgcaattggggctccgctttggtttggagccatgagttaaggcggggacgacggttcgttcaggcggagacgagccaatgtgtgtattcggtattccaaatacggttgatacaaactgaggcagacaggcagtggttaccagtctcattagctcatttgatgtcaatttcgccagttccaactgataagaatcgagtgccgggttcctgagtatgggtggacaacggcacaacgcagaagctgttccatttcctaaacgtcattgtcaatggtgtttccactgctgctggcggctgggcgtctggggtgatcggtgtggcctagttgttgcgtcgatcttggactcttggtcgattctcacagtaagagggagccgtgcgacatggacgtcacggcgtaaacacagagtatttgcaacgccagacgtagaacaggaatcacattgctgatttcttgccggacgagaatcagaacagaaggcggcactgggaattgcttgtgatcgagagaacgtgtgataggatcatatggttggctatttcagaagagtcggtggcgaacctgcagctgctcgtgagctggaaacttgcgaggcattcggggtgtgccactgtgcgcgtaaaagcgcgcacctgtctgtgtgatgatcggtcaccccccaacccagtcccagatgacaggacgaagcaacttgagacaagcgtaagaagaacaggttggccttgtccggcaggaatcgcggccggggcctcccggaatgattggcacgtcgaccggccggccgggaacacgggccagtcggcgtccgcacgcccgtgcgcggacgccaggccgacagacagatcgaggctgcgcagcgcagggcaggacagcgccggccggccaccacccgtccgggtgggccatggactgcaacgtacgggtgtgggccattctccttggaggaagccggagtggaggccagagaaacaggcaggcagagatgggagtctggcgcggctccgtcgacagctcgtcaaatgtcgagttggaccgagtagggaaaaaaaaaacgttgggtcatttttttcgtttataagatgac

SEQ ID NO: 214398 - DNA, 2636 bp, Zea Mays
cttcgcattccccaatccggccgcctcgacggatttcgactgcttccagatagctcggtcttccgataatagcatcgctcgcgcgcctccgtttgcttcgcattcttaaaacctagcatatgatttgattccgccagctgcttggtccggaaccgaggaggtggcgagggagtgggggtcacccggccatggcgacgatggacgcacgactgcaccttccacgccctcgccgcgctctacggcgtcgtttcattcctagccctagtaagccgaatccccccgcacgttttttgtttttttacccacctcctgcttagcttagcttgcaattggggctccgctttggtttggagccatgagttaaggcggggacgacggttcgttcaggcggagacgagccaatgtgtgtattcggtattccaaatacggttgatacaaactgaggcagacaggcagtggttaccagtctcattagctcatttgatgtcaatttcgccagttccaactgataagaatcgagtgccgggttcctgagtatgggtggacaacggcacaacgcagaagctgttccatttcctaaacgtcattgtcaatggtggtgagtacgccattctcctggtcagaatctgtgcttgcgggaacttgcaacttgtgcacattgagggttagtttgggagccataaaaccgaagggaattagagggggcgagaagccagattctccttcttattcaattttgaataataaagagaatttagtccatctaatcctctccgattttctcgctcccaaactagtcccgagggtttgagtaaggtggcaaattttatttcgcttctattagctggttggaacaattgcggtaatgtgtatcaatactttcttgtagatatttcaacctgtgcttattgatttgcctggcctagcattcttcacgtcctacactttgctagtgcttttttgggctgagatttactaccaagttaggtttcagttcaacagttcattttctcactgatgggcttataagagcatgtactcgccaaagaacaggtctctttttttcagcatgtcaatggctcttggttcttaaaaggttgataagatgttttaagtttgcacctattcttaatgtgtgctaacaaaggcaaggtacacggtagttaatcctatttaaacaccagtttgcattgtaggaatcgtcttctattttggtgcttaaagatacgtcaacattctctccctttaaacaatcatgtataagcaccttgcatcatacatgtcctaacaagttttgattttttttcttgtatcaacttttatgtcaaaggattaattttgcagtaatcaatctgttgatgatgtaaagtgatcacatgaaaaaatcagggacgttgttatagtttagagaacattatcacgaatatggttcaagtgttttcgtttttctggaacaacagaggagagatgggtgctatttcatttaagagggaagaaataatataaaggagatgatgtttgaatgctagtttggatcctagagactaattttttagtcccgtcacatcggatgtttgaatactagttagaagtattaaatataatttaattacaaaactaactacacatataagcactaaacagtaagacgagtttattttaaacctaattagtccatgctttgctcatatgatgctacaataaaaatttgctaatcatgaattaattttgcttaataaatccatctcgttgtttagtcttcatctatctgttttttataattagattatattcaatatttataattatcattcaaacatctgctatattttgtaattaactaccgccaacagtggaaacaggcaaggcgcaaggcacggaccgtcagccgttgctaatcatgcggtccataccttgcgtccttgccagtttccactgctgctggcggctgggcgtctggggtgatcggtgtggcctagttgttgcgtcgatcttggactcttggtcgattctcacaaatcagaacagaaggcggcactgggaattgcttgtgatcgagagaacgtgtgataggatcatatggttggctatttcagaagagtcggtggcgaacctgcagctgctcgtgagctggaaacttgcgaggcattcggggtgtgccactgtgcgcgtaaaagcgcgcacctgtctgtgtgatgatcggtcaccccccaacccagtcccagatgacaggacgaagcaacttgagacaagcgtaagaagaacaggttggccttgtccggcaggaatcgcggccggggcctcccggaatgattggcacgtcgaccggccggccgggaacacgggccagtcggcgtccgcacgcccgtgcgcggacgccaggccgacagacagatcgaggctgcgcagcgcagggcaggacagcgccggccggccaccacccgtccgggtgggccatggactgcaacgtacgggtgtgggccattctccttggaggaagccggagtggaggccagagaaacaggcaggcagagatgggagtctggcgcggctccgtcgacagctcgtcaaatgtcgagttggaccgagtagggaaaaaaaaaacgttgggtcatttttttcgtttataagatgac

SEQ ID NO: 214399 - DNA, 2016 bp, Zea Mays
accactcccaccaccaactaagcagattcgatctcctcccatcacctccatcgcaacctctcgacggcagactaggtttcatccccatctcaaccggcggcagcctagggcttcatcccccacccccaaatccatgccgctcaggttggagatcaattggaaattttctcaatggtcagagagggtcaagttggtggacttgcaccccacggaggcatggatgttgagcctgtactcgaggagtgcctgcatccgggattatcacacacagtcaatttgtaggagaggggacgccatacatcaaagatgactaaagaagaggaagatgaagaatacctcgaagaggaagaagatgcccttgctggtgcaggggggaacacatttagtttcacaaccttcatgctcttaacccctctgatcctggtgcgtggcagattagactccgatggggaagtcactagcgaggtggatcaagttcgtgctcttcaggaagaagtcgtcatccaggtccagctccaccaaggccaagaatttatcgataagaatgctgttacgatttcaagtgtggctctacatatgcatctccagctatggagtagggatttgttctagccactattgcccttatttttcaatatgtggaaaggtgtgagtaacaaaggggaaactgctgccaggaaggagcccacgttctctgagagctctccagtgatctcagagcttgtgcttgttagcgcccataacaacgagatcatgcgggaggtggcaaagggtgaaaattctagcgtgcaagaagtgctagtgactgatgtcagtcaagacttggagaagcaggtagtgtggggctgatacgtccaataatgcgctagtgactgatgtcagtcaagacttggagaagcaggcagtgtggggctgatacatccaatgatgctgagagggtgagtgaacagcgagcggtcatgatggcacaagctaccttcccttattatctgatgattttggattcaagctgaaagaagaggctatgctgaataaagtactaaaggagacagtcttgtcaaaggtagttgccattgataaattgcaatctggtctggcatcttcacttcgcatccaagatgttatgagaaatgagatccaaagagtccaggatgaactttcttgcataacccacaaagctaagcagttggagcttcagcccaagttcgatgcaggagttcggcatggggtgaagatggctgctattttgtaagtgagttggtggatgaaaattcaagttattgtagaagacaacacatttctttgcatattacatcctgctatgatgttctgaactatgattggttcaacgggtgccatttttctcttagagctattgttgacatggaagaaatggtggcagcaccagcttagtatggacaacaactgaaatctcctacagaagttgtttctaatgtgctattgagctccattgtgttttggcctacgcaatcttgttctccagtctgcctccaagaaaagctctatagtcccatagtttctgctaaggttcaacaacttcaggatcaattataggctgagaagcaagaaaaaatggacttcgtgatgaagcggaaaccattgatagtatgaagaggttgatggaagaaaataacaaccttcttcgtcaactataaagcttcaattgaagaaaagtgcctccatcttaagtttggttgactactataggacatgcagccttgtggtagctatagtagtagtagatatttatagttgctctagatttgaagttataggattatttttaattatgtttaatgtttaataatttgagttgaagttataagatttgctttgaattttaagttaaaggatttgagatatatggtttggagttatatgattatttgatggatggaatatttgtgtacaacaaattcatgtgatattttggctatgatgtgtaatattctatgacgatatcaattcatatgatgtgttccttttgatgacgac

SEQ ID NO: 214400 - DNA, 2140 bp, Zea Mays
accactcccaccaccaactaagcagattcgatctcctcccatcacctccatcgcaacctctcgacggcagactaggtttcatccccatctcaaccggcggcagcctagggcttcatcccccacccccaaatccatgccgctcaggttggagatcaatgtgtgcctgctcgacctcactggatctcagtccccatagagggtcaagttggtggacttgcaccccacggaggcatggatgttgagcctgtactcgaggagtgcctgcatccgggattatcacacacagtcaatttgtaggagaggggacgccatacatcaaagatgactaaagaagaggaagatgaagaatacctcgaagaggaagaagatgcccttgctggtgcaggggggaacacatttagtttcacaaccttcatgctcttaacccctctgatcctggtgcgtggcagattagactccgatggggaagtcactagcgaggtggatcaagttcgtgctcttcaggaagaagtcgtcatccaggaaggagcccacgttctctgagagctctccagtgatctcagagcttgtgcttgttagcgcccataacaacgagatcatgcgggaggtggcaaagggtgaaaattctagcgtgcaagaagtgctagtgactgatgtcagtcaagacttggagaagcaggtagtgtggggctgatacgtccaataatgcgctagtgactgatgtcagtcaagacttggagaagcaggcagtgtggggctgatacatccaatgatgctgagagggtgagtgaacagcgagcggtcatgatggcacaagctaccttcccttattatctgatgattttggattcaagctgaaagaagaggctatgctgaataaagtactaaaggagacagtcttgtcaaaggtagttgccattgataaattgcaatctggtctggcatcttcacttcgcatccaagatgttatgagaaatgagatccaaagagtccaggatgaactttcttgcataacccacaaagctaagcagttggagcttcaggtatccaagatggatgagtcaatcgatgagatccaataggatttctaggaatctacgaaggagctggctgctcttcgtggaacactgaaaacggtgattgaagacagggacctgtcgtggcaggaggtgaagtagctgagaagaaacatcagcatcatgctagaacgaggttgtgtcgctgaagaagatcgaagccttggacaaagacatacttgtcaaggagggagagatcacgatattgcaggacaacatcgacaagccgttcaatatcatctgcagcccaagttcgatgcaggagttcggcatggggtgaagatggctgctattttgtaagtgagttggtggatgaaaattcaagttattgtagaagacaacacatttctttgcatattacatcctgctatgatgttctgaactatgattggttcaacgggtgccatttttctcttagagctattgttgacatggaagaaatggtggcagcaccagcttagtatggacaacaactgaaatctcctacagaagttgtttctaatgtgctattgagctccattgtgttttggcctacgcaatcttgttctccagtctgcctccaagaaaagctctatagtcccatagtttctgctaaggttcaacaacttcaggatcaattataggctgagaagcaagaaaaaatggacttcgtgatgaagcggaaaccattgatagtatgaagaggttgatggaagaaaataacaaccttcttcgtcaactataaagcttcaattgaagaaaagtgcctccatcttaagtttggttgactactataggacatgcagccttgtggtagctatagtagtagtagatatttatagttgctctagatttgaagttataggattatttttaattatgtttaatgtttaataatttgagttgaagttataagatttgctttgaattttaagttaaaggatttgagatatatggtttggagttatatgattatttgatggatggaatatttgtgtacaacaaattcatgtgatattttggctatgatgtgtaatattctatgacgatatcaattcatatgatgtgttccttttgatgacgac

SEQ ID NO: 214401 - DNA, 3005 bp, Zea Mays
accactcccaccaccaactaagcagattcgatctcctcccatcacctccatcgcaacctctcgacggcagactaggtttcatccccatctcaaccggcggcagcctagggcttcatcccccacccccaaatccatgccgctcaggttggagatcaattggaaattttctcaatggtcagagagggtcaagttggtggacttgcaccccacggaggcatggatgttgagcctgtactcgaggagtgcctgcatccgggattatcacacacagtcaatttgtaggagaggggacgccatacatcaaagatgactaaagaagaggaagatgaagaatacctcgaagaggaagaagatgcccttgctggtgcaggggggaacacatttagtttcacaaccttcatgctcttaacccctctgatcctggtgcgtggcagattagactccgatggggaagtcactagcgaggtggatcaagttcgtgctcttcaggaagaagtcgtcatccaggtccagctccaccaaggccaagaatttatcgataagaatgctgttacgatttcaagtgtggctctacatatgcatctccagctatggagtagggatttgttctagccactattgcccttatttttcaatatgtggaaaggtgtgagtaacaaaggggaaactgctgccaggaaggagcccacgttctctgagagctctccagtgatctcagagcttgtgcttgttagcgcccataacaacgagatcatgcgggaggtggcaaagggtgaaaattctagcgtgcaagaagtgctagtgactgatgtcagtcaagacttggagaagcaggtagtgtggggctgatacgtccaataatgcgctagtgactgatgtcagtcaagacttggagaagcaggcagtgtggggctgatacatccaatgatgctgagagggtgagtgaacagcgagcggtcatgatggcacaagctaccttcccttattatctgatgattttggattcaagctgaaagaagaggctatgctgaataaagtactaaaggagacagtcttgtcaaaggtagttgccattgataaattgcaatctggtctggcatcttcacttcgcatccaagatgttatgagaaatgagatccaaagagtccaggatgaactttcttgcataacccacaaagctaagcagttggagcttcaggtatcatgtgtaccttgcatatttcatatctattttccctaataaactagcagttcatagtttttatctaatcaaaataggattttggtaacagtttctctttcataatgaattaatcttagtttgtctagtgttagccaattgtagtggtcaagttgcagtatgtctcaaaatacttataagtaggtagacctttttgctgaatgagctggttacctaacgggtatttcgaggccaactgatgccactcatctctttgatctataaaagtattagaaatgcattttaatgattgaatcaagttatttgttgcttgtttgtctttagcaaatcattattttgtatttttttgcatattgccaatattttaggataatttttcccaagtgcagattaggtctactatgtgagtgttcagttagatagtcctttgaatgtttctagaaccagttctaaagttgagataatgtgaggtagcatacaaaacaacgtattgttagagatgcatactgtcaacaaacattcattccaggggtcatcttgatggtcatataagaaacactaggagaaaatgacataaattagtattacactgtcatgtttttgtatataaagtaggccatacaacttcactagaagtctagtctagagacagcagtgggctatcagtgaatgctatgttgttttaaagaccaacccataatgctgcgattgttacggtaccagcccaaatggcatgcttcttcaggacgacagatgatattcatatatgctagaatataagctctgtttgcggtattttcctccagtgctcctgctgtgtttgctgcacttaacaggtatccaagatggatgagtcaatcgatgagatccaataggatttctaggaatctacgaaggagctggctgctcttcgtggaacactgaaaacggtgattgaagacagggacctgtcgtggcaggaggtgaagtagctgagaagaaacatcagcatcatgctagaacgaggttgtgtcgctgaagaagatcgaagccttggacaaagacatacttgtcaaggagggagagatcacgatattgcaggacaacatcgacaagccgttcaatatcatctgcagcccaagttcgatgcaggagttcggcatggggtgaagatggctgctattttgttgacatggaagaaatggtggcagcaccagcttagtatggacaacaactgaaatctcctacagaagttgtttctaatgtgctattgagctccattgtgttttggcctacgcaatcttgttctccagtctgcctccaagaaaagctctatagtcccatagtttctgctaaggttcaacaacttcaggatcaattataggctgagaagcaagaaaaaatggacttcgtgatgaagcggaaaccattgatagtatgaagaggttgatggaagaaaataacaaccttcttcgtcaactataaagcttcaattgaagaaaagtgcctccatcttaagtttggttgactactataggacatgcagccttgtggtagctatagtagtagtagatatttatagttgctctagatttgaagttataggattatttttaattatgtttaatgtttaataatttgagttgaagttataagatttgctttgaattttaagttaaaggatttgagatatatggtttggagttatatgattatttgatggatggaatatttgtgtacaacaaattcatgtgatattttggctatgatgtgtaatattctatgacgatatcaattcatatgatgtgttccttttgatgacgac

SEQ ID NO: 214402 - DNA, 2213 bp, Zea Mays
accactcccaccaccaactaagcagattcgatctcctcccatcacctccatcgcaacctctcgacggcagactaggtttcatccccatctcaaccggcggcagcctagggcttcatcccccacccccaaatccatgccgctcaggttggagatcaattggaaattttctcaatggtcagagagggtcaagttggtggacttgcaccccacggaggcatggatgttgagcctgtactcgaggagtgcctgcatccgggattatcacacacagtcaatttgtaggagaggggacgccatacatcaaagatgactaaagaagaggaagatgaagaatacctcgaagaggaagaagatgcccttgctggtgcaggggggaacacatttagtttcacaaccttcatgctcttaacccctctgatcctggtgcgtggcagattagactccgatggggaagtcactagcgaggtggatcaagttcgtgctcttcaggaagaagtcgtcatccaggtccagctccaccaaggccaagaatttatcgataagaatgctgttacgatttcaagtgtggctctacatatgcatctccagctatggagaaggagcccacgttctctgagagctctccagtgatctcagagcttgtgcttgttagcgcccataacaacgagatcatgcgggaggtggcaaagggtgaaaattctagcgtgcaagaagtgctagtgactgatgtcagtcaagacttggagaagcaggtagtgtggggctgatacgtccaataatgcgctagtgactgatgtcagtcaagacttggagaagcaggcagtgtggggctgatacatccaatgatgctgagagggtgagtgaacagcgagcggtcatgatggcacaagctaccttcccttattatctgatgattttggattcaagctgaaagaagaggctatgctgaataaagtactaaaggagacagtcttgtcaaaggtagttgccattgataaattgcaatctggtctggcatcttcacttcgcatccaagatgttatgagaaatgagatccaaagagtccaggatgaactttcttgcataacccacaaagctaagcagttggagcttcaggtatccaagatggatgagtcaatcgatgagatccaataggatttctaggaatctacgaaggagctggctgctcttcgtggaacactgaaaacggtgattgaagacagggacctgtcgtggcaggaggtgaagtagctgagaagaaacatcagcatcatgctagaacgaggttgtgtcgctgaagaagatcgaagccttggacaaagacatacttgtcaaggagggagagatcacgatattgcaggacaacatcgacaagccgttcaatatcatctgcagcccaagttcgatgcaggagttcggcatggggtgaagatggctgctattttgtaagtgagttggtggatgaaaattcaagttattgtagaagacaacacatttctttgcatattacatcctgctatgatgttctgaactatgattggttcaacgggtgccatttttctcttagagctattgttgacatggaagaaatggtggcagcaccagcttagtatggacaacaactgaaatctcctacagaagttgtttctaatgtgctattgagctccattgtgttttggcctacgcaatcttgttctccagtctgcctccaagaaaagctctatagtcccatagtttctgctaaggttcaacaacttcaggatcaattataggctgagaagcaagaaaaaatggacttcgtgatgaagcggaaaccattgatagtatgaagaggttgatggaagaaaataacaaccttcttcgtcaactataaagcttcaattgaagaaaagtgcctccatcttaagtttggttgactactataggacatgcagccttgtggtagctatagtagtagtagatatttatagttgctctagatttgaagttataggattatttttaattatgtttaatgtttaataatttgagttgaagttataagatttgctttgaattttaagttaaaggatttgagatatatggtttggagttatatgattatttgatggatggaatatttgtgtacaacaaattcatgtgatattttggctatgatgtgtaatattctatgacgatatcaattcatatgatgtgttccttttgatgacgac

SEQ ID NO: 214403 - DNA, 3671 bp, Zea Mays
gccggctcacctctcgcggcgaagcttttctctccgctcggtgtttcggccatgatgtcgcggtcgtataccaacctgctcgacctcgcggagggcaacttcgcggcgctgggcccggtcggcggcagcgggcggcagaggcatgggtcgttcgggctgcggcggatgtcgcgggtgatgacggtgccggggacgctgacggagctcgacggcgaggacgagtcggagccggccgcgaccagcagcgtcgcctccgacgtgccctcgtccgtggcggcggaccgcctcatagtggtctcgaatcagttgcccatcgtcgcgcgccgcaggcccgacggccgagggtggtccttctcgtgggacgatgactcgctcctgctccagctccgcgacggcattcccgacgagatggaggtgctcttcgtcggatcactccgcgccgacgtccccgcagccgagcaggacgcggtatcgcaggcgctgctcgaccgattccgctgcgcgccggtgttcctccctgaccacctcaacgaccggttctaccacggcttctgcaagcgccagctctggcctctgttccactacatgctccccttctcatcgcccgcttccgcgtctgccgccgctacctcttcctccgtcgccacttcgtcacccggcaacggttgcttcgaccgcagcgcttgggaggcatacgtgctcgccaacaagttcttctttgagaaggtcgtggaggtaatcaacccagaggatgactacgtctgggttcatgactaccatctcctggcgctgcctacctttctccgccgccgcttcaaccgcctccgcatcggattcttcctccacagccccttcccctcgtccgagatctaccgcaccctccctgttcgcgacgagatactgaaggcgctgctcaattgtgacctcattgggttccacacttttgattacgccaggcacttcctctcgtgctgcagtaggatgctgggaattgaataccagtcaaagcgtgggtacattggattggattactttggccgcactgtagggatcaagatcatgccggtgggagttcatatgggtcagttggagtcgggtctgcgcttgcctgatagggagtggaggctttctgagcttcaacagcagtttcagggcaaaactgtcttgcttggtgtggatgatatggatatctttaaggggatcaatttgaagcttcttgcatttgagaacatgttgaggacacatcccaagtggcaggggagagcagtgttagtgcagattgctaacccagcccgtggaaggggtaaggatctggaagccatccaggctgagattgagcagagctgccagaggatcaatgtagactttggccagtcagggtatagccctgttgttttcatcaatcgtgatgtgtcaagtgtcgagaaggttgcctattatacgatagcggaatgcgtggttgtgactgctgtgagggatgggatgaacttaacaccatatgagtacattgtctgtaggcagggtgcaccaggatctgagtcagtatcagaggtgagtgggccaaagaagagcatgctggttgtgtcagagtttattggctgctcgccgtcactgagtggtgctattagggttaacccatggaatatagaggcaacagcagaggcgatgaatgaggccatttcaatgccagaacaggaaaaacagttgaggcatgagaaacattaccgttatgtcagcagccatgatgttgcttattggtcaaagagcttcatcctagacttggaaagggcttgtagggaccactttaagaggacttgttggggcatagggttgggttttggtttcagggtggtggccttggaccctcatttcagaaagcttaacatggattcaattgttaatgcttatgagatttcagagagcagggctatattgcttgattatgatggaacactggttcctcaaacttccatcaacaaggaacctagtccagaggttttgaacatcatcaataccctttgctcagatagtagaaacatcgtttttcttgtcagtggtagagacaaagatacgttaggaaagtggttctcctcatgtccaaaattggggattgcagctgaacatggttacatcttgaggtggtctagcaaagaagaatggcaaacatgcacccaggccatggactttggatggatgcaaatggcaaagccagtgatgaatttatatacagaagcaactgatggatcctacattgagagaaaagaaagtgccttggtgtggcaccatcaggatgctgacccaggctttggatcctcacaggcaaaggagctgcttgatcacctggaaagtgtactagcaaatgaaccagtctctgtcaagagtggacagttcatcgttgaagtcaagccacagggagtaagcaagggaatagttgccgagaggatacttgcatcagtgaaggagaggggaaagcaggctgatttcgtattgtgcatcggcgatgataggtctgatgaggacatgtttgaaaatattgccgatatcattaagaggaatatggttgctccaagaacatcgctgtttgcatgcactgtgggacaaaaaccaagcaaagccaaattctacctggacgatacatttgaagtggtcgctatgctgagcgcacttgcagatgccactggagctgaactgaaatctgattcggctgatgaattggcggcatctatctcatcacttgatattggtgacgaacaatcagaatccagcgatacaccaattggagggtcttagccagttttctcttgaatttcagaatataatgattatttcaatagtcaattctacagaggggaagcttctcaatctgctgcactccaagtttatccagttgggcaagatagtagtctgtcgctgcaaggcgtagatccatatgttcatagctgactcgccgacttggcatattctttgactttctcattcctggttgaagtaaaatgaaagcctgacagaaggaaagggaactgtgtggctgaagtaattggggaaagttataggagtggcaaatgctaaaggagcccgtgcgcagcttctgatatgatcccttattaacatgacattacaaagtggtgtcactttttgaactatcagtagtagattcatgtgctgccacaagtgaggatgtcagcgcatgacactacatctgtaggcagatctgttcaagttgtacattgacgctgttggtcacatcaaaccctgcgcaaggaatagtttggatggagcattcttctcccctgtgaagggtggggtgccatcaagcagcattgaaccatcacaacccagtatcttacatgattcctatgattagtagctgaagaaatgtgaagtactaagcatatgtgcagattcgatggcacttgcatcgatcggcgctatagattaccacatgatccaaatgcggtaatagtcccaccaaagattcaaacggtttttttaaatatatatataataccaaaaaaactgccttccggtggctaattcgaatcaatataacgaagtaactgaagggagagaagtttcagataaataaacctttatttcaaggcgaggtatcatatgtgctagagcagcccggatgcagataccccaaacgagatgcttaccgtgaaagcacg

SEQ ID NO: 214404 - DNA, 1196 bp, Zea Mays
cgttgtcaacaagatagaatattatattccatttcgtataacgttttcatatatcatctgcagatcaagaagtgaagaccgaagaacttcgacgacagagcagagaaagggctagcacttgattaacatggtacatcgactgattaagcaagctacacgcttagcatcggagttggaaaagttcccgagtcctgacgagaagcaacgcattacgtacgcatactcgcgagagcaagaactagagaaatcacggagcaaatggtagacatgctactactagctagcgctagcttgcacaggatgccatcacatcatgcatgcatggcggcgcgtatagaagtgttggctggtggtggtgttcatcagtcgtagagcggcgggcactggaagcccgacggcgcgtgcttgccgcaggtgatgagcaggttgagcgcgatggggaggtagatgttgatgttgagcaggcgcgcgcggatggtggtgcagaggcacagcgccgcgtccaggtccgccaccccctgcaccagcgggcagcacttggacctggcctcctgcccgatcaccaggtggatcagcccgctcagcacgtccacgcacgcgttcagcttcagcgtgtcgatcgggcacgtccgcaccgccggcggcgtcggcggaacgtacggtggcacgtagggtggtgatggccgaggcgtcggggggacgtagggtggcacgtacggtggtggtgatggccgaggcgtcggcgggacggggacgtatggtggcacgtagggcggtgacggccgaggcgtcggcgggacatacggtggcacgtacggcggtgacggccgaggcgtcggaggcacgtacggagggttgcacggcgggcacttgggcggcttgccatggtggtgcttgggcggcttgctgtggccgccgccggagccggagccgggtgaaggccacgtcggcgagccactgccgggcgcgcccggtgcacagttgctgctctgccacgccagcgagccggggagcaggaggaggccggcggcggcggcgaggagcaggaggacgggaactgaggtggaggttgccattgcgccttggctcaacgcagcggcgcgcgacgggctgttctgtgcacactgcagcgcacgcgtctccttttatagaggaggagcgtcacgtacggtccctccgcactctgactctctggt

SEQ ID NO: 214405 - DNA, 2200 bp, Zea Mays
gcgcccgcaacaccgatgcgccgccgccccctggccctagcgcctcgcgccgtcgctccatggccggtggccctagcgccccgcgccgccgctctgtggccgatggccctagccctaggcgccgccgctccgtgggccgtggccctatcgatcatgccggagcaccgcccaccggctagctggcagcccgcagccgccacggcaccacgcgtccgactcccacgtggccatgcctcgtcctccgtgctcgcctagccgctagcagcctagcgcgacagtcgtcatgaaaaacttttgatttcgccaggagacaaacatgctacataccctcataagaatatgaatattgaggaggaacccacaaacaaagaagatcatatattgaatgtgtcacatacagaaggtcatgaaaaccttttgatttcgccaggagacaaacatggtacatcccttcgtgaggatgtgaatattgaggaggaacccacaatcaaagaagatcatatattgaatgtgtcacatatagacggtcataaaaaccttttgatttcgccaggagacaaatatgctacattccctcatgaggatgtgaatattgtggaggaacccacaagtaaataagatcgtatattgaatgtgtcacacacaaaggggctgtggaggatcgatcacaacataagaaccgagcgtctgctttatctcggcttcgaaccctgattgctcttaaagttaggaggccgataaacctggaagactacactccacctgttgagcttcttcagatattacccctgaagtccagcgttagaggaaatgatgttggcccccaaatcggtccaaataactcaaaattttctccaggaatgcaagcattattagacctgctgtttgctgttgaagattctgtatcagatgcagcaaagattttaggcctaagcaccggtgctttgtcaagattgattctgtcagatgattctctccgaacggccgcgaatgaactgcgagcttcgaagggcaccggtgctgtactacgtgctcctgacgttgcaggacagcgtgcacaaggtcttctacgccgtcgtcgaggccgctgcagttcgcgcagacaacagccatcttggagggttggcgaggtatccggtctctgcaactcttccacagattggatccagattattccttacatggggtgtcttctggagttttcctgaggtgattgactgactcgagaatttgccgacgcttgaagaaggacctaatgtgagcttttacatacttgatgaacagcttgagctcttgagcaaggtgctgaatgcaggggatgacatgattggtgttgagtgcttagaagaagattgtgatggcaaggttctatttgtttgaggttgcttcaccattccccaaagcacattgcatcttgttttagtgtttttttgattgccgtcgtcgaggccgctgcagttcgcgcagacaacagccatcttggaggtatctaattccaatattgtatgtctcggttgaacttgtgaaggcgttgcaagcacatatcattaactgggatattcatatgtttgatgaggagatcggcaataccactcagggtggcaagtttgaccatgcagatcgtttgttccaaagcattgagaacgcttacataaatagcttatcaaatacaagtgacgtcaaagagcttattccagaattcttttacatgcccgagtttcttgaaaattcaaattcatatcatcttggtgtcaagcaggatggggaacctataggcgatgttgctctccctccatgggcaaaggatgataactcaagtgacgagtttgacaaagattctattgagagtgatgatagatctcttgaagagctaagctgggagacactagaacttcttgtggtacctcatatattcagcatcagacgaagcacatggagatcaaccttcacttcgtccgtgagcgtgtcgccgacggtgatgttcgcattctcagcatcccgaccacttcgtagtttgccgacattttcaccaaggggctgccgtcgagtgtattcactgagtttcgatctagtctcaacatctgtacaggatagaattgagactgtaggaggtgttagactcctgctaagggttaggcctgggccttcttgtatttacctgattacccctatgtaatgggcttggcccacctaactgcca

SEQ ID NO: 214406 - DNA, 3407 bp, Zea Mays
gcgcccgcaacaccgatgcgccgccgccccctggccctagcgcctcgcgccgtcgctccatggccggtggccctagcgccccgcgccgccgctctgtggccgatggccctagccctaggcgccgccgctccgtgggccgtggccctatcgatcatgccggagcaccgcccaccggctagctggcagcccgcagccgccacggcaccacgcgtccgactcccacgtggccatgcctcgtcctccgtgctcgcctagccgctagcagcctagcgcgacagtcggcagtcatgaaaaacttttgatttcgccaggagacaaacatgctacataccctcataagaatatgaatattgaggaggaacccacaaacaaagaagatcatatattgaatgtgtcacatacagaaggtcatgaaaaccttttgatttcgccaggagacaaacatggtacatcccttcgtgaggatgtgaatattgaggaggaacccacaatcaaagaagatcatatattgaatgtgtcacatatagacggtcataaaaaccttttgatttcgccaggagacaaatatgctacattccctcatgaggatgtgaatattgtggaggaacccacaagtaaataagatcgtatattgaatgtgtcacacacaaaggggctgtggaggatcgatcacaacataagaaccgagcgtctgctttatctcggcttcgaaccctgattgctcttaaagttaggaggccgataaacctggaagactacactccacctgttgagcttcttcagatattacccctgaagtccagcgttagaggaaatgatgttggcccccaaatcggtccaaataactcaaaattttctccaggaatgcaagcattattagacctgctgtttgctgttgaagattctgtatcagatgcagcaaagattttaggcctaagcaccggtgctttgtcaagattgattctgtcagatgattctctccgaacggccgcgaatgaactgcgagcttcgaagggcaccggtgctgtactacgtgctcctgacgttgcaggacagcgtgcacaaggtcttctacgccgtcgtcgaggccgctgcagttcgcgcagacaacagccatcttggagggttggcgaggtatccggtctctgcaactcttccacagattggatccagattattccttacatggggtgtcttctggagttttcctgaggtgattgactgactcgagaatttgccgacgcttgaagaaggacctaatgtgagcttttacatacttgatgaacagcttgagctcttgagcaaggtgctgaatgcaggggatgacatgattggtgttgagtgcttagaagaagattgtgatggcaaggttctatttgtttgaggttgcttcaccattccccaaagcacattgcatcttgttttagtgtttttttgattgccgtcgtcgaggccgctgcagttcgcgcagacaacagccatcttggaggtatctaattccaatattgtatgtctcggttgaacttgtgaaggcgttgcaagcacatatcattaactgggatattcatatgtttgatgaggagatcggcaataccactcagggtggcaagtttgaccatgcagatcgtttgttccaaagcattgagaacgcttacataaatagcttatcaaatacaagtgacgtcaaagagcttattccagaattcttttacatgcccgagtttcttgaaaattcaaattcatatcatcttggtgtcaagcaggatggggaacctataggcgatgttgctctccctccatgggcaaaggatgataactcaagtgacgagtttgacaaagattctattgagagtgatgatagatctcttgaagagctaagctgggagacactagaacttcttgtggtacctcatatattcagataattgggcaacggtgtgtgtatatgttcagattcagaaagtgaggacaatatagcgtttgcagcagtggtcgtcgccctgtgcagggagggcctgctgatcagagatcaagagggaaagcagaagacacgttgtgccgggaggaaacacacgacgaagtagagacttagaagcaataagctaaatatttagacaactttaattcgagcactccaagaggtgtctcaaacaactggttaattcgttttatgaccaaaagaggaaaaatggccatctaatagttttgtaaaacaactccctaaagataagcacttgcttaatctccccctcaactcgccaacatgtgtgtgccttctgcgcttgctatttgcttgggtagttttgtaaaacaactccctaaagataagcacttgcataatctccccctcaactcgccaacatgtgtgccttctgcgcttgctatttgcttgggtgcccctcctctggttgtacctgcaccctcctgtccatctcgggaatatatcaaatacaaaccacgttttggtgcaaaccctgtgtaaacctactaaaaaaagtttcaaaaaattctaaaaaaaaacatgaatgtacatctcagcttacctcatctatatacaaaattttatgatcaaattcatcttactctagcagttacaaaaaagacaaattttggtgcatttgaactattaccgtttatcagaaattttgtcttttttgtaactgctaaagtaagatgaatttgaccatgaaattttgtatatggatgaggtaagctgagatgtacattcatgtctttttttagaattttttaaaactttttttagtaggtttacatagggtttgcacaaaaacttggtttgcattcgatatgtttccatccatcttctcctcctgctcgattttttttttgagtttttggaagctaccctcctatctctttccttaaaaccgcaacccctttccctccgcgccctcacttcacggctgccaagaagtcttcaacgcccgacgcgtggccgcacagggcgaggtctcgctcgatggccaggcttggccttcgtgccaccacccacccacgcttcctcaccaccgtggagatggatgtgtcgctgctgtggtggccctagcttctgcgtgggcccacgtgtagatgccgctggagaagatttattagggcgttcgatggtagcctcctcgccccagtacgctgacgtgcgcctcaacactgcccccacgtcccagcagcagcactaagggctagtttgggagccaaaaaactgaaggggttttatggctcccaaactagtcctaagacactaacgtcagcgtgttgctcccctcgtcgaccatgtgggtacgttccccatttgttttctccttccttgtcctcgccgttccccatttcgcatttctacatccgtacctcggcatttcccctaagtctgccttcctctgtcgacccgtcgg

SEQ ID NO: 214407 - DNA, 3481 bp, Zea Mays
gcgcccgcaacaccgatgcgccgccgccccctggccctagcgcctcgcgccgtcgctccatggccggtggccctagcgccccgcgccgccgctctgtggccgatggccctagccctaggcgccgccgctccgtgggccgtggccctatcgatcatgccggagcaccgcccaccggctagctggcagcccgcagccgccacggcaccacgcgtccgactcccacgtggccatgcctcgtcctccgtgctcgcctagccgctagcagcctagcgcgacagtcggcagtcatgaaaaacttttgatttcgccaggagacaaacatgctacataccctcataagaatatgaatattgaggaggaacccacaaacaaagaagatcatatattgaatgtgtcacatacagaaggtcatgaaaaccttttgatttcgccaggagacaaacatggtacatcccttcgtgaggatgtgaatattgaggaggaacccacaatcaaagaagatcatatattgaatgtgtcacatatagacggtcataaaaaccttttgatttcgccaggagacaaatatgctacattccctcatgaggatgtgaatattgtggaggaacccacaagtaaataagatcgtatattgaatgtgtcacacacaaaggggctgtggaggatcgatcacaacataagaaccgagcgtctgctttatctcggcttcgaaccctgattgctcttaaagttaggaggccgataaacctggaagactacactccacctgttgagcttcttcagatattacccctgaagtccagcgttagaggaaatgatgttggcccccaaatcggtccaaataactcaaaattttctccaggaatgcaagcattattagacctgctgtttgctgttgaagattctgtatcagatgcagcaaagattttaggcctaagcaccggtgctttgtcaagattgattctgtcagatgattctctccgaacggccgcgaatgaactgcgagcttcgaagggcaccggtgctgtactacgtgctcctgacgttgcaggacagcgtgcacaaggtcttctacgccgtcgtcgaggccgctgcagttcgcgcagacaacagccatcttggagggttggcgaggtatccggtctctgcaactcttccacagattggatccagattattccttacatggggtgtcttctggagttttcctgaggtgattgactgactcgagaatttgccgacgcttgaagaaggacctaatgtgagcttttacatacttgatgaacagcttgagctcttgagcaaggtgctgaatgcaggggatgacatgattggtgttgagtgcttagaagaagattgtgatggcaaggttctatttgtttgaggttgcttcaccattccccaaagcacattgcatcttgttttagtgtttttttgattgccgtcgtcgaggccgctgcagttcgcgcagacaacagccatcttggaggtatctaattccaatattgtatgtctcggttgaacttgtgaaggcgttgcaagcacatatcattaactgggatattcatatgtttgatgaggagatcggcaataccactcagggtggcaagtttgaccatgcagatcgtttgttccaaagcattgagaacgcttacataaatagcttatcaaatacaagtgacgtcaaagagcttattccagaattcttttacatgcccgagtttcttgaaaattcaaattcatatcatcttggtgtcaagcaggatggggaacctataggcgatgttgctctccctccatgggcaaaggatgataactcaagtgacgagtttgacaaagattctattgagagtgatgatagatctcttgaagagctaagctgggagacactagaacttcttgtggtacctcatatattcaggtatccaagctctgtgctaccgattaattgctgaaaactgaacttgggttcatgttaaatattcccaaggaaatataattgggcaacggtgtgtgtatatgttcagattcagaaagtgaggacaatatagcgtttgcagcagtggtcgtcgccctgtgcagggagggcctgctgatcagagatcaagagggaaagcagaagacacgttgtgccgggaggaaacacacgacgaagtagagacttagaagcaataagctaaatatttagacaactttaattcgagcactccaagaggtgtctcaaacaactggttaattcgttttatgaccaaaagaggaaaaatggccatctaatagttttgtaaaacaactccctaaagataagcacttgcttaatctccccctcaactcgccaacatgtgtgtgccttctgcgcttgctatttgcttgggtagttttgtaaaacaactccctaaagataagcacttgcataatctccccctcaactcgccaacatgtgtgccttctgcgcttgctatttgcttgggtgcccctcctctggttgtacctgcaccctcctgtccatctcgggaatatatcaaatacaaaccacgttttggtgcaaaccctgtgtaaacctactaaaaaaagtttcaaaaaattctaaaaaaaaacatgaatgtacatctcagcttacctcatctatatacaaaattttatgatcaaattcatcttactctagcagttacaaaaaagacaaattttggtgcatttgaactattaccgtttatcagaaattttgtcttttttgtaactgctaaagtaagatgaatttgaccatgaaattttgtatatggatgaggtaagctgagatgtacattcatgtctttttttagaattttttaaaactttttttagtaggtttacatagggtttgcacaaaaacttggtttgcattcgatatgtttccatccatcttctcctcctgctcgattttttttttgagtttttggaagctaccctcctatctctttccttaaaaccgcaacccctttccctccgcgccctcacttcacggctgccaagaagtcttcaacgcccgacgcgtggccgcacagggcgaggtctcgctcgatggccaggcttggccttcgtgccaccacccacccacgcttcctcaccaccgtggagatggatgtgtcgctgctgtggtggccctagcttctgcgtgggcccacgtgtagatgccgctggagaagatttattagggcgttcgatggtagcctcctcgccccagtacgctgacgtgcgcctcaacactgcccccacgtcccagcagcagcactaagggctagtttgggagccaaaaaactgaaggggttttatggctcccaaactagtcctaagacactaacgtcagcgtgttgctcccctcgtcgaccatgtgggtacgttccccatttgttttctccttccttgtcctcgccgttccccatttcgcatttctacatccgtacctcggcatttcccctaagtctgccttcctctgtcgacccgtcgg

SEQ ID NO: 214408 - DNA, 3497 bp, Zea Mays
ccacgtggcgcgacagctcgtctctgtcgtctatggcggcggcagaggtgtactcgccgaccgcggcggcgcagcagcagagggagaaggcgacgtcgcaggtgtggcgggcggtggtggggtggatcggcttccttgttcaggttctgcttcagatcctccggggcacgccgtcctgcgcccaactctttccttcggcggcgtccggtacccgctcctcttcgggcctgcggcctcgaactcgtcgccggaggtggcctccgtccgtccagctctgaggcgggcccatggaaatcgttgccatatcagatcagcttcgccacggaccccatctgcgacccccggtgacgcgctccgcccacagctctgaggcgggcccatggaaatcgttgccatatcagatcagcttcgccacggaccccatctgcgacccccggtgacgcgctccgcccaccgcccaccgccgcccgggaatggctcgagcgctgctcctgctgcgagtagctgtagctcgctaccctcctctcccggcctcacccgcgctcctccagccgcagccgctgctgcgctgccacgcgccctcccagtacaaatcccagctccgcttcctctcctccctctcctcgtccgtgcccaacagctcagatgctcccagcgacggcgggggcgaccgcgacggggaagaagatggcgcgaagagtggcagccacgtcgattacttggggatgagcgacgaggagctcatggagcagtgcgatatgggcacgttcaaggcgtccggccccggcggccagcactgcaacaagcgcgagtccgccgtccggctgaaacaccttcccatcggcatcatcgcccaggctgtggaggatcgatcacaacataagaaccgagcgtctgctttatctcggcttcgaaccctgattgctcttaaagttaggaggccgataaacctggaagactacactccacctgttgagcttcttcagatattacccctgaagtccagcgttagaggaaatgatgttggcccccaaatcggtccaaataactcaaaattttctccaggaatgcaagcattattagacctgctgtttgctgttgaagattctgtatcagatgcagcaaagattttaggcctaagcaccggtgctttgtcaagattgattctgtcagatgattctctccgaacggccgcgaatgaactgcgagcttcgaagggcaccggtgctgtactacgtgctcctgacgttgcaggacagcgtgcacaaggtcttctacgccgtcgtcgaggccgctgcagttcgcgcagacaacagccatcttggagggttggcgaggtatccggtctctgcaactcttccacagattggatccagattattccttacatggggtgtcttctggagttttcctgaggtgattgactgactcgagaatttgccgacgcttgaagaaggacctaatgtgagcttttacatacttgatgaacagcttgagctcttgagcaaggtgctgaatgcaggggatgacatgattggtgttgagtgcttagaagaagattgtgatggcaaggttctatttgtttgaggttgcttcaccattccccaaagcacattgcatcttgttttagtgtttttttgattgccgtcgtcgaggccgctgcagttcgcgcagacaacagccatcttggaggtatctaattccaatattgtatgtctcggttgaacttgtgaaggcgttgcaagcacatatcattaactgggatattcatatgtttgatgaggagatcggcaataccactcagggtggcaagtttgaccatgcagatcgtttgttccaaagcattgagaacgcttacataaatagcttatcaaatacaagtgacgtcaaagagcttattccagaattcttttacatgcccgagtttcttgaaaattcaaattcatatcatcttggtgtcaagcaggatggggaacctataggcgatgttgctctccctccatgggcaaaggatgataactcaagtgacgagtttgacaaagattctattgagagtgatgatagatctcttgaagagctaagctgggagacactagaacttcttgtggtacctcatatattcagataattgggcaacggtgtgtgtatatgttcagattcagaaagtgaggacaatatagcgtttgcagcagtgcttcttactctgagatcttcgggtaatctggatactcaaactaaagggtgtccataactctgttcagcctacgcttctctcgattatcgaaggctgcagtcatcaactggtcttccttttttgtaaaattttccaaaatctcattacacattgtcttaatcatttctaaccatttagcgcaaggttccttgaatagatcctgaaatttaaaacgatacgataatctcacaaggcttcctttagccacgtccttctttagcttcggcattctccaaccatccagtgttgggaatactttgttagaaagaaattcctgaactaagtcttgagtactattgtgctcgaccattgtactaaaagtaacttgggccacctgcgctagataacccagacccatcttgcagactggcctcgttaagccgaagttcaagctcatcgggctcatcacagtgtccttaaatttatctttgcccttaatatcagccttcatataaaaccactcattggtccaaccgattggccatttcttttgatatcccaacactggagccttcatatcctttctataagcaaagttgtagcacccaaagttcttatgaagaccgtctgaaggcctcgacttcgtttgataatgaagctcatgtactctgcagaacccttcagcatttgcactcataccctggcttcgcagagcctatatataaatattgagtctaacaattgtgtttggtgttaactgatgcaagtatatttcaaatttattcaaaacttcggcgatcatctcgtacatcaggaagcgaagaccagcacgaaagaagcttctgaacacaataacctcatcatccttcggctcaggaataatttcactaccaacaaaccggatcatatcatcttccttctcaccaatatacccaagtttcttcagcacatccagatcttcagctctcacagtggacacaccaaactccagatgacttggtttgtttggacaaagaatactaggatcctctttgtcactgctaacttcggcttcagaatcactcctttctgcagcacttacttcctcgccagctttcggatctatgatactagactccctcatcacctctgaaattggagcgatctcaattgtatctggctttgcaccctcgaatgtcaatcaagcggttgaacggaccgtcaccatcgacgtaatgccgaagctttacgaaaatgcttgagcgcagcgaaaacagcttcggaagcagagaaatttgtgccagcaggttggtgtaaaaaagcaataaatgttgtgacattttac

SEQ ID NO: 214409 - DNA, 2383 bp, Zea Mays
tgtcgtctatggcggcggcagaggtgtactcgccgaccgcggcggcgcagcagcagagggagaaggcgacgtcgcaggtgtggcgggcggtggtggggtggatcggcttccttgttcaggttctgcttcagatcctccggggcacgccgtcctgcgcccaactctttccttcggcggcgtccggtacccgctcctcttcgggcctgcggcctcgaactcgtcgccggaggtggcctccgtccgtccagctctgaggcgggcccatggaaatcgttgccatatcagatcagcttcgccacggaccccatctgcgacccccggtgacgcgctccgcccacagctctgaggcgggcccatggaaatcgttgccatatcagatcagcttcgccacggaccccatctgcgacccccggtgacgcgctccgcccaccgcccaccgccgcccgggaatggctcgagcgctgctcctgctgcgagtagctgtagctcgctaccctcctctcccggcctcacccgcgctcctccagccgcagccgctgctgcgctgccacgcgccctcccagtacaaatcccagctccgcttcctctcctccctctcctcgtccgtgcccaacagctcagatgctcccagcgacggcgggggcgaccgcgacggggaagaagatggcgcgaagagtggcagccacgtcgattacttggggatgagcgacgaggagctcatggagcagtgcgatatgggcacgttcaaggcgtccggccccggcggccagcactgcaacaagcgcgagtccgccgtccggctgaaacaccttcccatcggcatcatcgcccaggctgtggaggatcgatcacaacataagaaccgagcgtctgctttatctcggcttcgaaccctgattgctcttaaagttaggaggccgataaacctggaagactacactccacctgttgagcttcttcagatattacccctgaagtccagcgttagaggaaatgatgttggcccccaaatcggtccaaataactcaaaattttctccaggaatgcaagcattattagacctgctgtttgctgttgaagattctgtatcagatgcagcaaagattttaggcctaagcaccggtgctttgtcaagattgattctgtcagatgattctctccgaacggccgcgaatgaactgcgagcttcgaagggcaccggtgctgtactacgtgctcctgacgttgcaggacagcgtgcacaaggtcttctacgccgtcgtcgaggccgctgcagttcgcgcagacaacagccatcttggagggttggcgaggtatccggtctctgcaactcttccacagattggatccagattattccttacatggggtgtcttctggagttttcctgaggtgattgactgactcgagaatttgccgacgcttgaagaaggacctaatgtgagcttttacatacttgatgaacagcttgagctcttgagcaaggtgctgaatgcaggggatgacatgattggtgttgagtgcttagaagaagattgtgatggcaaggttctatttgtttgaggttgcttcaccattccccaaagcacattgcatcttgttttagtgtttttttgattgccgtcgtcgaggccgctgcagttcgcgcagacaacagccatcttggaggtatctaattccaatattgtatgtctcggttgaacttgtgaaggcgttgcaagcacatatcattaactgggatattcatatgtttgatgaggagatcggcaataccactcagggtggcaagtttgaccatgcagatcgtttgttccaaagcattgagaacgcttacataaatagcttatcaaatacaagtgacgtcaaagagcttattccagaattcttttacatgcccgagtttcttgaaaattcaaattcatatcatcttggtgtcaagcaggatggggaacctataggcgatgttgctctccctccatgggcaaaggatgataactcaagtgacgagtttgacaaagattctattgagagtgatgatagatctcttgaagagctaagctgggagacactagaacttcttgtggtacctcatatattcagcatcagacgaagcacatggagatcaaccttcacttcgtccgtgagcgtgtcgccgacggtgatgttcgcattctcagcatcccgaccacttcgtagtttgccgacattttcaccaaggggctgccgtcgagtgtattcactgagtttcgatctagtctcaacatctgtacaggatagaattgagactgtaggaggtgttagactcctgctaagggttaggcctgggccttcttgtatttacctgattacccctatgtaatgggcttggcccacctaactgcca

SEQ ID NO: 214410 - DNA, 3043 bp, Zea Mays
cgccgtcctgcgcccaactctttccttcggcggcgtccggtacccgctcctcttcgggcctgcggcctcgaactcgtcgccggaggtggcctccgtccgtccagctctgaggcgggcccatggaaatcgttgccatatcagatcagcttcgccacggaccccatctgcgacccccggtgacgcgctccgcccacagctctgaggcgggcccatggaaatcgttgccatatcagatcagcttcgccacggaccccatctgcgacccccggtgacgcgctccgcccaccgcccaccgccgcccgggaatggctcgagcgctgctcctgctgcgagtagctgtagctcgctaccctcctctcccggcctcacccgcgctcctccagccgcagccgctgctgcgctgccacgcgccctcccagtacaaatcccagctccgcttcctctcctccctctcctcgtccgtgcccaacagctcagatgctcccagcgacggcgggggcgaccgcgacggggaagaagatggcgcgaagagtggcagccacgtcgattacttggggatgagcgacgaggagctcatggagcagtgcgatatgggcacgttcaaggcgtccggccccggcggccagcactgcaacaagcgcgagtccgccgtccggctgaaacaccttcccatcggcatcatcgcccaggctgtggaggatcgatcacaacataagaaccgagcgtctgctttatctcggcttcgaaccctgattgctcttaaagttaggaggccgataaacctggaagactacactccacctgttgagcttcttcagatattacccctgaagtccagcgttagaggaaatgatgttggcccccaaatcggtccaaataactcaaaattttctccaggaatgcaagcattattagacctgctgtttgctgttgaagattctgtatcagatgcagcaaagattttaggcctaagcaccggtgctttgtcaagattgattctgtcagatgattctctccgaacggccgcgaatgaactgcgagcttcgaagtgtttctttgattgcagggcaccggtgctgtactacgtgctcctgacgttgcaggacagcgtgcacaaggtcttctacgccgtcgtcgaggccgctgcagttcgcgcagacaacagccatcttggagggttggcgaggtatccggtctctgcaactcttccacagattggatccagattattccttacatggggtgtcttctggagttttcctgaggtatcgccactagcaaattttcgtgttttcatatatgacaccatttttaggaatacatcttaatttgtacatgaactttagagtttccaatttataattttaaattttagattagatacatatctatgtgttgttgtttggcgggacctcgaattatgacgcagttctaggtttaatagcatttgctagaactagagaacacatgtgttagatgattatgggacttttaggactaaggttagtcgattatttaattttttattccaataatggaataagaaactatgagtgggtattgtaacaagtttctacagcaggcgtattagaaattgataaatagcgctttttaccctatttcaactgggctgttctattatatttctggacctgcaattggatgttgatgttatgttcttgccataaagtccaatgtatcgtgctagctgtacactgatctgtaacaggtgattgactgactcgagaatttgccgacgcttgaagaaggacctaatgtgagcttttacatacttgatgaacagcttgagctcttgagcaaggtgctgaatgcaggggatgacatgattggtgttgagtgcttagaagaagattgtgatggcaaggttctatttgtttgaggttgcttcaccattccccaaagcacattgcatcttgttttagtgtttttttgattgccgtcgtcgaggccgctgcagttcgcgcagacaacagccatcttggaggtatctaattccaatattgtatgtctcggttgaacttgtgaaggcgttgcaagcacatatcattaactgggatattcatatgtttgatgaggagatcggcaataccactcagaatgaagatggtcaaaatcttgatgttttctttggttgcatccgcattctggactattcctgacagcatttaagtttttattacggttcaacggtcgtccagcgtaatccttttacaaccatgggtggcaagtttgaccatgcagatcgtttgttccaaagcattgagaacgcttacataaatagcttatcaaatacaagtgacgtcaaagagcttattccagaattcttttacatgcccgagtttcttgaaaattcaaattcatatcatcttggtgtcaagcaggatggggaacctataggcgatgttgctctccctccatgggcaaaggatgataactcaagtgacgagtttgacaaagattctattgagagtgatgatagatctcttgaagagctaagctgggagacactagaacttcttgtggtacctcatatattcagataattgggcaacggtgtgtgtatatgttcagattcagaaagtgaggacaatatagcgtttgcagcagtgtgccgaagatgatccacagccgatgctgttaacaaacacatacaggaaggtagaacttcgggtagtcgacgtgcataccctactaatgaagctggactagaccataaggagtcttcgaggctcatttcgtcgaagatagaaggaaaagaccactgtacccttggcatgtataatagtctaaatgtgtaggcttaagggcataattgaaaattcatcgaaaatgtatcccacgcctataaatagaggaacagtgccatgcattgttcagactttttgttcaagggtagaattcatttctcactatacgaagctgtaatctctctacccctctcattttagttttacgaagctcaaggtactcatgtgaattcttgttccataaaagaagaaatatatctatgtgacttctttta

SEQ ID NO: 214411 - DNA, 431 bp, Zea Mays
cttctgcgtacagttatgtagcccagcttcataacttgaaggatgataactcaagtgacgagtttgacaaagattctattgagagtgatgatagatctcttgaagagctaagctgggagacactagaacttcttgtggtacctcatatattcagacgaagcacatggagatcaaccttcacttcgtccgtgagcgtgtcgccgacggtgatgttcgcattctcagcatcccgaccacttcgtagtttgccgacattttcaccaaggggctgccgtcgagtgtattcactgagtttcgatctagtctcaacatctgtacaggatagaattgagactgtaggaggtgttagactcctgctaagggttaggcctgggccttcttgtatttacctgattacccctatgtaatgggcttggcccacctaactgcca

SEQ ID NO: 214412 - DNA, 1963 bp, Zea Mays
gcgcccgcaacaccgatgcgccgccgccccctggccctagcgcctcgcgccgtcgctccatggccggtggccctagcgccccgcgccgccgctctgtggccgatggccctagccctaggcgccgccgctccgtgggccgtggccctatcgatcatgccggagcaccgcccaccggctagctggcagcccgcagccgccacggcaccacgcgtccgactcccacgtggccatgcctcgtcctccgtgctcgcctagccgctagcagcctagcgcgacagtcggcagtcatgaaaaacttttgatttcgccaggagacaaacatgctacataccctcataagaatatgaatattgaggaggaacccacaaacaaagaagatcatatattgaatgtgtcacatacagaagggagacaaacatggtacatcccttcgtgaggatgtgaatattgaggaggaacccacaatcaaagaagatcatatattgaatgtgtcacatatagacggtcataaaaaccttttgatttcgccaggagacaaatatgctacattccctcatgaggatgtgaatattgtggaggaacccacaagtaaataagatcgtatattgaatgtgtcacacacaaaggggtacatttatcagctattccaaattttaaataataaaataaatcaatttctacttttattacctgaaattaatttctatttgtttaagttagtgatatgtgtttaatttgcatttgcagtcataaaacctttttacagtttatggctgaaaatgatatgtctactggtgttatcttatatgatgacgtaaaggattgtatgataacagttattgtaagagaaatgagtgtagactttctaaattacatttttaataaattcgagagaggaaagtgttggagtgatggctgagaattaagtgatatggaaatggaagttgaagcaagaagaaagtttgtcattaccaaggaggctgacgcagatcttactgttgaagatgacacacaaaatatatttgttcatcttggttttctggtaccgtattataaaaaaggaaactcaatccagcattttttgattccttcggaaaagatatattatacttttctgatcttaagaatttttcaataaaatggaaaaggtttgtcaaactcattagatcagcgttagctttgaaagcgcctttggtcagattaaccttaatctgtgagatgtctacaattatcgtattgcagctttaattatctaattctgcatattattaagtattataaaaaaatgtcaagattgacgtgcttcagtaaaatgggttatgccacacagacaggtctaccactacaggaacaatatctctttaaggtatttttatgataagtggtgttgtaacttatgacacgtaatgtggtatttaagaaacttcgttaagcatgtcctgacctacgtaaaagagtagaggaaatgctgaaggaagtttcttcaataccacattacgtgccataagttacaacaccacttatcataggaatacattaaagagatattgttcctgtagtggtagacctgtccgtgtggcataacccattttattgaagcacgccaatattgacattttttgataacacttgatgatatgcagaattagataatttaagctgcaatgcgataactgtggacatctcacagattaaggtcgatctgatcaaagacgcttttaaagctaacactgatctaatgagtttgacaaacattttccattttattagaaatttcttaaaatcatgaaagtataagatattttttctcaaggaataaaaaaatgctagaattgagttttctttcttataatacggtaccaggagaccaagataaacaaataaattttgtgtgccctcttcaacagtaagatctgcgtcagcctacttggtaatgacaaactttcttcctgcctcaatttct

SEQ ID NO: 214413 - DNA, 1830 bp, Zea Mays
gcgcccgcaacaccgatgcgccgccgccccctggccctagcgcctcgcgccgtcgctccatggccggtggccctagcgccccgcgccgccgctctgtggccgatggccctagccctaggcgccgccgctccgtgggccgtggccctatcgatcatgccggagcaccgcccaccggctagctggcagcccgcagccgccacggcaccacgcgtccgactcccacgtggccatgcctcgtcctccgtgctcgcctagccgctagcagcctagcgcgacagtcggcagtcatgaaaaacttttgatttcgccaggagacaaacatgctacataccctcataagaatatgaatattgaggaggaacccacaaacaaagaagatcatatattgaatgtgtcacatacagaaggtcatgaaaaccttttgatttcgccaggagacaaacatggtacatcccttcgtgaggatgtgaatattgaggaggaacccacaatcaaagaagatcatatattgaatgtgtcacatatagacggtcataaaaaccttttgatttcgccaggagacaaatatgctacattccctcatgaggatgtgaatattgtggaggaacccacaatcataaaacctttttacagtttatggctgaaaatgatatgtctactggtgttatcttatatgatgacgtaaaggattgtatgataacagttattgtaagagaaatgagtgtagactttctaaattacatttttaataaattcgagagaggaaagtgttggagtgatggctgagaattaagtgatatggaaatggaagttgaagcaagaagaaagtttgtcattaccaaggaggctgacgcagatcttactgttgaagatgacacacaaaatatatttgttcatcttggttttctggtaccgtattataaaaaaggaaactcaatccagcattttttgattccttcggaaaagatatattatacttttctgatcttaagaatttttcaataaaatggaaaaggtttgtcaaactcattagatcagcgttagctttgaaagcgcctttggtcagattaaccttaatctgtgagatgtctacaattatcgtattgcagctttaattatctaattctgcatattattaagtattataaaaaaatgtcaagattgacgtgcttcagtaaaatgggttatgccacacagacaggtctaccactacaggaacaatatctctttaaggtatttttatgataagtggtgttgtaacttatgacacgtaatgtggtatttaagaaacttcgttaagcatgtcctgacctacgtaaaagagtagaggaaatgctgaaggaagtttcttcaataccacattacgtgccataagttacaacaccacttatcataggaatacattaaagagatattgttcctgtagtggtagacctgtccgtgtggcataacccattttattgaagcacgccaatattgacattttttgataacacttgatgatatgcagaattagataatttaagctgcaatgcgataactgtggacatctcacagattaaggtcgatctgatcaaagacgcttttaaagctaacactgatctaatgagtttgacaaacattttccattttattagaaatttcttaaaatcatgaaagtataagatattttttctcaaggaataaaaaaatgctagaattgagttttctttcttataatacggtaccaggagaccaagataaacaaataaattttgtgtgccctcttcaacagtaagatctgcgtcagcctacttggtaatgacaaactttcttcctgcctcaatttct

SEQ ID NO: 214414 - DNA, 1793 bp, Zea Mays
caaacgtcaggttcgggaaaagctcggaaaagtagttcgtgctccaaaaccaaaaggagattaacaccattttttgacaaagaaaaaaaaagctaatggcgagaaacataaattcagattatatagacttttcacatttgggtggattcgacatgggcatcaattttgacgaatttgaagaaaatgtgaaaaagctcatggagtatcttgattcagctcatgataaagctgtcgaattcattgaagatgtccatgcaaaattttatggtccctttactgatgatgaggtgccaaataacgatcaatctagtcgctatgttatcaccgagtcttcaccaacatctattgagaaggagctagttggaccaaacactgaactttcaactcctcctgcatgcttcattaccatggagaacagttctactggctgtgatactgatgctcataaaacccaatcagaatcattttcaacaaaaagtacaggtttatcctcaatgaatcatgtgtatccagaaaataatttatctgaaggagctcatatcgactcaaacgatctttgtattagaatatatgacagctctgaggaagttattttatggaatccagtgagttctgtaaaaccacagcaatcacatgaacttaccaccatacctcaagatgatcatgcacttcatgctttggaaacagaagtgacagagcaagttggactcaactgttctggacattcagattcttctgtttgcagtggagtgtcaccgctagaaaattcttgtgcaaattgtgaagagaaaatggtattacacagtgcaaatgaccctgttggagtaacagtgcatgaaaatggtgtacgtgtcctggcagattccactaccctaacccaagaatatcatgtatcttacacattacacatggaacaaatgatagagcaagctggactgcattgttctggacattcagatatcctaatacacactacagatttttgtaatgcactgctgctagaagattctagcacaaattatgagatgacagtttgcttgcaaccctaccaggcaactttgcctgggacacaagcaaaccggcctgaagtgcacatggtatcaaccatatcatacagtgcaaatagccctgtggaatcaactatacatggaacttgcacttcacatgactctagcacaagtgcgtccagctgtgctgacgatccaagtatgtcgactgacagcatggttaaatctgtggacatggatggtcagaagcacatgaaaaacgacaaaattaaggtgcacctagcccctcaaccagaaaacgcgtcatttaagaaaatgcttttgaggaacctgtcgaggaaactcaggtggtcaaaggcgcaggcagacacgcatcagaccatggcgcctggatcccagggcgcagaagaccctggatatccactggtttctccatcggatgatgatctggaggatagttgggagatcctgtaatatataataaaccgccaagaacctccgtgacttttcttttttgagctaagtttatccatgtcaggttaactggttttgagggaaggcacgtggcgtattttttacagatctccttggttacagacacgtgagatgttgcacgtacgtgcggcacatccatcggcataataactgtaattctagttgaggatacgtaaagctgtttggattctgtttcggaccttaactgcatgcagacaagacaatgagacaagcgtgtgtccacagcttcgactgtcagatctgtcactagctagtcctcttcttggcagt

SEQ ID NO: 214415 - DNA, 1816 bp, Zea Mays
tcgcgattggccactattgctttgtttgttgttttcttttctttcttccccgaaaaggctggacggcggctccgagctcactcgtcgccggcggctgttgcaggagattaacaccattttttgacaaagaaaaaaaaagctaatggcgagaaacataaattcagattatatagacttttcacatttgggtggattcgacatgggcatcaattttgacgaatttgaagaaaatgtgaaaaagctcatggagtatcttgattcagctcatgataaagctgtcgaattcattgaagatgtccatgcaaaattttatggtccctttactgatgatgaggtgccaaataacgatcaatctagtcgctatgttatcaccgagtcttcaccaacatctattgagaaggagctagttggaccaaacactgaactttcaactcctcctgcatgcttcattaccatggagaacagttctactggctgtgatactgatgctcataaaacccaatcagaatcattttcaacaaaaagtacaggtttatcctcaatgaatcatgtgtatccagaaaataatttatctgaaggagctcatatcgactcaaacgatctttgtattagaatatatgacagctctgaggaagttattttatggaatccagtgagttctgtaaaaccacagcaatcacatgaacttaccaccatacctcaagatgatcatgcacttcatgctttggaaacagaagtgacagagcaagttggactcaactgttctggacattcagattcttctgtttgcagtggagtgtcaccgctagaaaattcttgtgcaaattgtgaagagaaaatggtattacacagtgcaaatgaccctgttggagtaacagtgcatgattccactaccctaacccaagaatatcatgtatcttacacattacacatggaacaaatgatagagcaagctggactgcattgttctggacattcagatatcctaatacacactacagatttttgtaatgcactgctgctagaagattctagcacaaattatgagatgacagtttgcttgcaaccctaccaggcaactttgcctgggacacaagcaaaccggcctgaagtgcacatggtatcaaccatatcatacagtgcaaatagccctgtggaatcaactatacatggaacttgcacttcacatgactctagcacaagtgcgtccagctgtgctgacgatccaagtatgtcgactgacagcatggttaaatctgtggacatggatggtcagaagcacatgaaaaacgacaaaattaaggtgcacctagcccctcaaccagaaaacgcgtcatttaagaaaatgcttttgaggaacctgtcgaggaaactcaggtggtcaaaggcgcaggcagacacgcatcagaccatggcgcctggatcccagggcgcagaagaccctggatatccactggtttctccatcggatgatgatctggaggatagttgggagatcctgtaatatataataaaccgccaagaacctccgtgacttttcttttttgagctaagtttatccatgtcaggttaactggttttgagggaaggcacgtggcgtattttttacagatctccttggttacagacacgtgagatgttgcacgtacgtgcggcacatccatcggcataataactgtaattctagttgaggatacgtaaagctgtttggattctgtttcggaccttaactgcatgcagacaagacaatgagacaagcgtgtgtccacagcttcgactgtcagatctgtcactagctagtcctcttcttggcagt

SEQ ID NO: 214416 - DNA, 1801 bp, Zea Mays
tcgcgattggccactattgctttgtttgttgttttcttttctttcttccccgaaaaggctggacggcggctccgagctcactcgtcgccggcggctgttgcaggagattaacaccattttttgacaaagaaaaaaaaagctaatggcgagaaacataaattcagattatatagacttttcacatttgggtggattcgacatgggcatcaattttgacgaatttgaagaaaatgtgaaaaagctcatggagtatcttgattcagctcatgataaagctgtcgaattcattgaagatgtccatgcaaaattttatggtccctttactgatgatgaggtgccaaataacgatcaatctagtcgctatgttatcaccgagtcttcaccaacatctattgagaaggagctagttggaccaaacactgaactttcaactcctcctgcatgcttcattaccatggagaacagttctactggctgtgatactgatgctcataaaacccaatcagaatcattttcaacaaaaagtacaggtttatcctcaatgaatcatgtgtatccagaaaataatttatctgaaggagctcatatcgactcaaacgatctttgtattagaatatatgacagctctgaggaagttattttatggaatccagtgagttctgtaaaaccacagcaatcacatgaacttaccaccatacctcaagatgatcatgcacttcatgctttggaaacagaagtgacagagcaagttggactcaactgttctggacattcagattcttctgtttgcagtggagtgtcaccgctagaaaattcttgtgcaaattgtgaagagaaaatggtattacacagtgcaaatgaccctgttggagtaacagtgcatgaaaatggtgtacgtgtcctggcagattccactaccctaacccaagaatatcatgtatcttacacattacacatggaacaaatgatagagcaagctggactgcattgttctggacattcagatatcctaatacacactacagatttttgtaatgcactgctgctagaagattctagcacaaattatgagatgacagtttgcttgcaaccctaccaggcaactttgcctgggacacaagcaaaccggcctgaagtgcacatggtatcaaccatatcatacagtgcaaatagccctgtggaatcaactatacatggaacttgcacttcacatgactctagcacaagtgcgtccagctgtgctgacgatccaagtatgtcgactgacagcatggttaaatctgtggacatggatggtcagaagcacatgaaaaacgacaaaattaagaaaatgcttttgaggaacctgtcgaggaaactcaggtggtcaaaggcgcaggcagacacgcatcagaccatggcgcctggatcccagggcgcagaagaccctggatatccactggtttctccatcggatgatgatctggaggatagttgggagatcctgtaatatataataaaccgccaagaacctccgtgacttttcttttttgagctaagtttatccatgtcaggttaactggttttgagggaaggcacgtggcgtattttttacagatctccttggttacagacacgtgagatgttgcacgtacgtgcggcacatccatcggcataataactgtaattctagttgaggatacgtaaagctgtttggattctgtttcggaccttaactgcatgcagacaagacaatgagacaagcgtgtgtccacagcttcgactgtcagatctgtcactagctagtcctcttcttggcagt

SEQ ID NO: 214417 - DNA, 1840 bp, Zea Mays
tcgcgattggccactattgctttgtttgttgttttcttttctttcttccccgaaaaggctggacggcggctccgagctcactcgtcgccggcggctgttgcaggagattaacaccattttttgacaaagaaaaaaaaagctaatggcgagaaacataaattcagattatatagacttttcacatttgggtggattcgacatgggcatcaattttgacgaatttgaagaaaatgtgaaaaagctcatggagtatcttgattcagctcatgataaagctgtcgaattcattgaagatgtccatgcaaaattttatggtccctttactgatgatgaggtgccaaataacgatcaatctagtcgctatgttatcaccgagtcttcaccaacatctattgagaaggagctagttggaccaaacactgaactttcaactcctcctgcatgcttcattaccatggagaacagttctactggctgtgatactgatgctcataaaacccaatcagaatcattttcaacaaaaagtacaggtttatcctcaatgaatcatgtgtatccagaaaataatttatctgaaggagctcatatcgactcaaacgatctttgtattagaatatatgacagctctgaggaagttattttatggaatccagtgagttctgtaaaaccacagcaatcacatgaacttaccaccatacctcaagatgatcatgcacttcatgctttggaaacagaagtgacagagcaagttggactcaactgttctggacattcagattcttctgtttgcagtggagtgtcaccgctagaaaattcttgtgcaaattgtgaagagaaaatggtattacacagtgcaaatgaccctgttggagtaacagtgcatgaaaatggtgtacgtgtcctggcagattccactaccctaacccaagaatatcatgtatcttacacattacacatggaacaaatgatagagcaagctggactgcattgttctggacattcagatatcctaatacacactacagatttttgtaatgcactgctgctagaagattctagcacaaattatgagatgacagtttgcttgcaaccctaccaggcaactttgcctgggacacaagcaaaccggcctgaagtgcacatggtatcaaccatatcatacagtgcaaatagccctgtggaatcaactatacatggaacttgcacttcacatgactctagcacaagtgcgtccagctgtgctgacgatccaagtatgtcgactgacagcatggttaaatctgtggacatggatggtcagaagcacatgaaaaacgacaaaattaaggtgcacctagcccctcaaccagaaaacgcgtcatttaagaaaatgcttttgaggaacctgtcgaggaaactcaggtggtcaaaggcgcaggcagacacgcatcagaccatggcgcctggatcccagggcgcagaagaccctggatatccactggtttctccatcggatgatgatctggaggatagttgggagatcctgtaatatataataaaccgccaagaacctccgtgacttttcttttttgagctaagtttatccatgtcaggttaactggttttgagggaaggcacgtggcgtattttttacagatctccttggttacagacacgtgagatgttgcacgtacgtgcggcacatccatcggcataataactgtaattctagttgaggatacgtaaagctgtttggattctgtttcggaccttaactgcatgcagacaagacaatgagacaagcgtgtgtccacagcttcgactgtcagatctgtcactagctagtcctcttcttggcagt

SEQ ID NO: 214418 - DNA, 2121 bp, Zea Mays
tcgcgattggccactattgctttgtttgttgttttcttttctttcttccccgaaaaggctggacggcggctccgagctcactcgtcgccggcggctgttgcaggagattaacaccattttttgacaaagaaaaaaaaagctaatggcgagaaacataaattcagattatatagacttttcacatttgggtggattcgacatgggcatcaattttgacgaatttgaagaaaatgtgaaaaagctcatggagtatcttgattcagctcatgataaagctgtcgaattcattgaagatgtccatgcaaaattttatggtccctttactgatgatgaggtgccaaataacgatcaatctagtcgctatgttatcaccgagtcttcaccaacatctattgagaaggagctagttggaccaaacactgaactttcaactcctcctgcatgcttcattaccatggagaacagttctactggctgtgatactgatgctcataaaacccaatcagaatcattttcaacaaaaagtacaggtttatcctcaatgaatcatgtgtatccagaaaataatttatctgaaggagctcatatcgactcaaacgatctttgtattagaatatatgacagctctgaggaagttattttatggaatccagtgagttctgtaaaaccacagcaatcacatgaacttaccaccatacctcaagatgatcatgcacttcatgctttggaaacagaagtgacagagcaagttggactcaactgttctggacattcagattcttctgtttgcagtggagtgtcaccgctagaaaattcttgtgcaaattgtgaagagaaaatggtattacacagtgcaaatgaccctgttggagtaacagtgcatggtttgcatctttcaccttttaactgtgactgattgttctgttacctctccccttgtatttacgaaaatattctcaatcatataccttttattaaatatgcatgacaacaatctgtcgtacttagggaaaagtaattagatgtgagtatacaaacttgtatgatttagcaaaccacattatggtcctgcactcctgcttgttaagatgtataactggcttactttaacatttaaccacatgtcataaatacactaacctgttttacatttattttgattaagaaaatggtgtacgtgtcctggcagattccactaccctaacccaagaatatcatgtatcttacacattacacatggaacaaatgatagagcaagctggactgcattgttctggacattcagatatcctaatacacactacagatttttgtaatgcactgctgctagaagattctagcacaaattatgagatgacagtttgcttgcaaccctaccaggcaactttgcctgggacacaagcaaaccggcctgaagtgcacatggtatcaaccatatcatacagtgcaaatagccctgtggaatcaactatacatggaacttgcacttcacatgactctagcacaagtgcgtccagctgtgctgacgatccaagtatgtcgactgacagcatggttaaatctgtggacatggatggtcagaagcacatgaaaaacgacaaaattaaggtgcacctagcccctcaaccagaaaacgcgtcatttaagaaaatgcttttgaggaacctgtcgaggaaactcaggtggtcaaaggcgcaggcagacacgcatcagaccatggcgcctggatcccagggcgcagaagaccctggatatccactggtttctccatcggatgatgatctggaggatagttgggagatcctgtaatatataataaaccgccaagaacctccgtgacttttcttttttgagctaagtttatccatgtcaggttaactggttttgagggaaggcacgtggcgtattttttacagatctccttggttacagacacgtgagatgttgcacgtacgtgcggcacatccatcggcataataactgtaattctagttgaggatacgtaaagctgtttggattctgtttcggaccttaactgcatgcagacaagacaatgagacaagcgtgtgtccacagcttcgactgtcagatctgtcactagctagtcctcttcttggcagt

SEQ ID NO: 214419 - DNA, 1792 bp, Zea Mays
gttgttttcttttctttcttccccgaaaaggctggacggcggctccgagctcactcgtcgccggcggctgttgcaggagattaacaccattttttgacaaagaaaaaaaaagctaatggcgagaaacataaattcagattatatagacttttcacatttgggtggattcgacatgggcatcaattttgacgaatttgaagaaaatgtgaaaaagctcatggaggtatatcttgattcagctcatgataaagctgtcgaattcattgaagatgtccatgcaaaattttatggtccctttactgatgatgaggtgccaaataacgatcaatctagtcgctatgttatcaccgagtcttcaccaacatctattgagaaggagctagttggaccaaacactgaactttcaactcctcctgcatgcttcattaccatggagaacagttctactggctgtgatactgatgctcataaaacccaatcagaatcattttcaacaaaaagtacaggtttatcctcaatgaatcatgtgtatccagaaaataatttatctgaaggagctcatatcgactcaaacgatctttgtattagaatatatgacagctctgaggaagttattttatggaatccagtgagttctgtaaaaccacagcaatcacatgaacttaccaccatacctcaagatgatcatgcacttcatgctttggaaacagaagtgacagagcaagttggactcaactgttctggacattcagattcttctgtttgcagtggagtgtcaccgctagaaaattcttgtgcaaattgtgaagagaaaatggtattacacagtgcaaatgaccctgttggagtaacagtgcatgattccactaccctaacccaagaatatcatgtatcttacacattacacatggaacaaatgatagagcaagctggactgcattgttctggacattcagatatcctaatacacactacagatttttgtaatgcactgctgctagaagattctagcacaaattatgagatgacagtttgcttgcaaccctaccaggcaactttgcctgggacacaagcaaaccggcctgaagtgcacatggtatcaaccatatcatacagtgcaaatagccctgtggaatcaactatacatggaacttgcacttcacatgactctagcacaagtgcgtccagctgtgctgacgatccaagtatgtcgactgacagcatggttaaatctgtggacatggatggtcagaagcacatgaaaaacgacaaaattaaggtgcacctagcccctcaaccagaaaacgcgtcatttaagaaaatgcttttgaggaacctgtcgaggaaactcaggtggtcaaaggcgcaggcagacacgcatcagaccatggcgcctggatcccagggcgcagaagaccctggatatccactggtttctccatcggatgatgatctggaggatagttgggagatcctgtaatatataataaaccgccaagaacctccgtgacttttcttttttgagctaagtttatccatgtcaggttaactggttttgagggaaggcacgtggcgtattttttacagatctccttggttacagacacgtgagatgttgcacgtacgtgcggcacatccatcggcataataactgtaattctagttgaggatacgtaaagctgtttggattctgtttcggaccttaactgcatgcagacaagacaatgagacaagcgtgtgtccacagcttcgactgtcagatctgtcactagctagtcctcttcttggcagt

SEQ ID NO: 214420 - DNA, 2107 bp, Zea Mays
cttttctttcttccccgaaaaggctggacggcggctccgagctcactcgtcgccggcggctgttgcaggagattaacaccattttttgacaaagaaaaaaaaagctaatggcgagaaacataaattcagattatatagacttttcacatttgggtggattcgacatgggcatcaattttgacgaatttgaagaaaatgtgaaaaagctcatggaggattttcttgacaatgctttgttactaactttccccattcatggacggatcccgatcaagtatcttgattcagctcatgataaagctgtcgaattcattgaagatgtccatgcaaaattttatggtccctttactgatgatgaggtgccaaataacgatcaatctagtcgctatgttatcaccgagtcttcaccaacatctattgagaaggagctagttggaccaaacactgaactttcaactcctcctgcatgcttcattaccatggagaacagttctactggctgtgatactgatgctcataaaacccaatcagaatcattttcaacaaaaagtacaggtttatcctcaatgaatcatgtgtatccagaaaataatttatctgaaggagctcatatcgactcaaacgatctttgtattagaatatatgacagctctgaggaagttattttatggaatccagtgagttctgtaaaaccacagcaatcacatgaacttaccaccatacctcaagatgatcatgcacttcatgctttggaaacagaagtgacagagcaagttggactcaactgttctggacattcagattcttctgtttgcagtggagtgtcaccgctagaaaattcttgtgcaaattgtgaagagaaaatggtattacacagtgcaaatgaccctgttggagtaacagtgcatggtttgcatctttcaccttttaactgtgactgattgttctgttacctctccccttgtatttacgaaaatattctcaatcatataccttttattaaatatgcatgacaacaatctgtcgtacttagggaaaagtaattagatgtgagtatacaaacttgtatgatttagcaaaccacattatggtcctgcactcctgcttgttaagatgtataactggcttactttaacatttaaccacatgtcataaatacactaacctgttttacatttattttgattaagaaaatggtgtacgtgtcctggcagattccactaccctaacccaagaatatcatgtatcttacacattacacatggaacaaatgatagagcaagctggactgcattgttctggacattcagatatcctaatacacactacagatttttgtaatgcactgctgctagaagattctagcacaaattatgagatgacagtttgcttgcaaccctaccaggcaactttgcctgggacacaagcaaaccggcctgaagtgcacatggtatcaaccatatcatacagtgcaaatagccctgtggaatcaactatacatggaacttgcacttcacatgactctagcacaagtgcgtccagctgtgctgacgatccaagtatgtcgactgacagcatggttaaatctgtggacatggatggtcagaagcacatgaaaaacgacaaaattaagaaaatgcttttgaggaacctgtcgaggaaactcaggtggtcaaaggcgcaggcagacacgcatcagaccatggcgcctggatcccagggcgcagaagaccctggatatccactggtttctccatcggatgatgatctggaggatagttgggagatcctgtaatatataataaaccgccaagaacctccgtgacttttcttttttgagctaagtttatccatgtcaggttaactggttttgagggaaggcacgtggcgtattttttacagatctccttggttacagacacgtgagatgttgcacgtacgtgcggcacatccatcggcataataactgtaattctagttgaggatacgtaaagctgtttggattctgtttcggaccttaactgcatgcagacaagacaatgagacaagcgtgtgtccacagcttcgactgtcagatctgtcactagctagtcctcttcttggcagt

SEQ ID NO: 214421 - DNA, 1646 bp, Zea Mays
gattaacaccattttttgacaaagaaaaaaaaagctaatggcgagaaacataaattcagattatatagacttttcacatttgggtggattcgacatgggcatcaattttgacgaatttgaagaaaatgtgaaaaagctcatggagacagctctgaggaagttattttatggaatccagtgagttctgtaaaaccacagcaatcacatgaacttaccaccatacctcaagatgatcatgcacttcatgctttggaaacagaagtgacagagcaagttggactcaactgttctggacattcagattcttctgtttgcagtggagtgtcaccgctagaaaattcttgtgcaaattgtgaagagaaaatggtattacacagtgcaaatgaccctgttggagtaacagtgcatggtttgcatctttcaccttttaactgtgactgattgttctgttacctctccccttgtatttacgaaaatattctcaatcatataccttttattaaatatgcatgacaacaatctgtcgtacttagggaaaagtaattagatgtgagtatacaaacttgtatgatttagcaaaccacattatggtcctgcactcctgcttgttaagatgtataactggcttactttaacatttaaccacatgtcataaatacactaacctgttttacatttattttgattaagaaaatggtgtacgtgtcctggcagattccactaccctaacccaagaatatcatgtatcttacacattacacatggaacaaatgatagagcaagctggactgcattgttctggacattcagatatcctaatacacactacagatttttgtaatgcactgctgctagaagattctagcacaaattatgagatgacagtttgcttgcaaccctaccaggcaactttgcctgggacacaagcaaaccggcctgaagtgcacatggtatcaaccatatcatacagtgcaaatagccctgtggaatcaactatacatggaacttgcacttcacatgactctagcacaagtgcgtccagctgtgctgacgatccaagtatgtcgactgacagcatggttaaatctgtggacatggatggtcagaagcacatgaaaaacgacaaaattaaggtgcacctagcccctcaaccagaaaacgcgtcatttaagaaaatgcttttgaggaacctgtcgaggaaactcaggtggtcaaaggcgcaggcagacacgcatcagaccatggcgcctggatcccagggcgcagaagaccctggatatccactggtttctccatcggatgatgatctggaggatagttgggagatcctgtaatatataataaaccgccaagaacctccgtgacttttcttttttgagctaagtttatccatgtcaggttaactggttttgagggaaggcacgtggcgtattttttacagatctccttggttacagacacgtgagatgttgcacgtacgtgcggcacatccatcggcataataactgtaattctagttgaggatacgtaaagctgtttggattctgtttcggaccttaactgcatgcagacaagacaatgagacaagcgtgtgtccacagcttcgactgtcagatctgtcactagctagtcctcttcttggcagt

SEQ ID NO: 214422 - DNA, 1304 bp, Zea Mays
atggcgagaaacataaattcagattatatagacttttcacatttgggtggattcgacatgggcatcaattttgacgaatttgaagaaaatgtgaaaaagctcatggagacagctctgaggaagttattttatggaatccagtgagttctgtaaaaccacagcaatcacatgaacttaccaccatacctcaagatgatcatgcacttcatgctttggaaacagaagtgacagagcaagttggactcaactgttctggacattcagattcttctgtttgcagtggagtgtcaccgctagaaaattcttgtgcaaattgtgaagagaaaatggtattacacagtgcaaatgaccctgttggagtaacagtgcatgattccactaccctaacccaagaatatcatgtatcttacacattacacatggaacaaatgatagagcaagctggactgcattgttctggacattcagatatcctaatacacactacagatttttgtaatgcactgctgctagaagattctagcacaaattatgagatgacagtttgcttgcaaccctaccaggcaactttgcctgggacacaagcaaaccggcctgaagtgcacatggtatcaaccatatcatacagtgcaaatagccctgtggaatcaactatacatggaacttgcacttcacatgactctagcacaagtgcgtccagctgtgctgacgatccaagtatgtcgactgacagcatggttaaatctgtggacatggatggtcagaagcacatgaaaaacgacaaaattaaggtgcacctagcccctcaaccagaaaacgcgtcatttaagaaaatgcttttgaggaacctgtcgaggaaactcaggtggtcaaaggcgcaggcagacacgcatcagaccatggcgcctggatcccagggcgcagaagaccctggatatccactggtttctccatcggatgatgatctggaggatagttgggagatcctgtaatatataataaaccgccaagaacctccgtgacttttcttttttgagctaagtttatccatgtcaggttaactggttttgagggaaggcacgtggcgtattttttacagatctccttggttacagacacgtgagatgttgcacgtacgtgcggcacatccatcggcataataactgtaattctagttgaggatacgtaaagctgtttggattctgtttcggaccttaactgcatgcagacaagacaatgagacaagcgtgtgtccacagcttcgactgtcagatctgtcactagctagtcctcttcttggcagt

SEQ ID NO: 214423 - DNA, 1074 bp, Zea Mays
caaatttcttattcttctgtttgcagtggagtgtcaccgctagaaaattcttgtgcaaattgtgaagagaaaatggtattacacagtgcaaatgaccctgttggagtaacagtgcatgaaaatggtgtacgtgtcctggcagattccactaccctaacccaagaatatcatgtatcttacacattacacatggaacaaatgatagagcaagctggactgcattgttctggacattcagatatcctaatacacactacagatttttgtaatgcactgctgctagaagattctagcacaaattatgagatgacagtttgcttgcaaccctaccaggcaactttgcctgggacacaagcaaaccggcctgaagtgcacatggtatcaaccatatcatacagtgcaaatagccctgtggaatcaactatacatggaacttgcacttcacatgactctagcacaagtgcgtccagctgtgctgacgatccaagtatgtcgactgacagcatggttaaatctgtggacatggatggtcagaagcacatgaaaaacgacaaaattaaggtgcacctagcccctcaaccagaaaacgcgtcatttaagaaaatgcttttgaggaacctgtcgaggaaactcaggtggtcaaaggcgcaggcagacacgcatcagaccatggcgcctggatcccagggcgcagaagaccctggatatccactggtttctccatcggatgatgatctggaggatagttgggagatcctgtaatatataataaaccgccaagaacctccgtgacttttcttttttgagctaagtttatccatgtcaggttaactggttttgagggaaggcacgtggcgtattttttacagatctccttggttacagacacgtgagatgttgcacgtacgtgcggcacatccatcggcataataactgtaattctagttgaggatacgtaaagctgtttggattctgtttcggaccttaactgcatgcagacaagacaatgagacaagcgtgtgtccacagcttcgactgtcagatctgtcactagctagtcctcttcttggcagt

SEQ ID NO: 214424 - DNA, 2114 bp, Zea Mays
cgacctgtcaaattcatctctccaaggattcttggcaccagagatcgggtccttgagatctttgcagactctcgtgttggatcgcaacacattcatgggctcaataccaaaaggcatcggcatgctacagaacctgatcgagctgaacctcagctccaaccagctcgcggggcctattcccagtgagatcggtgacatggcgaagatcacaaaaatagaccttcacgcgaatcggctggacggcactatccctcctgagcttggcaagctgggaagcctccttgagctacggctgagcaacaactgccttacaggcattgttcctgcaaggaatccgccagcacctctgatcaaactggattgtgtcagctatctcagctaaccaatattgatctctcgtataacttcttggttggagatgttcccgcatgcttacagcaaatccaaagatcaagcttggtagggaattgcttccagaacaacacatcaaaccgcccacttcaacaatgtgaaactaatcaggacagaggcaaagacaatgatgctgatgagaatgtgcagaaaggcctgccagagccactttggcttctcattctggaagtcatcgcagcagtttcattgctttgcttcttaacactttgtaccatgactggcctccgaaggtgcagagccagatcctctgggtctgagaccagtgttccatggacaagagctgtaagctggaaggagaacaccgtaatctcaatcggttagtgcctgcttcttttgcgagtagctgacaaaaactgaatttttttacactgtgtcgattacgggttgttgctcgtgtagatgatgacctcctggtaaatgtgccaaagataagccggcaggagctggcagaggcttgcgaggacttcagcaacataattggatcgtctcaggagacagttgtgtacaagggaactctgaaggatggccgggaaatcgctgttgtgtcgctgtctgttccggtgcattactggaatgactatgtcgaacttcactttcacaaggaggtgatagaaatgtccagaccgagtcacgaaaatgtcgcaaagatggtgggatactgcaaggagtctgatccattttcgagaatgctagtctttcagtacccaccaaatgggacactctacgagcatctgcacgatggagatgggtggcagctatcttggcctagacggatgaaattagcactcgccatctcgagggctctcagatacttgcacactgagctgcaacctccgtttgcagttgctgcactgacgtctagttcagtctacctaactgaagacttctccccaaagataatcgatttcgagaggtggagatatcttgcgaccaaaccaggatttggctcactaaatggcgggtcagtcaacagcgttacagattctcggcataagcgcttcatggacgtccaggccaacacttacgcgtttggcgtgatcctgctggagctggtcagtggcagagcctcggtttccaaagatacaggaggcttggtggattgggcaagaaagcacctggagcatcccgaggagttcggcaagctggtggacccgaggctgcagagcgtgaaccaggagagcctgggcatcgtctgcaacgtggtgaacctgtgcatcgacctggagccgtcgcggcggccctccatgagcatgatcgcggccatcctggaggaaggcatcgaagcgtcggcggccaccttgctcaggaattcgtctctggcctgggccgaagccgagctggccatctcctagaacctagataccctctttgcatgttttgctgcacttgctagactgtatgtttggacagtgacgatggtttaacccgttgttactccgtttggcattgttatttctctcccttttttggagagagaaatggctcacagatctgaattcaaaatgactcaagttttgatttcatcagcgcgaggagatgcatttttatcttttcaaatagagggagcattttctttttttaggtacagaaaatcagagggagggggctagacaaaagactgctacaatagatcgatgacacagagtataatacaatcataatatagagaggttcgaattggg

SEQ ID NO: 214425 - DNA, 400 bp, Zea Mays
cccaaccaccaataggacaagttggtcttactgaggagcagagtatggagatgttgatgtcttcgttgccaacttgaggcccctcaaggccactctgtctggactacctgatcgtgtattgatgaagattcttgtgtgcgctacgtcaaacaaagttgtaggagtgcacatgtgtggtgatgatgcacctgagataattcagctatggacaccagatgcaaatgctacatctatggttgctggaccagaacttgatgtattaagtgccatagagaataaccagcggttgtactgccttttgattttttggaacgagttcggatgcgagagttttcagaaagtttcgagtgtaaccagagctgatttactatcgctggagttactgaggtacttgtattga

SEQ ID NO: 214426 - DNA, 1151 bp, Zea Mays
cattggtatgctcctcctctgctccctcctcgtcgtctgtcgtctcctcgcgctcgtcctccgctgcccgactccggcgtcgtccccacagtccgcaccagccgacccaaccaccgctcaagccttaacccaacatttatctgtatcccgtggcaaggagcatctgcgcgtcacatccgcgatcgcgcgctctacgtcgcctcccgccgccgccgcacggccgcgacggatgctcggccaccgcttccctaccgccctccgcctcccacatggtctgctgcagaggaggagcatcatggcccgccgcggcctgaccatcatggccggtggcgaggcggagggtccgctcgcgggtttcttcgactacatggagcggctgcgcaactacgagcgctcgggcgtgccgcgcggcgccggcaccgactccgacgacgggtttgacctcggacgcatgcgccggctcctccgccggctcggcgacccccacacccacttcccggctgtgcatatcgccggcaccaaggggaaaggttctactgctgcattcctgtccaatatcatgagggcccaaggctacaatgtaggctgttattctagtccacatcttctaacaatacgtgaacggatttctgttggaaatgatggaggccctgttccagtacgactgttgagtgatctttttgacgaggctaagaaagccattgatgaagcaatagaatcggaaaatggatccctgacacattttgaggtttttactgctctctcatttcttctattctcacaacagaatgttgacattgccatcattgaagtcttggtggagctagggatgcaacaaatgttattcgaagtactgaattagcagcatctgtcataacaacagtagggagggaacatctggttgcattgggtggctccctgcaaagcatagcaatagcaaagtctggaatcatcaaacaaggacgaccggttgtgattggtggaccattttcagaagatattgagcaaattattcgtgacagggcattcttgacacaatctcccgtgatatctgcttgtggtcatggcatcaagagctttacaaaatgcatagattgggataatggtttccatctgttttcaaatcatctgactgatcagcgcaaatcatc

SEQ ID NO: 214427 - DNA, 2808 bp, Zea Mays
cgtagatttcgtgcgccgctgaacgtgccgtcgtgtcgtctcctacgccccccggcgattttccgattttcgtagattctgggccgcgcgttcggaggtggagtttgcgccggaaaatgctgagccacaaaaaatcacgccgttacaaacactactactccatttggcgcctatgcctatcccatccgtttctccagtttcgtcttccccgctcgctgcagctccactcagagcctccgttcccaactcgaatctccccagatcctccgcatcatctgaaaacccagatgcttctcctccagcccagtgcagtccctgcgcctgctctgcgggggaggcctcggccacgtcggcggctggtgccgcctcccctcgcctccgcgcccgcttccatcgtcgtcagctccgacgaggacgcattcaccaggtgctccgggtacctgttcgaggagggcgcggccaccgagtcggagctccccaccgcgtacgacctccccggcatcgcggccgtgtaccgccgccgcccgctcctcgtgctccgccgctccctgcagatcggcacctccttcggccggtggttcgcgctgcggtacctcgatcgcgtcaacgagcgcgccgacgacatgttcgagcttcgggcggctcagctcaggaggatactcttggagcttggcccggtatgtctcatttcctattgccttatctgatgatcataaagtttattgatgttccttttttaatcacaggcatttgtgaagatcgcacaagcagtttcgtcacggccggatgttgttccacctgcataccttgatgagctctcactacttcaggaccgcatagcaccattttcaaacgatgttgcttttaatattatagagaaagagcttgggcttccactggatatggttttctctgagataacaccagagcctgttgctgctgcatctcttgggcaggtttaccaggctaggctccgctccagtgggaagattgttgctgtcaaagtacaaagacctggagttcaagcagcaatttcattagacatatatatcttgaggttcctagctagtcttgcaaggaaggctgccaagttgaacacagaccttccagctgtgcttgacgaatgggcatcaagcctattccgggtaaatcacatttgatgcaggagatggattatagagaagaagcaagaaatggacttaagttcagagaattgtttgggaaatttagagatgtgtcggttcctgaaatgtatctggaacagacaagaaggcgagtccttatcatggaatggatcgagggggaaaagttatcagaagtcagagatcaatatttggttgagatccacaccctggaaatcttttgcgtacagttgatgggaaattagcctacttagattttgggatgatgggagaattccgacaagaacttcgtgatggatttattgaagcttgtcttcatcttgttaaccgtgattttgatgctttagcaaaagactttgtaacccttggtttacttcctccaactgcccagaaaggtgaagtcacaaaggcattgacaggtgtatttgagaatgctgttaacagaggagttcagaatataagctttggagatctgtcaggaaatcttggacgaacaatgtataaattcaagttccagataccgtcttacttttcccttgtaattcgaagccttgctgttttagaaggtatcgcaatcagcttcaatccaaagtataaagttctggggagttcatatccatggattgcaagaaaagttctcactgacagttcaccaaagcttcgatcaactttgcagactcttctttataaggatggcactttccaaattgatcgcctggaatctttgttaactgagtcacttcgtgcaagaacagagcaatcattggtcagaaatgaacaagatgtcgacagtacgagatatgcaattaagcaagtcttgtcattcacactcgctgaccagggtgcctttgtgaaggacttacttcttcaggagattgctaagggaatagatgcacttggtgtagccacattaagttctgcaacgtctgcagcagcctccagattgccattcggtggtggaccatccccattgacctcactagatgacgaagatgccacaaacttaagaaatctgtatcgcctgctcctacttttatctaaggtttctcagaaggaaaatccatctccaattcctgaatataacagtgccatagagaaggaaggtggtagcacggatgaacttgctcttgcgctgtatggaatgacctctctgccagaatttcttccagttctttctgtcattcctgaggtaagttggacataagttacgtgagaccatatatgtcaaaatccacatggcacatggctcatttgtgtatacccttctccatcgaagcttccaccggagtcccaacagcagttgcttcttctgccagcggatttaaccaatcgtattttatctcgggctctcgcgagaaccattagaagactcatgtaaagccataggtgcagaaattttcggtccctgcttaatttttattttactattctttttggttcactgctagaagatggggatttttttagcatctcatctacaacccaagatcaatcccttttttgttatctacgattactatgtacatattgttcaaactaaagcaggcattgtaaatggcccatgttgttatgcacatatggtgtaactgataaactttaaatatatgtgaacatagaaataattctgtaatgcaatttgcctcgaaagcatggattcatgtcattt

SEQ ID NO: 214428 - DNA, 3424 bp, Zea Mays
ctactactccatttggcgcctatgcctatcccatccgtttctccagtttcgtcttccccgctcgctgcagctccactcagagcctccgttcccaactcgaatctccccagatcctccgcatcatctgaaaacccagatgcttctcctccagcccagtgcagtccctgcgcctgctctgcgggggaggcctcggccacgtcggcggctggtgccgcctcccctcgcctccgcgcccgcttccatcgtcgtcagctccgacgaggacgcattcaccaggtgctccgggtacctgttcgaggagggcgcggccaccgagtcggagctccccaccgcgtacgacctccccggcatcgcggccgtgtaccgccgccgcccgctcctcgtgctccgccgctccctgcagatcggcacctccttcggccggtggttcgcgctgcggtacctcgatcgcgtcaacgagcgcgccgacgacatgttcgagcttcgggcggctcagctcaggaggatactcttggagcttggcccggcatttgtgaagatcgcacaagcagtttcgtcacggccggatgttgttccacctgcataccttgatgagctctcactacttcaggaccgcatagcaccattttcaaacgatgttgcttttaatattatagagaaagagcttgggcttccactggatatggttttctctgagataacaccagagcctgttgctgctgcatctcttgggcaggtttaccaggctaggctccgctccagtgggaagattgttgctgtcaaagtacaaagacctggagttcaagcagcaatttcattagacatatatatcttgaggttcctagctagtcttgcaaggaaggctgccaagttgaacacagaccttccagctgtgcttgacgaatgggcatcaagcctattccgggtaactcttctccatatatgatggcatgctatttaaatagtgaacatatctatacatcagtttgttcatttatttcagttcacttcaacacatttcaatttggttatagcatttgtaggcattggcatgagataaaattagactgtagtatgaaaagtaaccattaacttgaggcttagaatagtattcctatgcggacccttaagaatgatttcaatgggctatgtggatagtgacagtttgctagaaaaaaaaacaatctaggaaaaattatgggaggtggaggtcaacatccaaaatgtggtattggttgcgggatccaaatgaacatttaaatttgttaattatttttttgttctatgatcctattcatagttcactatgctcaagtaattttgaggctgcaagttatggacacatgttaccatatatccaaggaggaacataaatatcaatctttttcaatgtgatagtggtttgaaaccattgcatttgtacttttaccgtgagagtccatagcttttgtgataaacatgttttcagaagcctggccaagaaaagttgatattattctagtattctagcaggactgtgctagcagtattctaggctattgcagattctgactaaaacattaggtgtatatccttagatattcacattgaatacaggtaaatcacatttgatgcaggagatggattatagagaagaagcaagaaatggacttaagttcagagaattgtttgggaaatttagagatgtgtcggttcctgaaatgtatctggaacagacaagaaggcgagtccttatcatggaatggatcgagggggaaaagttatcagaagtcagagatcaatatttggttgaggttggagtatattgttcactttcacagctattagaatatggattctatcatgcagatccacaccctggaaatcttttgcgtacagttgatgggaaattagcctacttagattactgtcttgatcatcctgagtgctgccctttgtgtgaccaagaggaggaaaatattcagctttcagaacttgctcacatcttgtgtcttcacaagaagtgtatggctttcagtcttatctctagtcaggctgcaacacttatccccaggaccaaaagaatgcactttaatggattggtggcgcctctcttttcaattttgggatgatgggagaattccgacaagaacttcgtgatggatttattgaagcttgtcttcatcttgttaaccgtgattttgatgctttagcaaaagactttgtaacccttggtttacttcctccaactgcccagaaaggtgaagtcacaaaggcattgacaggtgtatttgagaatgctgttaacagaggagttcagaatataagctttggagatctgtcaggaaatcttggacgaacaatgtataaattcaagttccagataccgtcttacttttcccttgtaattcgaagccttgctgttttagaaggtatcgcaatcagcttcaatccaaagtataaagttctggggagttcatatccatggattgcaagaaaagttctcactgacagttcaccaaagcttcgatcaactttgcagactcttctttataaggatggcactttccaaattgatcgcctggaatctttgttaactgagtcacttcgtgcaagaacagagcaatcattggtcagaaatgaacaagatgtcgacagtacgagatatgcaattaagcaagtcttgtcattcacactcgctgaccagggtgcctttgtgaaggacttacttcttcaggagattgctaagggaatagatgcacttggtgtagccacattaagttctgcaacgtctgcagcagcctccagattgccattcggtggtggaccatccccattgacctcactagatgacgaagatgccacaaacttaagaaatctgtatcgcctgctcctacttttatctaaggtttctcagaaggaaaatccatctccaattcctgaatataacagtgccatagagaaggaaggtggtagcacggatgaacttgctcttgcgctgtatggaatgacctctctgccagaatttcttccagttctttctgtcattcctgagcttccaccggagtcccaacagcagttgcttcttctgccagcggatttaaccaatcgtattttatctcgggctctcgcgagaaccattagaagactcatgtaaagccataggtgcagaaattttcggtccctgcttaatttttattttactattctttttggttcactgctagaagatggggatttttttagcatctcatctacaacccaagatcaatcccttttttgttatctacgattactatgtacatattgttcaaactaaagcaggcattgtaaatggcccatgttgttatgcacatatggtgtaactgataaactttaaatatatgtgaacatagaaataattctgtaatgcaatttgcctcgaaagcatggattcatgtcattt

SEQ ID NO: 214429 - DNA, 2481 bp, Zea Mays
ctactactccatttggcgcctatgcctatcccatccgtttctccagtttcgtcttccccgctcgctgcagctccactcagagcctccgttcccaactcgaatctccccagatcctccgcatcatctgaaaacccagatgcttctcctccagcccagtgcagtccctgcgcctgctctgcgggggaggcctcggccacgtcggcggctggtgccgcctcccctcgcctccgcgcccgcttccatcgtcgtcagctccgacgaggacgcattcaccaggtgctccgggtacctgttcgaggagggcgcggccaccgagtcggagctccccaccgcgtacgacctccccggcatcgcggccgtgtaccgccgccgcccgctcctcgtgctccgccgctccctgcagatcggcacctccttcggccggtggttcgcgctgcggtacctcgatcgcgtcaacgagcgcgccgacgacatgttcgagcttcgggcggctcagctcaggaggatactcttggagcttggcccggcatttgtgaagatcgcacaagcagtttcgtcacggccggatgttgttccacctgcataccttgatgagctctcactacttcaggaccgcatagcaccattttcaaacgatgttgcttttaatattatagagaaagagcttgggcttccactggatatggttttctctgagataacaccagagcctgttgctgctgcatctcttgggcaggtttaccaggctaggctccgctccagtgggaagattgttgctgtcaaagtacaaagacctggagttcaagcagcaatttcattagacatatatatcttgaggttcctagctagtcttgcaaggaaggctgccaagttgaacacagaccttccagctgtgcttgacgaatgggcatcaagcctattccgggagatggattatagagaagaagcaagaaatggacttaagttcagagaattgtttgggaaatttagagatgtgtcggttcctgaaatgtatctggaacagacaagaaggcgagtccttatcatggaatggatcgagggggaaaagttatcagaagtcagagatcaatatttggttgagatccacaccctggaaatcttttgcgtacagttgatgggaaattagcctacttagattttgggatgatgggagaattccgacaagaacttcgtgatggatttattgaagcttgtcttcatcttgttaaccgtgattttgatgctttagcaaaagactttgtaacccttggtttacttcctccaactgcccagaaaggtgaagtcacaaaggcattgacaggtgtatttgagaatgctgttaacagaggagttcagaatataagctttggagatctgtcaggaaatcttggacgaacaatgtataaattcaagttccagataccgtcttacttttcccttgtaattcgaagccttgctgttttagaaggtatcgcaatcagcttcaatccaaagtataaagttctggggagttcatatccatggattgcaagaaaagttctcactgacagttcaccaaagcttcgatcaactttgcagactcttctttataaggatggcactttccaaattgatcgcctggaatctttgttaactgagtcacttcgtgcaagaacagagcaatcattggtcagaaatgaacaagatgtcgacagtacgagatatgcaattaagcaagtcttgtcattcacactcgctgaccagggtgcctttgtgaaggacttacttcttcaggagattgctaagggaatagatgcacttggtgtagccacattaagttctgcaacgtctgcagcagcctccagattgccattcggtggtggaccatccccattgacctcactagatgacgaagatgccacaaacttaagaaatctgtatcgcctgctcctacttttatctaaggtttctcagaaggaaaatccatctccaattcctgaatataacagtgccatagagaaggaaggtggtagcacggatgaacttgctcttgcgctgtatggaatgacctctctgccagaatttcttccagttctttctgtcattcctgagcttccaccggagtcccaacagcagttgcttcttctgccagcggatttaaccaatcgtattttatctcgggctctcgcgagaaccattagaagactcatgtaaagccataggtgcagaaattttcggtccctgcttaatttttattttactattctttttggttcactgctagaagatggggatttttttagcatctcatctacaacccaagatcaatcccttttttgttatctacgattactatgtacatattgttcaaactaaagcaggcattgtaaatggcccatgttgttatgcacatatggtgtaactgataaactttaaatatatgtgaacatagaaataattctgtaatgcaatttgcctcgaaagcatggattcatgtcattt

SEQ ID NO: 214430 - DNA, 2052 bp, Zea Mays
cgagcttcgggcggctcagctcaggaggatactcttggagcttggcccggcatttgtgaagatcgcacaagcagtttcgtcacggccggatgttgttccacctgcataccttgatgagctctcactacttcaggaccgcatagcaccattttcaaacgatgttgcttttaatattatagagaaagagcttgggcttccactggatatggttttctctgagataacaccagagcctgttgctgctgcatctcttgggcaggtttaccaggctaggctccgctccagtgggaagattgttgctgtcaaagtacaaagacctggagttcaagcagcaatttcattagacatatatatcttgaggttcctagctagtcttgcaaggaaggctgccaagttgaacacagaccttccagctgtgcttgacgaatgggcatcaagcctattccgggagatggattatagagaagaagcaagaaatggacttaagttcagagaattgtttgggaaatttagagatgtgtcggttcctgaaatgtatctggaacagacaagaaggcgagtccttatcatggaatggatcgagggggaaaagttatcagaagtcagagatcaatatttggttgaggttggagtatattgttcactttcacagctattagaatatggattctatcatgcagatccacaccctggaaatcttttgcgtacagttgatgggaaattagcctacttagattttgggatgatgggagaattccgacaagaacttcgtgatggatttattgaagcttgtcttcatcttgttaaccgtgattttgatgctttagcaaaagactttgtaacccttggtttacttcctccaactgcccagaaaggtgaagtcacaaaggcattgacaggtgtatttgagaatgctgttaacagaggagttcagaatataagctttggagatctgtcaggaaatcttggacgaacaatgtataaattcaagttccagataccgtcttacttttcccttgtaattcgaagccttgctgttttagaaggtatcgcaatcagcttcaatccaaagtataaagttctggggagttcatatccatggattgcaagaaaagttctcactgacagttcaccaaagcttcgatcaactttgcagactcttctttataaggatggcactttccaaattgatcgcctggaatctttgttaactgagtcacttcgtgcaagaacagagcaatcattggtcagaaatgaacaagatgtcgacagtacgagatatgcaattaagcaagtcttgtcattcacactcgctgaccagggtgcctttgtgaaggacttacttcttcaggagattgctaagatgcacttggtgtagccacattaagttctgcaacgtctgcagcagcctccagattgccattcggtggtggaccatccccattgacctcactagatgacgaagatgccacaaacttaagaaatctgtatcgcctgctcctacttttatctaaggtttctcagaaggaaaatccatctccaattcctgaatataacagtgccatagagaaggaaggtggtagcacggatgaacttgctcttgcgctgtatggaatgacctctctgccagaatttcttccagttctttctgtcattcctgagcttccaccggagtcccaacagcagttgcttcttctgccagcggatttaaccaatcgtattttatctcgggctctcgcgagaaccattagaagactcatgtaaagccataggtgcagaaattttcggtccctgcttaatttttattttactattctttttggttcactgctagaagatggggatttttttagcatctcatctacaacccaagatcaatcccttttttgttatctacgattactatgtacatattgttcaaactaaagcaggcattgtaaatggcccatgttgttatgcacatatggtgtaactgataaactttaaatatatgtgaacatagaaataattctgtaatgcaatttgcctcgaaagcatggattcatgtcattt

SEQ ID NO: 214431 - DNA, 726 bp, Zea Mays
cattctatggcatggatgctaacaagggagggaatagatgcacttggtgtagccacattaagttctgcaacgtctgcagcagcctccagattgccattcggtggtggaccatccccattgacctcactagatgacgaagatgccacaaacttaagaaatctgtatcgcctgctcctacttttatctaaggtttctcagaaggaaaatccatctccaattcctgaatataacagtgccatagagaaggaaggtggtagcacggatgaacttgctcttgcgctgtatggaatgacctctctgccagaatttcttccagttctttctgtcattcctgagcttccaccggagtcccaacagcagttgcttcttctgccagcggatttaaccaatcgtattttatctcgggctctcgcgagaaccattagaagactcatgtaaagccataggtgcagaaattttcggtccctgcttaatttttattttactattctttttggttcactgctagaagatggggatttttttagcatctcatctacaacccaagatcaatcccttttttgttatctacgattactatgtacatattgttcaaactaaagcaggcattgtaaatggcccatgttgttatgcacatatggtgtaactgataaactttaaatatatgtgaacatagaaataattctgtaatgcaatttgcctcgaaagcatggattcatgtcattt

SEQ ID NO: 214432 - DNA, 2686 bp, Zea Mays
gaacatggaagaaaggacaaacatagttattataaattgtcataggtatattattaaagatgcttttggatattgattctttcttttttctagagcaaacatttgatgattcgtctatgcatatatcttaagtcttattgacggttgatagttttgtcaggggttatgttgctatgcttcagaagaaggatccaaaactttgctctcatattttccataaccagccacaatatgatgagcaccatgattcgtccccagttttggtgtcgaagtatcatcgatgggattgctcaagatgtcttgatagtgtggaagtttcaggccataggccaacatcggaaaatgtttctatgcagcagaatggaatgaatgatggctgctctatttcaattgtttggattttgcctaatagtgttgattccagaagactgttttcttgcacacatcaatcatctcaagggaatgatcgattgaccctttcaaagactgcccaagaatgcaattcaaaatgcagttctcctggcaacaaagcaattactgcgatgaatgttccagtagctgaagaaaatgttccagaggcactcgttgatacgagggttccatctatagaagttttacaggcctctcccaatagtattgatttgtcagcaaatatcttgaatgctgtctcgaagaatgtcagcgatctacctgatgatgttgaagaaaatggcacacagaatccacacagtctaaaaccttgtgtggcgccaaatgaagatgagaataacatagctaatgatgacctcaatgagcctaatgtatgtaaaccagtatctgggcacaaaagcaaacaagtctgcaacatgggtccacgccgagcatcgtcaaaaagaaatgttgaatctgatggtaagaggaaaaggaataaatctactaaactgcctggtatttcagatctcaaattttgtcagagaaagccaaaaaagacaaggctgttatcagaactcataggttctgaacaggtaggggtttctggagatgccgttcaagtggaccatactaacagtgttgatctctgtgagggtggtaaaagaaaaatgcaccttgaggttggaaaaggtaatgacactactaatcagcaagtggacaaaatccagtcaagagctgtcaagaacaaggcaaaatacacaggagtagacaagttagaagatggatcctctctaatgaactggctgaaaagcactaataaggaagttagaacaaagaaaaaagactcagaacacaagaatcttgattcctcttctatttcaaggtcttacccagatatagttgcttctaatgatatgcatcatgattttctaccctcagttggggatgtgggccaggcagatgtaccatctactaccagtgccaagcatgggaatggaaatgcacagaatgacaaactggagcaaaatatgcagaagatggatggcttgtgtgaaaatgaatctagaaacttgaaacagaggttcttctcaaatgaaaaatcaacgattttgctaaagagaaaggtactgtccacttccgttgtccatgatgagaacattgagaacagtaatataaagagagatatgctcaggtcagatgatttgcctcaaaaggaacctgaagtctctgtacaaagatatttggcaaaggtatgattaaacataaagaattctactgaaaatttataattagattattacattcatttacgtgttttacctacttttgctgacttgaattggggacctttgtccagcataggatttttaatccctttaatgttaatgcatttgtgtctatgccactttgctcccataccatccatgctttccgttgtgtacaccactaggattttttgacactttttatgacatttgagttcacaagtttgcacgcatgccaactgaactagttatttgtgtgtgactagtttgggatgtcatgagcaaattagcgaatcccaaatgacatttacttctttataaactatatatatatacacacacacaatggtgcaagcaataggaaatccgtactgaatttagtctgcttgtatacaaatattgtaccctcatctcgttaccacaggtttctcttggtaaacaaaagatccagaatgtgtctggcctccacaagaagaatataccaaagaataagaaaggaaagcagaaggtgcacgagaaacaaaatgtgatagacgacttccccatggacattgttgaacttctcgccagaaatcagcacaagagacaattgatgactgacaccaattctttggaaaactgtcatactcaacccaaggtagctcaagttgattgtgctgcatttgcagccaagggttgtcccaccaatgcatcaaatgagttcaacactaatttccaaaaatctttggcatcagaaagtaagcagaagtccttacagtctgtcaaacaacgagagaatcactttttttagccaagtcagtgtgcttgtcagcatcaagattggcaatcacaacactgtcgtcctgcttgaaaactgaagccagcttctcataaatctaaattcaagtacatgttcagtccacaaaaaaaatgaagaccgctgcaataatttggaaattttcaagctaatactctactaaccggagcaagatgcttgcagtgaccacacctgtaaacagaagggtcaacaa

SEQ ID NO: 214433 - DNA, 583 bp, Zea Mays
gtttctctcccgcatgatagctttgaacgaatccaagttgtaggccgggtctgtgcgaaccctcatggactgatcaggaagtacgggctgatgtgctgcaggcagtgcttccgcagcaacgccaaggacattggcttcatcaagtaccgctgaagtcagctgggcgggctatctgaatgccatctcttggacagtgtagtagaggcgatgccacaattttaattactgtcatttagatgttcccttcagaactctgctatttaagtccgccatgtttgtgatggagaactgaagctttgtttgttatactgattatgagttacctgtgctttgcctaagctttcttgtcttctactctcatatttggatggctaaggtgtcataatagttgtacgtggattagatgccttcattttagaaggctgcagtcattgttcgtattaactcgcagcaatagtataattcggacggattagactgattagtagtttgctgcagcatcatgcatagcagagtctgggctctgaactgcagagctcgcttccgttgtgaaaacagcgtaccaccaaggcagcaactgtgg

SEQ ID NO: 214434 - DNA, 3361 bp, Zea Mays
cgggagaaggcgaagcgcgagagcagaggcgcaacgcggcgccggcatggactcgggcagcaagagctggagcatcgatagctacctcaacgagcacttcgacatccccgccaagaacccgcccagcgaggcccgcctccgctggcgccgcgccgtcggcctcgtcgtccgcaaccgccgccgccgcttccgcatgttctcaggcctccacgccctcgacgacgcccagcgccgcaacatcctggtataagacgataccacctatctcctgagcttatcgaagaaggattttgtatcagtccagatgaactggcagcaattactggaatccgtgaagactctacgatcctcaagtcacatggtggaatcagtggaatatctaggaaaatcaaggcatcattggatgatggcatcaaggaaactgaaatagcaaccagacagaagctgtatggcagcaacaagcacaccgagaaacctcctagaagcttctggacgtttgtctgggatgcgttgcatgacctgacgttgattattctaatcgtttgtgccgttgtttctctaatggttggccttgccactgagggatggccgaagggcatctatgacggccttggcataataaccagcattttgttggtggtgctggtcacagcatccagtgattacaaacagtcacggaagttcatggagctggactacgagaaaaagaagatatacgcccttgtcactagagataggaaaaccaaaagggtactgattcatgatctggttgtgggtgacatcttgcatctttcagtaggcgatgtggttcctgcagatggcctgttcatctctggctactgcctagtcatagatgaatctagcttatcaggcgagagcgaaccagttgatgtttctgaagaaaagcctttcgttcatgctggaagtaaggtggtagatgggactgccaagatgcttgtgactgctgttggtatgcgtactgaatggggcaaagtcatggatactctgagtgctgatggagtggatgaaacccctttacaagttaagctcaatggtgtggccacgatcattggacagatcgggctggcgtttgctatcctcacatttctagtgctcctagtgaggttcctggtggacaaaggaatgcatgttgggttgtcaaattggtcagcaaatgatgcgctgacaatagtgaactactttgctattgcagtgacaatcatcgttgtcgcagtgcccgagggtctaccactggctgtgactcttagcctcgcgtttgccatgcagaagttgatgaatgacaaagcgctagtgagacatctcgctgcgtgtgagaccatgggttcagcaagttgtatttgcactgataagactggaactttgacgactaaccacatgatcgttgacaaggtttggatgggcgatgtatccaagtctgtcaacagtgatacaaatatgaacgagctgaaggatgctactgcagaaagtgctgtggacttacttgttcagggaatatttgtgaacactgctgctgagatcgtgaagggagatgatggcagaagatctatcttaggcacaccaactgaagcagcgttgttggagtttggcttgggcttgcaaggagatctatacggtgagtacaataagatggcaagagtcaaaatagagcccttcaactcagttaagaaaaagatgtctgtggtaatacagttacctaatggaggcctccggtccttctgcaaaggtgcatcagaacttattctagggcagtgtgacagcttcctcaacagtgaaggaaatttagcaccactgtcagaaatgcaaaagcagaatgtcttagatataataaactcgtttggatctgaggcgttaagaacgctctgtatcgcgtttaaggatctgggtgaaattcctgacgaccaaacaataccagaggatggttacacactaatagcgctttttggcataaaggatccagtccgtcccggtgtgagggatgcagtgatgacctgcatggctgctggaattaaagttacaatggtgactggagacaacatcaatactgctaaagccattgccaaggaatgtgggatattaaccgaggatggaatcgcaatagaaggaagagagcttcacgataagagcatggatgaactgaaggagatcctgcctaaaattcaggtaatggcccggtccttgccgatggacaaatataaactggtgacaagcctaaaaagtatgtatcaagaggtggtggcagttactggtgatggaaccaatgatgccccagcattgagtgagtcagacataggtctggccatgggaattgccggcactgaggtcgcaaaagaaaatgccgatgttataataatggatgataatttcagtaccattgtaaatgttgctagatggggtcgtgcggtttacttgaacattcagaagtttgtgcagttccagcttacagttaatatagtggctctgatagtgaatttcatctcagcgtgtatcataggtactgcaccacttactgccgtccagttgctatgggtgaacatgatcatggatacattaggagccttggccttagcgacagagccgcctaacgatgaaatgatgaatagaccaccagtgagacgggggcatggttttatcactcaggtcatgtggagaaatattcttgggcaggctttatatcagctccttgtgcttggtactctcatgtttaatgggaagaggatccttaacatcgaaggcccaaatgctgatagaactatcaataccctcatattcaactcttttgtgttttgccaggttttcaacgagataaatagcagggaaatggaaaagatcaacgtgttcagagggatactgaaaaactgggtctttatcggtatattgacaacaaccatcatattccaagtaatcatagtagagtttcttggaacctttgcaaacaccgtaccattgagttgggagctatggttgctcagcgctattcttggctcggtcagtttggttatctctgttatcctcaagtgcattcccgtcgaatctaggaaaacggatattaagccccatggctatgagttgattcctgaagccccagaaacagtttaggccgattattcctgtcccacatgaattggatgagattagagaaaattataaaggattttgatttatttggaattgagagggaattaagtttggcttgtacataatttaaattaaacgacgcttattctaggatggcgtatctatgtcatgtgtgcacacaacaccaagctagtgagtagtgatggtgcctttgcgtgcgatattctcgtccagtcgtccacagaggagagaggcagacacacgt

SEQ ID NO: 214435 - DNA, 3347 bp, Zea Mays
gccacgtttttgcttggcgagcaagctggctatgccgccacatggcacgcgaggaggcactagtgccacgccagccatacctcgagcaagcaagtcatcagtgtcgaagagatggttaaggctgcgcttccaggtccatgaactccttcccgctggccctacttcgccatcacggggaaaagttcaggttgtaattaatgtgcacaaggcagcgctgcattttatggacggtataagacgataccacctatctcctgagcttatcgaagaaggattttgtatcagtccagatgaactggcagcaattactggaatccgtgaagactctacgatcctcaagtcacatggtggaatcagtggaatatctaggaaaatcaaggcatcattggatgatggcatcaaggaaactgaaatagcaaccagacagaagctgtatggcagcaacaagcacaccgagaaacctcctagaagcttctggacgtttgtctgggatgcgttgcatgacctgacgttgattattctaatcgtttgtgccgttgtttctctaatggttggccttgccactgagggatggccgaagggcatctatgacggccttggcataataaccagcattttgttggtggtgctggtcacagcatccagtgattacaaacagtcacggaagttcatggagctggactacgagaaaaagaagatatacgcccttgtcactagagataggaaaaccaaaagggtactgattcatgatctggttgtgggtgacatcttgcatctttcagtaggcgatgtggttcctgcagatggcctgttcatctctggctactgcctagtcatagatgaatctagcttatcaggcgagagcgaaccagttgatgtttctgaagaaaagcctttcgttcatgctggaagtaaggtggtagatgggactgccaagatgcttgtgactgctgttggtatgcgtactgaatggggcaaagtcatggatactctgagtgctgatggagtggatgaaacccctttacaagttaagctcaatggtgtggccacgatcattggacagatcgggctggcgtttgctatcctcacatttctagtgctcctagtgaggttcctggtggacaaaggaatgcatgttgggttgtcaaattggtcagcaaatgatgcgctgacaatagtgaactactttgctattgcagtgacaatcatcgttgtcgcagtgcccgagggtctaccactggctgtgactcttagcctcgcgtttgccatgcagaagttgatgaatgacaaagcgctagtgagacatctcgctgcgtgtgagaccatgggttcagcaagttgtatttgcactgataagactggaactttgacgactaaccacatgatcgttgacaaggtttggatgggcgatgtatccaagtctgtcaacagtgatacaaatatgaacgagctgaaggatgctactgcagaaagtgctgtggacttacttgttcagggaatatttgtgaacactgctgctgagatcgtgaagggagatgatggcagaagatctatcttaggcacaccaactgaagcagcgttgttggagtttggcttgggcttgcaaggagatctatacggtgagtacaataagatggcaagagtcaaaatagagcccttcaactcagttaagaaaaagatgtctgtggtaatacagttacctaatggaggcctccggtccttctgcaaaggtgcatcagaacttattctagggcagtgtgacagcttcctcaacagtgaaggaaatttagcaccactgtcagaaatgcaaaagcagaatgtcttagatataataaactcgtttggatctgaggcgttaagaacgctctgtatcgcgtttaaggatctgggtgaaattcctgacgaccaaacaataccagaggatggttacacactaatagcgctttttggcataaaggatccagtccgtcccggtgtgagggatgcagtgatgacctgcatggctgctggaattaaagttacaatggtgactggagacaacatcaatactgctaaagccattgccaaggaatgtgggatattaaccgaggatggaatcgcaatagaaggaagagagcttcacgataagagcatggatgaactgaaggagatcctgcctaaaattcaggtaatggcccggtccttgccgatggacaaatataaactggtgacaagcctaaaaagtatgtatcaagaggtggtggcagttactggtgatggaaccaatgatgccccagcattgagtgagtcagacataggtctggccatgggaattgccggcactgaggtcgcaaaagaaaatgccgatgttataataatggatgataatttcagtaccattgtaaatgttgctagatggggtcgtgcggtttacttgaacattcagaagtttgtgcagttccagcttacagttaatatagtggctctgatagtgaatttcatctcagcgtgtatcataggtactgcaccacttactgccgtccagttgctatgggtgaacatgatcatggatacattaggagccttggccttagcgacagagccgcctaacgatgaaatgatgaatagaccaccagtgagacgggggcatggttttatcactcaggtcatgtggagaaatattcttgggcaggctttatatcagctccttgtgcttggtactctcatgtttaatgggaagaggatccttaacatcgaaggcccaaatgctgatagaactatcaataccctcatattcaactcttttgtgttttgccaggttttcaacgagataaatagcagggaaatggaaaagatcaacgtgttcagagggatactgaaaaactgggtctttatcggtatattgacaacaaccatcatattccaagtaatcatagtagagtttcttggaacctttgcaaacaccgtaccattgagttgggagctatggttgctcagcgctattcttggctcggtcagtttggttatctctgttatcctcaagtgcattcccgtcgaatctaggaaaacggatattaagccccatggctatgagttgattcctgaagccccagaaacagtttaggccgattattcctgtcccacatgaattggatgagattagagaaaattataaaggattttgatttatttggaattgagagggaattaagtttggcttgtacataatttaaattaaacgacgcttattctaggatggcgtatctatgtcatgtgtgcacacaacaccaagctagtgagtagtgatggtgcctttgcgtgcgatattctcgtccagtcgtccacagaggagagaggcagacacacgt

SEQ ID NO: 214436 - DNA, 2389 bp, Zea Mays
tatatcaggcctcattgcacactgatgtatatggtatttagtcattgaatgcgacttcttgtttttgccctctcatgaaatctggtttccagaaaaaaaaaacagtaatctgttactatattttttgaattttgattggaaatatctaatatccatgtccgttattcatgttttttatgcttccgaaagaagcatttaatgggacatatcatggaagatcattgtgttagcctaccatctacaggtttccaatagtggagccagaccacagacacactaaacttcgtctctcagagcaaggtctagaagcaattcgaaggatcgaaactcctattgctgttgttggtgtcattggtccctatcgatctggaaaatcatttctcctcaaccagcttctctccttatcttgtgataaaggttttggagttggtcatatgcgagatactaaaactaaaggtatttggatttggggtactcctgttgagatggatgttgatggttccaaagtttctgtcctttatctagacactgaagggtttgaaagtgttgggaaatcaaatgtgtatgatgataggatatttgctttggcgactgtcttaagctcggtccttatctacaaccttcctgagacggtacgtgaagctgatatatctaggctttcatttgccgttgaaattgctgaagagttctatggaagtcttcaggggcaagatgttgcttttgagccagcaaagcttctctggcttatccagagggatttcctccaaggaaaatctgttcaacaaatggtcaatgaagccctccaacgggtgcctaatgataatggtgacagatatattaatgaggtcaatcaaatacgagattctttggcagttatgggcaaccacagcactgcttttagcttgccccagccacatcttcaaagaacaaaattatgtgatatggaggacaaagagcttgaacccttatatgtaaaacggcgggagcaactaaagcagcttgtttcgtccattgtaaaaccaaaaatcgtgcagggtagaactctaaatgggaaggactttgtgtctttcttgcagcaggtgtacagggagaaaatggatagcttaaacctaccagtgccggtagacgaactgcagaaacttcatgagatgacaaatggtgaagctagaattctctttgataagcagcactttggcaaacatcatgctgctcagtcggccctcaagcttgaagatgagattaaagaggtgtacagaaacttccttctagctaatgaatatcaatcgtcaaagctatgtgaagctcgcttttctgagtgtgaagataagatggatcaccttcaagtcttgaaacttccttcaatggcaaaattcaatgcaggctttactcactgcaaccaaagtttcgtaaaggactgcgtgggacctgcaaaagaaagctacgaacgtagaatgtcaaagatgcttgccaagtctcgtgctcttttcatcaaggagtacaataacaagcttttcaattggttggcgacattctctttggtcatggtggtgatcgggcgctttgtcatcaagttcttcctacttgaaattgttgcttgggtgatgtttatcttcctagagacgtacacgagaatgttctggtcagcggaatcactgtattataatccagcttggcacatcattgtttcttcctgggagatgatcgtgtacagccctattcttgatctggacagatgggccatcccaattgtcataatgctatcattgggggttctttactggaggtgcttcggccgcagaaggaagcgggtaaagggttccctcctcccattgtacaagaattcttacaagaactcgagtcgcccgagatcagattagttatacgcaatgtttaagtttttcttttaaaggatggtacaaaacatctgcttatagaagaggctacactgcccgtgcttttggatgggcatgttttgatgctgccttgcctatggatctccaattgttttttggtggacgaagagagacagtgaagctgctagcgatggccgatggggcacctgcacaagcctccgttgtaattgtaattctacttctctgccttctgtagctaggctatccttacatgtcacggtctcaattctttgcttattgtttacatccactgcaatttttgcaaggattttgtttttatcgggtcatatacaatgtagttgttatttagagcgtgcaccgtgacattcatatgctcgaagtctggcggtggaatttggaaacgtgccttttttatactgctattatacagttaatgtactcatgctatccttttggccaggagctgtgtttttgtttttgcattaaacgagtttggcgagcaatctaacgtagac

SEQ ID NO: 214437 - DNA, 2393 bp, Zea Mays
tatatcaggcctcattgcacactgatgtatatggtatttagtcattgaatgcgacttcttgtttttgccctctcatgaaatctggtttccagaaaaaaaaaacagtaatctgttactatattttttgaattttgattggaaatatctaatatccatgtccgttattcatgttttttatgcttccgaaagaagcatttaatgggacatatcatggaagatcattgtgttagcctaccatctacaggtttccaatagtggagccagaccacagacacactaaacttcgtctctcagagcaaggtctagaagcaattcgaaggatcgaaactcctattgctgttgttggtgtcattggtccctatcgatctggaaaatcatttctcctcaaccagcttctctccttatcttgtgataaaggttttggagttggtcatatgcgagatactaaaactaaaggtatttggatttggggtactcctgttgagatggatgttgatggttccaaagtttctgtcctttatctagacactgaagggtttgaaagtgttgggaaatcaaatgtgtatgatgataggatatttgctttggcgactgtcttaagctcggtccttatctacaaccttcctgagacggtacgtgaagctgatatatctaggctttcatttgccgttgaaattgctgaagagttctatggaagatcttcaggggcaagatgttgcttttgagccagcaaagcttctctggcttatccagagggatttcctccaaggaaaatctgttcaacaaatggtcaatgaagccctccaacgggtgcctaatgataatggtgacagatatattaatgaggtcaatcaaatacgagattctttggcagttatgggcaaccacagcactgcttttagcttgccccagccacatcttcaaagaacaaaattatgtgatatggaggacaaagagcttgaacccttatatgtaaaacggcgggagcaactaaagcagcttgtttcgtccattgtaaaaccaaaaatcgtgcagggtagaactctaaatgggaaggactttgtgtctttcttgcagcagattcttgaggctttgaataaaggcgaaattccatcaactggatctctggttgaaatttttaacaaagccattcttgatcgctgtctgaaggtgtacagggagaaaatggatagcttaaacctaccagtgccggtagacgaactgcagaaacttcatgagatgacaaatggtgaagctagaattctctttgataagcagcactttggcaaacatcatgctgctcagtcggccctcaagcttgaagatgagattaaagaggatgtactttgtaggtgtacagaaacttccttctagctaatgaatatcaatcgtcaaagctatgtgaagctcgcttttctgagtgtgaagataagatggatcaccttcaagtcttgaaacttccttcaatggcaaaattcaatgcaggctttactcactgcaaccaaagtttcgtaaaggactgcgtgggacctgcaaaagaaagctacgaacgtagaatgtcaaagatgcttgccaagtctcgtgctcttttcatcaaggagtacaataacaagcttttcaattggttggcgacattctctttggtcatggtggtgatcgggcgctttgtcatcaagttcttcctacttgaaattgttgcttgggtgatgtttatcttcctagagacgtacacgagaatgttctggtcagcggaatcactgtattataatccagcttggcacatcattgtttcttcctgggagatgatcgtgtacagccctattcttgatctggacagatgggccatcccaattgtcataatgctatcattgggggttctttactggaggtgcttcggccgcagaaggaagcgggatggtacaaaacatctgcttatagaagaggctacactgcccgtgcttttggatgggcatgttttgatgctgccttgcctatggatctccaattgttttttggtggacgaagagagacagtgaagctgctagcgatggccgatggggcacctgcacaagcctccgttgtaattgtaattctacttctctgccttctgtagctaggctatccttacatgtcacggtctcaattctttgcttattgtttacatccactgcaatttttgcaaggattttgtttttatcgggtcatatacaatgtagttgttatttagagcgtgcaccgtgacattcatatgctcgaagtctggcggtggaatttggaaacgtgccttttttatactgctattatacagttaatgtactcatgctatccttttggccaggagctgtgtttttgtttttgcattaaacgagtttggcgagcaatctaacgtagac

SEQ ID NO: 214438 - DNA, 1675 bp, Zea Mays
tacaaagattcgtgacaccaaataggtatagcaaacttggattttctgggaactcagagccgtctttcaccctccctactgtcgtagcagcaaatgaatcttttctagaccagacagagctgttgagtagtgcaaactggatagcgcagtataatgcaggcatcatggctgatcttgacttttttattggagacgaggctctatcgcggtttagatctagtgggctgtacactttaagaagtccaatccgtcatggtcaggtttatgactgggatacaatggagagattttggcagcaatgtattttcaattatctacgttgcaatcccgaagagcactatttccttcttacggatagtcctgttagtacacctgaaagtcgtgaatgtacaggagaaataatgttcgagaccttcaatgtccctggattatatatttctgttcaatctgtcctcagcctttctgctggatatgcatatctgaaaagtctttctgatgacgattccgataccaggtctgatatgacaggagtagtagttgatattggggatggagctccacaaatcgtgccagttgtaaatggctatgtaattgggagtagcataaagtcttttccttcttccggaagtgatgtaacccagtttatttcgcaacttttacaggaaagaggtgagcttttggcacctgaggattctttggatatatctcgtaaagtgaaagaagtgtattgttatacttgttcagacattgtcaaggagttcaagaagcatgacaagaagcctgataagtacatcaaacattggtcagctgttaaaccaaagacgggggtcccatatacaattgacattggatatgaacgctttcttgggccagagatcttcttcaatcctgagatttactctgccgacttctccactcctttacctgagttgattgataactgtgttcagtctgcaccaattgacacaaggagagctctgtacaagaatatagtattatctggtggatctaccatgtttaaagacttccacaagagactccaaactgatataaagaagatagtggatgaccgtgttgctgcgactaatgcccgtcatcgtgtggaagtgagacctattgaagtcaacgtggttgcccatccaatccagagttatgcagtttggttcggggggtcagtagctgcatctaaccctgaattctttgagttctgccacacaaaggaggaatacgaggaacatggagccagcatctgcagaacaagcccggttttcaaaggaatgtactgaattttcctcacaacccatcgtctagcaggagagttcatttaggtttcttcgatagaatagtcaattttgattcttttctggtccgttgcacaaccattgtcgggctcgggccaccctgactagatttgtagttgtagctctgtttgtactagttgtttggtctgtgttctgcgtcgaatgttgtgtatagccaacagctcggttcctgttcgaggtgcttgattgtagccagaaggcccagaaccttggacagtttagaggggaaatattgttttttttacattagcttgttcagacagatttacggaactcatataataataaatcaggctaatctagagtggccaggatagaagatacgcgtgtggactatagaaatttggcgtgga

SEQ ID NO: 214439 - DNA, 837 bp, Zea Mays
tataaacattggtctctacctccaatgggatactacgatcttcttcaatcctgagatttactctgccgacttctccactcctttacctgagttgattgataactgtgttcagtctgcaccaattgacacaaggagagctctgtacaagaatatagtattatctggtggatctaccatgtttaaagacttccacaagagactccaaactgatataaagaagatagtggatgaccgtgttgctgcgactaatgcccgtcatcgtgtggaagtgagacctattgaagtcaacgtggttgcccatccaatccagagttatgcagtttggttcggggggtcagtagctgcatctaaccctgaattctttgagttctgccacacaaaggaggaatacgaggaacatggagccagcatctgcagaacaagcccggttttcaaaggaatgtactgaattttcctcacaacccatcgtctagcaggagagttcatttaggtttcttcgatagaatagtcaattttgattcttttctggtccgttgcacaaccattgtcgggctcgggccaccctgactagatttgtagttgtagctctgtttgtactagttgtttggtctgtgttctgcgtcgaatgttgtgtatagccaacagctcggttcctgttcgaggtgcttgattgtagccagaaggcccagaaccttggacagtttagaggggaaatattgttttttttacattagcttgttcagacagatttacggaactcatataataataaatcaggctaatctagagtggccaggatagaagatacgcgtgtggactatagaaatttggcgtgga

SEQ ID NO: 214440 - DNA, 4199 bp, Zea Mays
atatatgccttcgttcctcgatcgtcagccgccgccagttcctttgccggttcgcgcaccacgcaacgcaagtgctcttcccttcttctctctcggttctcgccttctcggccctcctcctctattcttccctctcgtccacggccacaggctagccggccttgagcgcctgtgacggcgcaggttctggggttgcaacacgcccctccgcccttccggcgcatctgctgaattccactctcctcttgcccgccggcgtcgcctcttttctttgctatcgtcggcctcggaccccaaagacgacaacagcaggagggcagcgcacctgtgaaagcggcgcctctcttgccgttaaatttccgcgtcgcctggcttctcttccgcactctgctttcaagcccctctgccatgaccgtgcccaccaaagacgacagccaaagcggcacggtggccgacacagtgccattaccgacataccgttcgttagcagcgccggaatcaagaagatcgttgaggcaaacaaccgaattgaagcgcgcaacgatccatccatttaccttaggtaccttggtgtgcatgttggcatgccctcggtacatgtagagtataacattgaaaatatcacaccacatttttgccgccttactgaccgcacttactctgctcccataaaagttcatatcgaatacactgtcggaaagcagcatgaagtgagaagaaagaataactttatcattggctacatgcctattatgctaagaagccatgcctgtattctgtatgaaaaggatgaagctgaactagcaaaatatggtgagtgccctcttgatcctggcggctactttgttgtcaaaggaacagagaaggtcattctaattcaagaacagctagcaaagaatcgtattattgttgacactgatagcaaaggaagggtgatcgcatctgttaccagtagcacgcatgcaataaaaagcaagacggtgatttttatggataaggggaagatttatttacagctgaatcagttcaacaagccaattcctattatagtggtgatgaaagcgatgggaatggaaagtgatcaggagactgtacaaatggttggcagggacccaagatacggagatctcttatttccatctattcaggaatgtgcttcagagagaatatatacacgccagcgagccctgcagtacatggatgagaaggtgacgtatcctggtgccacaaatcagaaggaaggtcggtcatactcaatcctccgtgatgtgtttattgcccatgtgccggttaaaaatgggaacctacgaccaaagtgtatatacactgccttaatgttaaggcgcatgatggacgcaatcgtaaattctgacacctttgatgataaggattatgttggaaacaagagatttgagttgtctggccaactaatatcccttctttttgaggacctattcaaaacaatgaattcccaagctgttgagcgcatgaataaaaatagtgacaagactcactctagtcctttggattttagccagttgataatgcaagattccattacctttggtctggaaagggctatttccacaggaaattgggatattaaacgttttaggatgcataggaaaggtgtatctcaggttctttcgaggctatcctacatggcatctttaggctatatgacgcggataacaccccaatttgagaagactcgtaaaacaagtggtccacgtgctttgcagcctagtcagtggggtatgctctgcccatgtgatactcctgaaggagaagcttgtggattgacaaaaaatttagctttgctttctcatgtcacaacagaccaagaggaaggcccactgatatatctgtgttatagtctaggcgtggaggatttattgtctctctcatctgaagaaattcatacgccgggttcatttctggtcatgttcaatggattaatactggggaaacacaaagatcctcagaggcttgttattgatttgaggaatttacgtcgatctaatgtaattggagagtttgtaagcatttttattaatgagaaacagcattgcgttcacattgcctctgatggtggccgtgtttgtcgcccacttataattgctgatatggggatatcaaggatcgatgagactcacatggaaaaactgaggcatggaacttgtggttttgatgatttcctgcgtgatgggttgattgaatatcttgatgttaatgaagaaaacaatgcactgattgcattgtatgagcacatggatcaagatgatgttgaaagaagcagcatcacacacattgaaatagagccattgagtatcttaggggttgtatctggacttattccatatccacaccataaccaatctccacgtaatacttaccagtgtgcaatgggtaagcaagcgatgggaaatattgcatataatcagttgttcagagcagattcactactgtacttactagtgtatgcacaacggccactgctaacgacgaaaactattgagttggtggggtatgataaacttggcgctgggcagaacgccactgttgctgtcatgggatatagtggttatgatattgaagatgcaattgtgatgaacaagtcatcccttgatcgaggatttggccgttgcatagcattgaaaaagtacacagttttaaaggataactatggagatggtgtatccgatatgattgttgaaccccaaagagataatggtgttttgattaaacagaatatgagagcgttggatgaagatggaattgccggacctggtcaaattattcgcaatcatgatatctatgtaaacaagcgaactcccaaaaacacttcaaaaggtattggtagggcattgagagaaagtgactacaaggactcacctgccttgtacaaaggtgttgatggtgagactactgtggtagatcgtgtaatgctgtgctcagatacaaatgataagttatccattaagtgtattattcgtcacactagaaggccagaggttggtgacaaattcagtagcagacatgggcagaaaggtgtctgtggtacgattgttcagcaagaagacttccccttctctgagagaggaatctgtcctgatttaatcatgaatccacatggtttcccaagtcgtatgacaataggtaaaatgattgaacttcttggtggaaaggctggtgtttcttgtggacggtttcactatggcagtgcatttggtgagccaagtggtaatgctgacaaggttgcagacataagctctactctaatcaagcatggtttcagctataatggaaaagatttcttgtactcaggcattcttggtcagcctcttgaggcatacatcttcatgggaccaatctactatcagaaactaaagcacatggttcttgataagatgcatgctcgagctagtggaccgcgggtgttactgacgaggcaaccaactgaggggcgaagccgtgatggaggcttgcgtcttggtgagatggaacgtgattgtctaattgcatatggcgcgagcatgctaatatttgaacgtctactgttatcaagtgatccttatcaagtccaggtttgcagaaaatgtggcttgttaggctactacaatcacaaactgaagacttcatactgttcaatgtgcaagaatggggaaaacatggccaagatgaggctgccatacgcttgcaagcttctattccaggagttgcatgcaatgaatgtagtaccacgcttgaagttaaccgaagtatgacagatgctgggactgtacaatgagagagatgctggattcgaaatgtgtttagagctatatgataaattaaagccctctttgataggggcatagggcttttttttttttgttaactggttcgagagaaaccacgtttaggtgtgtggtttcagccgtctagctagtctcttcgcgggcttctcttctcccgcggaggtatacaagctatcgccgggcaattgttgtatatatagttttttcccgatgtcatatatgaaggaatctggacctctttgtttagatgatcgctgaacgccctgcagggctagattacgatctttgaatgctgaatcattggcatgtgccattattattctagagtcactcgataacccaccctctatccagataattgcactgacgccccctttgataattacattctaatgatag

SEQ ID NO: 214441 - DNA, 4272 bp, Zea Mays
atatatgccttcgttcctcgatcgtcagccgccgccagttcctttgccggttcgcgcaccacgcaacgcaagtgctcttcccttcttctctctcggttctcgccttctcggccctcctcctctattcttccctctcgtccacggccacaggctagccggccttgagcgcctgtgacggcgcaggttctggggttgcaacacgcccctccgcccttccggcgcatctgctgaattccactctcctcttgcccgccggcgtcgcctcttttctttgctatcgtcggcctcggaccccaaagacgacaacagcaggagggcagcgcacctgtgaaagcggcgcctctcttgccgttaaatttccgcgtcgcctggcttctcttccgcactctgctttcaagcccctctgccatgaccgtgcccaccaaagacgacagccaaagcggcacggtggccgacacagtgccattaccgacataccgttcgttagcagcgccggtgaggaagcctgtcgacaagttcgcgctcctcccggccttcctcaaggttagagggcttgtgaaggagcacatcgactcatttaactactttgtcaacaaaggaatcaagaagatcgttgaggcaaacaaccgaattgaagcgcgcaacgatccatccatttaccttaggtaccttggtgtgcatgttggcatgccctcggtacatgtagagtataacattgaaaatatcacaccacatttttgccgccttactgaccgcacttactctgctcccataaaagttcatatcgaatacactgtcggaaagcagcatgaagtgagaagaaagaataactttatcattggctacatgcctattatgctaagaagccatgcctgtattctgtatgaaaaggatgaagctgaactagcaaaatatggtgagtgccctcttgatcctggcggctactttgttgtcaaaggaacagagaaggtcattctaattcaagaacagctagcaaagaatcgtattattgttgacactgatagcaaaggaagggtgatcgcatctgttaccagtagcacgcatgcaataaaaagcaagacggtgatttttatggataaggggaagatttatttacagctgaatcagttcaacaagccaattcctattatagtggtgatgaaagcgatgggaatggaaagtgatcaggagactgtacaaatggttggcagggacccaagatacggagatctcttatttccatctattcaggaatgtgcttcagagagaatatatacacgccagcgagccctgcagtacatggatgagaaggaaggtcggtcatactcaatcctccgtgatgtgtttattgcccatgtgccggttaaaaatgggaacctacgaccaaagtgtatatacactgccttaatgttaaggcgcatgatggacgcaatcgtaaattctgacacctttgatgataaggattatgttggaaacaagagatttgagttgtctggccaactaatatcccttctttttgaggacctattcaaaacaatgaattcccaagctgttgagcgcatgaataaaaatagtgacaagactcactctagtcctttggattttagccagttgataatgcaagattccattacctttggtctggaaagggctatttccacaggaaattgggatattaaacgttttaggatgcataggaaaggtgtatctcaggttctttcgaggctatcctacatggcatctttaggctatatgacgcggataacaccccaatttgagaagactcgtaaaacaagtggtccacgtgctttgcagcctagtcagtggggtatgctctgcccatgtgatactcctgaaggagaagcttgtggattgacaaaaaatttagctttgctttctcatgtcacaacagaccaagaggaaggcccactgatatatctgtgttatagtctaggcgtggaggatttattgtctctctcatctgaagaaattcatacgccgggttcatttctggtcatgttcaatggattaatactggggaaacacaaagatcctcagaggcttgttattgatttgaggaatttacgtcgatctaatgtaattggagagtttgtaagcatttttattaatgagaaacagcattgcgttcacattgcctctgatggtggccgtgtttgtcgcccacttataattgctgatatggggatatcaaggatcgatgagactcacatggaaaaactgaggcatggaacttgtggttttgatgatttcctgcgtgatgggttgattgaatatcttgatgttaatgaagaaaacaatgcactgattgcattgtatgagcacatggatcaagatgatgttgaaagaagcagcatcacacacattgaaatagagccattgagtatcttaggggttgtatctggacttattccatatccacaccataaccaatctccacgtaatacttaccagtgtgcaatgggtaagcaagcgatgggaaatattgcatataatcagttgttcagagcagattcactactgtacttactagtgtatgcacaacggccactgctaacgacgaaaactattgagttggtggggtatgataaacttggcgctgggcagaacgccactgttgctgtcatgggatatagtggttatgatattgaagatgcaattgtgatgaacaagtcatcccttgatcgaggatttggccgttgcatagcattgaaaaagtacacagttttaaaggataactatggagatggtgtatccgatatgattgttgaaccccaaagagataatggtgttttgattaaacagaatatgagagcgttggatgaagatggaattgccggacctggtcaaattattcgcaatcatgatatctatgtaaacaagcgaactcccaaaaacacttcaaaaggtattggtagggcattgagagaaagtgactacaaggactcacctgccttgtacaaaggtgttgatggtgagactactgtggtagatcgtgtaatgctgtgctcagatacaaatgataagttatccattaagtgtattattcgtcacactagaaggccagaggttggtgacaaattcagtagcagacatgggcagaaaggtgtctgtggtacgattgttcagcaagaagacttccccttctctgagagaggaatctgtcctgatttaatcatgaatccacatggtttcccaagtcgtatgacaataggtaaaatgattgaacttcttggtggaaaggctggtgtttcttgtggacggtttcactatggcagtgcatttggtgagccaagtggtaatgctgacaaggttgcagacataagctctactctaatcaagcatggtttcagctataatggaaaagatttcttgtactcaggcattcttggtcagcctcttgaggcatacatcttcatgggaccaatctactatcagaaactaaagcacatggttcttgataagatgcatgctcgagctagtggaccgcgggtgttactgacgaggcaaccaactgaggggcgaagccgtgatggaggcttgcgtcttggtgagatggaacgtgattgtctaattgcatatggcgcgagcatgctaatatttgaacgtctactgttatcaagtgatccttatcaagtccaggtttgcagaaaatgtggcttgttaggctactacaatcacaaactgaagacttcatactgttcaatgtgcaagaatggggaaaacatggccaagatgaggctgccatacgcttgcaagcttctattccaggagttgcatgcaatgaatgtagtaccacgcttgaagttaaccgaagtatgacagatgctgggactgtacaatgagagagatgctggattcgaaatgtgtttagagctatatgataaattaaagccctctttgataggggcatagggcttttttttttttgttaactggttcgagagaaaccacgtttaggtgtgtggtttcagccgtctagctagtctcttcgcgggcttctcttctcccgcggaggtatacaagctatcgccgggcaattgttgtatatatagttttttcccgatgtcatatatgaaggaatctggacctctttgtttagatgatcgctgaacgccctgcagggctagattacgatctttgaatgctgaatcattggcatgtgccattattattctagagtcactcgataacccaccctctatccagataattgcactgacgccccctttgataattacattctaatgatag

SEQ ID NO: 214442 - DNA, 1863 bp, Zea Mays
ctgatgtgtttggatgcattggtggagccaaacagaaacatcacgtatagagaagaggcgatcaagaccatcatacgttctctgagatgctgcctgtcagaggacactgtcgtgcccagcactcggagagctctgctgctgctgggagggcaattcaccttctcaggcgaccttcacgtagaggactggatgctggaacatgccggcttcgtcgaccactcacgggccaccactgccacttctgatgctgttgtaaatgacaaggaagcggccgaaaacgatgcgtggctgagacacgtggccgcggcgctactcggcagccgtagcgggatcaggagaccgttcctagaggcgctgtccaggtgcctgggctcccccgacgccggcctggtgggggcgtgcctgacgatggcctggtggaggttatcagtgagaaaatagatatctgggtaaaccacctcttcagctatgattttgcattttggttttatgcaaatgttgcctatcatattattgaattgcaactatttttttgtactgattaaatactaatagtgccatgagttaacgttagtgttttgtgattttttacaggctcatgggtgtctcttgtataaaatctgcacagaatattagctgttggttatgattatggaaggtcttgtttttagctcatgaatataggtttcaaattttagttgttttttattaggaaggtcgaatataaaagtaactgattttattgtatgtacctgattaatctaaaagcattgaaataattctgctcttggctcgagtatgtatctgaggtatacagagaaatggaacgtgttggatacgctccagatagaaaggctagaaaaatgtttcatataaaattttttactaccgtcgcaacgcacgagcacatacctagatgagtctgtctgttactgcgaaaagctacatacaaattataattgtgggcacattttcattactaatagttttttgttttccttctttttttacctgaggttacaaagggtgcagggtattctccacggcagtgtgtccaatgatcctaaacaagacaatatgtatttgctctttattatcaattcatctatattgtgaaaatctgaaagaacgtggaacctgaaactattgtctggtgggctggtggctgattttcattcaattgggctggtacacctctgttttgactcccatacaccaagaatcgagggcgccagcatccgtgggagtaagactctccggctttgaaggaggagacaaaggccgaagggcagacacattgccttctgttcatgctgcttgatgttgaaacaccaaccactcaccagtcatttactctcacttgctcattggatcatgtgcaccaccatagttagaaacctttatgtcacagttagcgcaatgcattgggatttttttgctatgcacagaatacgaaggttatattatatctctatattttgaatgggagtcattgaagcctaggcaaggtacttgtatttggatctggcataattacaatcatcctgtcatcatcagtttcactcctctggctgctccttgtgtgtgtccactaatgcgttcagcattgcaactgctactgccaaatgctaaggcagcagtatacatagctggttcagtttgtgcagcatttgttgccaacatagatggtcactctgataaaactgtcaccttcaatgggaggatgctcagaaatttggtggctggtggatctgcttaagaatcaaaagtcagataaggtggacatcaccatccaaccggaggagctggaagccatgaatgatgttctagcagccaggtgacgcctgatgtctttgttcagtt

SEQ ID NO: 214443 - DNA, 2840 bp, Zea Mays
ccgcggcccgcccgttgcttgcccgcaagaccgcagcagctcagttgagttgacctcgcgacctcccccggccggcgccgcagggatggaggagggtgcgtcctcgccgggcgacggcgggggcatgcagttccaggtcgcggtggccgtgcgcggggacggccgcgccagccgccgagccgcgcggtgggccgccgccagcctggtcccgcccggcggccgcgtcgcgctcgtccacgtcatcccgcccgtctccttcgtgccgtctccatccggggagagggtgccggtggacaagatggagccggaggtggtggagatgtacgcgcaggacaaccgcgcgctcgcgcaggagatcttcctccccttccgccgcctcgtcggccgcggcaaaagcgtggagacggtggttctggaaggggacagcgtcgccgaggcgctggtgaggtacgcggcggagtccggcgtccgcagcctcgtgctcggatccgcctccctcagctggttccggaggattttacgactccaagatgtgccttttacaattctgaaaaccgtaccaagttcgtgcaacatatttgtcgtgtcccggcgcaggttaacaataaaaattgcaaatcaggctcgaagtagcaagccgaacgcttctattcggattcagtcaataagtcataaagcatttgatcaaatacagagggactggctacaagacaaacaggctttgaataatctggctgatgatgagataccaaaatattctgaaaattctatttcaggctcattctctcaagtctgcagttctataagcacttcttccatcgccgttaaaagttcagaaagtcatagaagaggtttcttaggaagtttaggacgaaggacacctgggagagaaaggaacaaagattttgatgctatcggccaattgaaggaagttcattatgttgccttaagctcagttgaagagtaccaacatatagatgaagaagaaaaactgaggaaggagctgaaggatactttgatgatgtatgacagagcttgtggaaatctcgcccatgctagtaaaaagattcagttattttctagtgactgctgtgaagatgtgaataaggtgcaagacgcactacagagagaggaagtattgaaacagacggttccagatgagaaaaacaaacatttagaagcaattggagcagttgagatggcaaaaaatgcatttacacacgagacctattccaagcaccaggctgagaatgctaaggctgtggatgcccttttatcaacaggcaaaagttgcaggcggtactcgaaacatgaaatagagctcgccactgattacttttctgatgcaaagaagattggtgagggtggctatgggaatgtatacaggtgtacccttgaccacaccgaagtagctgttaaagttgttgaacaagattcgatcaacaagattgatgagttcttgagagaggtggagattctcggccaacttcaccatcccaacttggttttactgcttggcttttgtcctgaaattggatgccttgtgtatgaatacatggagaacgggagtttagaagatctacttatcaacgataaagggcagccactccattggtttcttcggttccaaattatctttgatgtggcttgtgggcttgctttcttgcatgggacgaaaccagagcccattgtccatcgtgacctaaagcctgggaacatcttgctggacaagaactacgtaagcaaaattggtgatgttggttttgcaaagcccatatcagatcttgtgccagaagggctcacagagtacagagacactgtcatcgctggcacactgtattacatggatcctgagtaccaattaactgggactgttcgaccaaaatcagatctttatgctttgggtattatcattcttcaactcctaactggcaaacgtccacctgggctggtaaatagtgtagaagaagggattaaaagggggatattatcagacatcctcgacaagtctcaacctgattggccaattgctgaggctgagatgttggcaaaacttgggttgtggtgtactgccttaaaatgcagggacagacctaaccttgagtcagtggtgcttccagagctcgaaaatatcctgagcagggttactgtttctctcaaactcgaaaatatccttgcaccaagccacttcttctgtccgatattgcaggaggtaatggaaaatccttacgttgctgcagatgggcacacctatgaacacagggcaatcaaagcttggctcgaaaaacacaagatatccccaatgacaaatcagaggcttccacatctatccataattcccaaccattccttgcatgcagcaatacagcaatggaagttacgagcatcttaaggcccgttcgttttaatcttaatctatatggattgaacgggattgagtgggtttaaatccataacgaatcaaaattctttctaatttcttccaatgtcatcttatcaacatggaatgagaataaccgaataaggcctaataaaggcatgaggtgactggtttattcgttgtatatagtttgattcattactgtctgtttgagttaagatgtaaataaagagcaatagttctataatgtagcagtgaaagaagatagtattgtaggaataagttgtgttactagtctagatttgttagagctggtttaggctactcagacaatttaagttacaacggaattaagttttgcaatgctgtatgattttgtagttatagcctacaaggcattatcttggagggtctgattacaattttcagtgtgatttctctgagatcatgtatcttggcg

SEQ ID NO: 214444 - DNA, 1222 bp, Zea Mays
ttctcaccgggggcatcacacaacacctccggacctcccctcccggtcgacgcctcgacggtccgctccctcccaaaaacccacagcccgctccgacgctccctcccaaaacccacagcccgctccggcgctccctcacaaaaacctaccacctgccactttcactccaccacacacccacacccccgcgccatggcctctcctcccccgacctccctctcctccccccacctcatccatctccgcctccaacccctacccagcgtcccgccgctccacctcactaccctccccttcctgcgctccctcccgctccacctccactcgctccgcctcaaccgaccccacctccctcccctaccgctcgcctcttccggcagcggaagcgacatcaccggaagcggcggcgaggacgaccttcctccctcgggcgggggcggcggagggggaggaggcgagggcgatggtgagggcgagggcgacggcagcgagggcgactcggtcaacaggagggaggccctgtttgttctggcgcaactcggacggaagctcgagagcctgccggccgacctcgccgcggccgtggagggcggccgcatcccgggcgagatcgtgcggcggttcgtggacctcgaggcctcgccggtgttcaggtggcttctgcagttcggtggcttcaaggagcgcctcctcgccgacgacctcttcctcaccaaggtcgccatagagtgcggcgttggcatcttcactaagactgctgcagagtatgagaaaaggagggagaactttgtcaaagagcttgactttgtgattgcagatgtggtcatggcaatagttgcagattttatgcttgtatggcttcctgctccaaccgtgtctttacagccaccactagcgatgaattctggagccattgctaagttcttctacaactgcccagataatgccttccaggttgctttgtctgggacgtcatactcacttttgcagagagtaggagcaattttgaggaatggtgcaaagctttttgctgtcggaactagtgcctctctgattggcactggtgtgaccaatgcactgataaaagcaaggcaggctgccagcaaggattttgccggtgaagttgagaatattccaattttatcaactagcgttgcatatggtgtgtacatggcagtttccagtaacctcagggattcatatgtttgtggagagaaacagt

SEQ ID NO: 214445 - DNA, 1219 bp, Zea Mays
agtactcagtactgcaattcaacgctgactgctgcagagtatgagaaaaggagggagaactttgtcaaagagcttgactttgtgattgcagatgtggtcatggcaatagttgcagattttatgcttgtatggcttcctgctccaaccgtgtctttacagccaccactagcgatgaattctggagccattgctaagttcttctacaactgcccagataatgccttccaggttgctttgtctgggacgtcatactcacttttgcagagagtaggagcaattttgaggaatggtgcaaagctttttgctgtcggaactagtgcctctctgattggcactggtgtgaccaatgcactgataaaagcaaggcaggctgccagcaaggattttgccggtgaagttgagaatattccaattttatcaactagcgttgcatatggtgtgtacatggcagtttccagtaacctcaggtaccaggttttagctggagtgattgaacagcggatgctcgagccactactgcaccagcacaaactagtattgagtgcagcatgttttgcagttcggacagggaatacgtttttgggttccctactgtggatcgactatgccaggtggataggcgtacagtaggctcaagcatgggtacacaaatgcagttgctcggagttccagcaatatgggttcttcgtgattttatattaccacgcttcctccaactggcaagtactcgtttgcttcatgggagactcttaggacagattttgatatcattctttaaacaatgccttgaggaaagcgtgatttatcgaaattgttcccgcaagcaagagagtgaatttgttttgagggcttaaggttgtgttgtgcgtgttggattggattgattaaaattcgtagtttcgtacagttttgtcattgtttgtgcaagttcctgtgatttggttatcgtggtcgagcaccatttttgctggccatgcctacaccaaagtttggcattactggcaaacatatccgggtgttgtcacgagaagaaaaccattctaacaagtgggcttaaaagtgaaagtgagcccaaatacaaacaaaaccaacgaaaggagttggtagaccgagtgcaaacagcaaaaaatagtaaaagtagatcacagcacgtcaaaaaaaacagagggccggcaatgccttacgagctgtaaatattcgcaacgagaaattcatgcga

SEQ ID NO: 214446 - DNA, 1966 bp, Zea Mays
attgctttgacatcttgagttccatcgacggggaatgtgcgaactccagatagatggggctgattattaagggcaggcagacattacttgttttatggctagaaataatgagggtcatctccagctgccagagatggatcatattcaacccaagaacaccccgcacaatgaaccactgcctctaggccagaagcttatgctgcatcatggaagtgatgcaccccttagaattggtcattcaagtcatgagaatatgagacttagatcaaatgatcttccacctttaagtcacactgtgcaaactcaaggttatagagttgggaacccaggagcctcgcatgctccttttgttcattgtcatgctggaagttccagtagtcatttaccagaacctgctgtgaattatccacataggtcggaggaaggctttgctccagtgggttcccatatggacaacagaagggctgcaacgaagcgaaaagatcctattgtgcaccctgctgggatcagtgctactggttattatgttggaagttcttccaatactcagctatctaactctgtgcagccaaatcctgctccactttctgagcccttacttcgtcaaatacctttaagcattgaccgaagtggttgggatggcctacacttaattcatcaagaaggatttcagaggaatgtgagagcacgccagcgccacagccataatatttcattagagcccagaacagcttcaacctacccactaaacagtgttcatgtgccatcatttggttcaactacaagtgcttccttaagtatgtcagtggaaaggaaccaagcatctgtttctgtgccaacaagaaatgtaccatcaggtgcaccaggtatcactagcaggtccctgacaaggagggcttactatcctgtggttggaagtagcaactcaagcgttgatgtcgttccaactatctgtggatcatctggcgcagcaatatttgctaatggtggctatgctcttaatgctgatgctggaactgtttctatctaccctaatccagctcctgctacttcatctggctctataaccatgcccatgcccatgctccatcagatggtcattcagagccatccacctgctacctctgcagcaacctctacatccatgtggatcgctcaaccattacctgccagaactgctgcggcttctagacatgcaagacgcgtatcagcagggcttgccaacaatggaaggtacagaagggctaggagctcttactacagccttcatccactgatgatggtagaggcagagcggttcatgatggaccagttggtcttttacgaatcaagagcagcagccgctgacccccacagggacatgagactggacatcgacaacatgagctacgaggacctgttggctttgggagaatctatgggcaatgtcaacacaggcttggccgatgagaaaatttcgaagtgcgtgaaagaagtggtctgctgcagttccgaccagatgcaaaccgatcaagatgaccaggatgacgacggaagctgcgtcatctgcctggagggttacagagacaaggatatgctggggatactgaaatgcaggcacgacttccacgccggctgcatcaagaagtggctgcagacgaagaactcgtgcccggtgtgcaaagccgccgccgcctaggacgacaccagaggagcgagcaactattttgtgctcctcctcgatccattcattttttaggctcaggtcgaattatatatgccgttccattcttttgattcctggcagtcgtgtaaataaatgctctgtgttggttattttagttatcacttgggttacattagcccaaattctcctgttgcattgtaaacaatccagtggtgaaggcaattgatcaagtggttgcaagcgcatgtcgtgaatggttttcggattcaccggcacttgaaattagttgcgaggtatttc

SEQ ID NO: 214447 - DNA, 2174 bp, Zea Mays
aatagaacgagttcggttttaattccgcagccagagttttcttttttaggactcaaaagaacaagtgtgtgctttccatttttaggatgcactaccgctgacgctgagtctcttttacctattcgaatcggcgtaatttcagcatcgattaccatttccatgtcttgtgcatcttcggattctactcttcccatgctgtgtgtggtctccattcaaatctttttttcaaattggcaaaaaaaacactatttatgttgaaacgcctgccaaattattaagggcaggcagacattacttgttttatggctagaaataatgagggtcatctccagctgccagagatggatcatattcaacccaagaacaccccgcacaatgaaccactgcctctaggccagaagcttatgctgcatcatggaagtgatgcaccccttagaattggtcattcaagtcatgagaatatgagacttagatcaaatgatcttccacctttaagtcacactgtgcaaactcaaggttatagagttgggaacccaggagcctcgcatgctccttttgttcattgtcatgctggaagttccagtagtcatttaccagaacctgctgtgaattatccacataggtcggaggaaggctttgctccagtgggttcccatatggacaacagaagggctgcaacgaagcgaaaagatcctattgtgcaccctgctgggatcagtgctactggttattatgttggaagttcttccaatactcagctatctaactctgtgcagccaaatcctgctccactttctgagcccttacttcgtcaaatacctttaagcattgaccgaagtggttgggatggcctacacttaattcatcaagaaggatttcagaggaatgtgagagcacgccagcgccacagccataatatttcattagagcccagaacagcttcaacctacccactaaacagtgttcatgtgccatcatttggttcaactacaagtgcttccttaagtatgtcagtggaaaggaaccaagcatctgtttctgtgccaacaagaaatgtaccatcaggtgcaccaggtatcactagcaggtccctgacaaggagggcttactatcctgtggttggaagtagcaactcaagcgttgatgtcgttccaactatctgtggatcatctggcgcagcaatatttgctaatggtggctatgctcttaatgctgatgctggaactgtttctatctaccctaatccagctcctgctacttcatctggctctataaccatgcccatgcccatgctccatcagatggtcattcagagccatccacctgctacctctgcagcaacctctacatccatgtggatcgctcaaccattacctgccagaactgctgcggcttctagacatgcaagacgcgtatcagcagggcttgccaacaatggaaggtacagaagggctaggagctcttactacagccttcatccactgatgatggtagaggcagagcggttcatgatggaccagttggtcttttacgaatcaagagcagcagccgctgacccccacagggacatgagactggacatcgacaacatgagctacgaggacctgttggctttgggagaatctatgggcaatgtcaacacaggcttggccgatgagaaaatttcgaagtgcgtgaaagaagtggtctgctgcagttccgaccagatgcaaaccgatcaagatgaccaggatgacgacggaagctgcgtcatctgcctggagggttacagagacaaggatatgctggggatactgaaatgcaggcacgacttccacgccggctgcatcaagaagtggctgcagacgaagaactcgtgcccggtgtgcaaagccgccgccgcctaggacgacaccagaggagcgagcaactattttgtgctcctcctcgatccattcattttttaggctcaggtcgaattatatatgccgttccattcttttgattcctggcagtcgtgtaaataaatgctctgtgttggttattttagttatcacttgggttacattagcccaaattctcctgttgcattgtaaacaatccagtggtgaaggcaattgatcaagtggttgcaagcgcatgtcgtgaatggttttcggattcaccggcacttgaaattagttgcgaggtatttc

SEQ ID NO: 214448 - DNA, 2129 bp, Zea Mays
ctttgcccgatgttgcttcaatgagaaaaggactcggtggaaatggagttcttcaccgagtacggagaggcaagccagtaccagatccaagaagtcattggtaaaggcagctacggggtagttgctgcagctgtagatacccgcaccggtgagcgggttgctatcaagaagatcaacgatgtgtttgagcatgtctcggacgccacacgcatactgcgggagatcaagctccttcggttgcttcgtcacccagacatagttgagattaagcacatcatgctccctccatctcggagggagttccaagatatttatgttgtttttgagctcatggagtctgatctccatcaagtgatcaaggccaatgatgacctcacccctgaacatcaccagtttttcctgtaccaacttcttcgtgctctcaagtacatccatgctgctaatgtatttcatcgtgacctaaagcccaagaatatactggctaactcggactgcaaactgaaaatatgtgactttggtcttgcccgtgcatcatttaatgatgccccttcagctatattttggacagattatgtggcaacgaggtggtaccgggcacctgaactatgtggttcttttttctccaaatacactcctgcaattgatatttggagcattgggtgcatatttgctgaacttctcactggaaggccactatttcctgggaagaatgttgtacaccaattagatattataacagatcttcttggaactccatcatctgagaccttatctcggatccgaaatgagaaggccaggagatacttaagctgcatgcggaaaaaatatcccgtgccctttactcataaatttcgaaatgccgatcctttggctcttcgtcttttagagcgtttacttgcatttgatcctaaagatcggcctactgcagaagaggctctagctgatccatactttgcatcccttgctaatgtggaacgtgagccatcaagacacccaatttctaaacttgagtttgaatttgaaagaaggaagctggccaaagatgatgttagagaattgatctatcgagagattttggagtatcatccacagatgctggaggagcacatgcaaggtggagaacagattagcttcctctacccgagtggagttgatcggttcaaacggcagtttgcacatcttgaggagcattatagcaagggagaaagaggttctccactgcaaagaaagcatgcttctttaccaagggaaagagtggttgtatcgaaggacggtgatactgatcaacatattaatgaccaggagagaagtgcagattctgtcgcccgcaccactgtgagccctccaaggtcagaagacgacgacatgagcgatgtgaaatccacaagcttaagctctcggagctacctgaagagtgcgagcataagtgcttccaagtgtgtcgttgccacgaagaaacacccggaggacgatggaatcgctgaggaaatggaaggcgccgtcaatggattgtctgaaaaggtctccaggatgcactcgtaagcaggactgcccctggcaacagcaaccttgttgcaaggtttctgtctctggtacactgtattccgacgacagccttggaaaggcaaacactgtatgtcacacagcagtacagcacactgtgctgcgaggttgggttttgcttgcgtacatccatccacagctagttcgactttacctgggtggaagaggaacacaccaccgcctgatggccctttcttcatcgtctgcatttccaccgtgtcatgccagcgctgcgtggcacctctagaaggtagaagccctgcatggattcatgaagaattcctaagatgtagcactagtcagtgcatggaggaaacatagtcggcctgtcgaccatgagatgttttcttgcaaatggagtctggacctatggttttcagttttattacaacggcttctgccgtaggaagtgtcagcagtgtatcatccctgtaatacccaatttataagagaccatataaaaggagaaaaatcatttgctttatgtatgtgtataacatatccacttatcatcacatgtgaatgccatatttaaagataaataactaataaaaagttataccact

SEQ ID NO: 214449 - DNA, 2274 bp, Zea Mays
aacgctacaacccagctatagtgctaacagagcctggagggaagggagtaggcgatgctactgcctctttcaagcaacgcgtgcgcagtctctcttgttctgagcagctatgccaattcggtgcagccttttccatcagtctgaagtctaaacagtgaacactcattcagcgcattatcaggaggcgatatagaggggagaaaaggaaaatcgtccatccaatcccaacttggactcggtggaaatggagttcttcaccgagtacggagaggcaagccagtaccagatccaagaagtcattggtaaaggcagctacggggtagttgctgcagctgtagatacccgcaccggtgagcgggttgctatcaagaagatcaacgatgtgtttgagcatgtctcggacgccacacgcatactgcgggagatcaagctccttcggttgcttcgtcacccagacatagttgagattaagcacatcatgctccctccatctcggagggagttccaagatatttatgttgtttttgagctcatggagtctgatctccatcaagtgatcaaggccaatgatgacctcacccctgaacatcaccagtttttcctgtaccaacttcttcgtgctctcaagtacatccatgctgctaatgtatttcatcgtgacctaaagcccaagaatatactggctaactcggactgcaaactgaaaatatgtgactttggtcttgcccgtgcatcatttaatgatgccccttcagctatattttggacagattatgtggcaacgaggtggtaccgggcacctgaactatgtggttcttttttctccaaatacactcctgcaattgatatttggagcattgggtgcatatttgctgaacttctcactggaaggccactatttcctgggaagaatgttgtacaccaattagatattataacagatcttcttggaactccatcatctgagaccttatctcggatccgaaatgagaaggccaggagatacttaagctgcatgcggaaaaaatatcccgtgccctttactcataaatttcgaaatgccgatcctttggctcttcgtcttttagagcgtttacttgcatttgatcctaaagatcggcctactgcagaagaggctctagctgatccatactttgcatcccttgctaatgtggaacgtgagccatcaagacacccaatttctaaacttgagtttgaatttgaaagaaggaagctggccaaagatgatgttagagaattgatctatcgagagattttggagtatcatccacagatgctggaggagcacatgcaaggtggagaacagattagcttcctctacccgagtggagttgatcggttcaaacggcagtttgcacatcttgaggagcattatagcaagggagaaagaggttctccactgcaaagaaagcatgcttctttaccaagggaaagagtggttgtatcgaaggacggtgatactgatcaacatattaatgaccaggagagaagtgcagattctgtcgcccgcaccactgtgagccctccaaggtcagaagacgacgacatgagcgatgtgaaatccacaagcttaagctctcggagctacctgaagagtgcgagcataagtgcttccaagtgtgtcgttgccacgaagaaacacccggaggacgatggaatcgctgaggaaatggaaggcgccgtcaatggattgtctgaaaaggtctccaggatgcactcgtaagcaggactgcccctggcaacagcaaccttgttgcaaggtttctgtctctggtacactgtattccgacgacagccttggaaaggcaaacactgtatgtcacacactagttcgactttacctgggtggaagaggaacacaccaccgcctgatggccctttcttcatcgtctgcatttccaccgtgtcatgccagcgctgcgtggcacctctagaaggtagaagccctgcatggattcatgaagaattcctaagatgtagcactagtcagtgcatggaggaaacatagtcggcctgtcgaccatgagatgttttcttgcaaatggagtctggacctatggttttcagttttattacaacggcttctgccgtaggaagtgtcagcagtgtatcatccctgtaatacccaatttataagagaccatataaaaggagaaaaatcatttgctttatgtatgtgtataacatatccacttatcatcacatgtgaatgccatatttaaagataaataactaataaaaagttataccact

SEQ ID NO: 214450 - DNA, 2327 bp, Zea Mays
cttcgttctcgtcttccttcctaccaccattccggtcatcaccgtcggtgaacgctacaacccagctatagtgctaacagagcctggagggaagggagtaggcgatgctactgcctctttcaagcaacgcgtgcgcagtctctcttgttctgcagagcagctatgccaattcggtgcagccttttccatcagtctgaagtctaaacagtgaacactcattcagcgcattatcaggaggcgatatagaggggagaaaaggaaaatcgtccatccaatcccaacttggactcggtggaaatggagttcttcaccgagtacggagaggcaagccagtaccagatccaagaagtcattggtaaaggcagctacggggtagttgctgcagctgtagatacccgcaccggtgagcgggttgctatcaagaagatcaacgatgtgtttgagcatgtctcggacgccacacgcatactgcgggagatcaagctccttcggttgcttcgtcacccagacatagttgagattaagcacatcatgctccctccatctcggagggagttccaagatatttatgttgtttttgagctcatggagtctgatctccatcaagtgatcaaggccaatgatgacctcacccctgaacatcaccagtttttcctgtaccaacttcttcgtgctctcaagtacatccatgctgctaatgtatttcatcgtgacctaaagcccaagaatatactggctaactcggactgcaaactgaaaatatgtgactttggtcttgcccgtgcatcatttaatgatgccccttcagctatattttggacagattatgtggcaacgaggtggtaccgggcacctgaactatgtggttcttttttctccaaatacactcctgcaattgatatttggagcattgggtgcatatttgctgaacttctcactggaaggccactatttcctgggaagaatgttgtacaccaattagatattataacagatcttcttggaactccatcatctgagaccttatctcggatccgaaatgagaaggccaggagatacttaagctgcatgcggaaaaaatatcccgtgccctttactcataaatttcgaaatgccgatcctttggctcttcgtcttttagagcgtttacttgcatttgatcctaaagatcggcctactgcagaagaggctctagctgatccatactttgcatcccttgctaatgtggaacgtgagccatcaagacacccaatttctaaacttgagtttgaatttgaaagaaggaagctggccaaagatgatgttagagaattgatctatcgagagattttggagtatcatccacagatgctggaggagcacatgcaaggtggagaacagattagcttcctctacccgagtggagttgatcggttcaaacggcagtttgcacatcttgaggagcattatagcaagggagaaagaggttctccactgcaaagaaagcatgcttctttaccaagggaaagagtggttgtatcgaaggacggtgatactgatcaacatattaatgaccaggagagaagtgcagattctgtcgcccgcaccactgtgagccctccaaggtcagaagacgacgacatgagcgatgtgaaatccacaagcttaagctctcggagctacctgaagagtgcgagcataagtgcttccaagtgtgtcgttgccacgaagaaacacccggaggacgatggaatcgctgaggaaatggaaggcgccgtcaatggattgtctgaaaaggtctccaggatgcactcgtaagcaggactgcccctggcaacagcaaccttgttgcaaggtttctgtctctggtacactgtattccgacgacagccttggaaaggcaaacactgtatgtcacacactagttcgactttacctgggtggaagaggaacacaccaccgcctgatggccctttcttcatcgtctgcatttccaccgtgtcatgccagcgctgcgtggcacctctagaaggtagaagccctgcatggattcatgaagaattcctaagatgtagcactagtcagtgcatggaggaaacatagtcggcctgtcgaccatgagatgttttcttgcaaatggagtctggacctatggttttcagttttattacaacggcttctgccgtaggaagtgtcagcagtgtatcatccctgtaatacccaatttataagagaccatataaaaggagaaaaatcatttgctttatgtatgtgtataacatatccacttatcatcacatgtgaatgccatatttaaagataaataactaataaaaagttataccact

SEQ ID NO: 214451 - DNA, 3084 bp, Zea Mays
ctcgctttcgcattgcacacaccaccatacaccgcactgctgagtgcagattgctgacctctactacactctactctactctactcctcctagtccttgttctgtacaaacctgttttcggcgtctggctgtaccgctagccttaacccctagagccagacggaggaggcctgcggaagcgggagcggaagaggaggaggagagtgtgttcagaatttcagaagcaaagtgctgtcttgccatacccctacagtgctactagcctgtgctgctgcagagaagccaatcgaggcggggcactcgttcctccccgttacaaggagaggaggaagatttaggggcggaggaggtcacagactcacaggaaggaaagatggactcttgatccccgtcgcggtcgcggctggtttgttgtgggcaagccgaaccattttgctgctataatactcgagcagtcgattcgcggctcccggggccagaatcttgctctgagaggcggaatttgtgcgggatttgagctttctttcctccaacgaggtgccctgaggaagggagggagcgccagttctcccactgctgtagtgcgtggtttcagggaggtatgagacaatgagggaagagagcaacaagaagagcaagctctcctggtcgaaatccctcgtgaggaagtggttcaacatcaagactaagccacatgatttccgtgcggattgcgccgccgcccaagcgattcagggagggtcgggcatgatgatggcgaatggaggaccagctgctcagagcgggaggcaggcgccgccaagaaaagcagaactgaccgaccgtcgaagcggagtagtatggatcgaatcagaggaggaaaaaacgacttcgatgcggcatgcctcacagaagttcagaactacagaatctttgcctccacatggaatgtaggtggtaaatccccaccgaggggattgaatcttgatgactggctccattcttcaccttcagctgatatctatgtgttaggatttcaagaaattgttcctttgaatgctggaaatgttcttggcacagaagataatctcccagcgaaaaaatgggtatcccttgtcaggaggacactgaataagaatcctggttcatgctgttatggtggctatcgcacgccatctcctgtccctgatccagttgtagaacaaaatgctgattttgagggatcgtcgagaaggctggacagtttatcctatttgcatcgtcggtcgttcaaccttagccggagtttaagagttgaaggggatcatatgctaccacaccaaaggttggatcgtaggttcagtgtctgtgacccagttagcttgggaggcaggccaagtgattttgataggaacttcccattcatgggatcaccggatgatcattgtatcgaggaggatacaagcaatgaagcatattttccacccttcccatatggctatggtgcctccgcgcctatggaagaaaatgatcatcagacaaatacatctaggtattgtttggttgccagcaagcaaatggtcggtatatttctcaccgtttgggtgcgcagcgaaataagaaatgatgtgagaaacctgaaagtttcttgcgtgggtagaggactaatgggttatcttggaaataagggttctatatccataagcatgtctttgcaccacacaaccttttgttttgtctgctgtcatctgacctctggtgaaaaggagggagatgaactacggagaaactctgacgttatggaaattctaagaaagactagatttccacaggtccgtggtgctgctgatgtcaagtcaccagaaacgattcttgagcatgaccgtatcatttggcttggggatttgaattatcggattgccctatcgtactgctcagctaaagctcttgtcgaaatgcataactggaagcaacttttagagaaagatcagcttcggatagaacgaagatgcgggcgtgttttccatggttggaaagaaggcaggatttattttcctccgacatataagtactcattcaactcggatcgttattctggtgtgcggcccaaagaaaagcggagaacacccgcttggtgcgatcgcattctgtggtacggtaatggcctctcgcagctgtcctacgttcgcggagagtctcgcttctctgaccacagaccagtctacagtattttcatggctgaggttgagagtgcccgccacagaagaaggaacatgggctattccagctctagaatcgaggtggaagagcttttgccgtatccatacagctccggagaaatgaagttctactggtttggctgacatagggcatatggctggagcttgttttctacttcaacttaggttgccgggtccttgatgaacaaacaataccttgggccatagactgcatggtcactagcttgatcagatgtaagcctggttatttttctcatctggctttcacagcttccagtcagatggttgagaagcgcaatgcacaaaactgacataaaaggatagccgggcagttttgcaactaaccgtttgccttttggacagccgtgttgaaacaaggatcggcccgcatctgtacatgtcattaaccacacagctcagaaaaaaaaaacccttctcgtccccaatttggttctctttttttaggagagttagtaaacatacatattttttctttctttgtttctccctttgcatttgggaaatctttttagaatgagattttggagtgtatcagcatgaggtgtaaaatcattgtgaatcggtaaaaggctggaatgatgcttgaaccgaactgatccgtgatcatgatctccattgctgatgagggaacagtggtgatggattgatgtgacttgggaggtttgcaaaggtgtaatcatgtgtataataacccttttatttgtttttttcctctgtccctgtggtgtagtgcctgagaagcgaaatgatgcctgcgtttgctgtgctcattgctgttaaaccttttttttctaattgtaacaggtcagagccttgcttcctggctggaaagcatggcattattcttgttatcagcttgcttgct

SEQ ID NO: 214452 - DNA, 1319 bp, Zea Mays
aataggtgattgatttctcgatttgggtcgattggagcaatcgttggctattctatcggcatgaataattgatgagacaaactcaatgtcaaacatatttctttgagttttcttcattgatagagtcaaaggcataaagataggacgacaactgacagcacacccctgactaagcagtggagaggtaaagcatcacagtagtctggaggaaaccgacaacacaccggtgaccaagcagtggagaagaggagcatcacagtagtctcgcattgcttatggattgtggggaatggaaccactctgttcaacagcaattttgtttggcaaaagattgtcaaggacacaagggatagaggttgtttttaaatgccactgatgagaaggagttgttgaatgcaattttcaagcttgctgttgagtatcctcacgcggacaatttagctggcgaggagacaaggcagcgattgagtaccaggataagtctattcaatgtcgctgaggcaacagttacaagatcctagaagaaaacccgtggcagctctacactacaataaaggtgataaatatgtctcacccaatggaagagtgcggcaccaatcaacctattgagaaagtgcttgcagctgaagatgcagcgcgaggatgttgcagcattcgaacaacgccaacgagctgctcttgcgccggaagctggaggagcagcagcaggctgccgaacttcagcacgccattgagctccagagccgccgcctcatgggtctccagctgctcgacctcaaggctcgcgcagctgcgacagcagcggcggcatcggcactgccaacaccagttgccaatgccttcgcgtccagccatcctttgagcaccatggcagtcgagtcgccactagagtccggagagtagctcaagctgagcagtgggtttgctctggaggggaagctcaacggtggcgacaaggaagaatctgcttgcgaggcgagccctgacgccgctgatagcgaccaaaggtggattaaacaacccatttcatcattcttcttccttgttagttatgattcccacgcttgcctttcatgaatcatgatcctatatgtatattgatattaatcagttctagaaagttcaacaacatttgagcatgtcaaaacctgatcgttgcctgttccatgtcaacagtggattataacacgtgcaaatgtagctatttgtgtgagaagacgtgtgatcgactctttttttatatagatagcattgagatcaactgtttgtatatatcttgtcataacatttttacttcgtagcaacgtacgagcgttcac

SEQ ID NO: 214453 - DNA, 1427 bp, Zea Mays
aataggtgattgatttctcgatttgggtcgattggagcaatcgttggctattctatcggcatgaataattgatgagacaaactcaatgtcaaacatatttctttgagttttcttcattgatagagtcaaaggcataaagataggacgacaactgacagcacacccctgactaagcagtggagaggtaaagcatcacagtagtctggaggaaaccgacaacacaccggtgaccaagcagtggagaagaggagcatcacagtagtctcgcattgcttatggattgtggggaatggaaccactctgttcaacagcaattttgtttggcaaaagattgtcaaggacacaagggatagaggttgtttttaaatgccactgatgagaaggagttgttgaatgcaattttcaagcttgctgttgagtatcctcacgcggacaatttagctggcgaggagacaaggcagcgattgagtaccaggataagtctattcaatgtcgctgaggcaacagttacaagatcctagaagaaaacccgtggcagctctacactacaataaaggtgataaatatgtctcacccaatggaagacatgatcaaggtagcaagatgttgaccccatgggtccttttggtggaataatgatagagtgcggcaccaatcaacctattgagaaagtgcttgcagctgaagatgcagagtgttgtatttgcctatcggcttacgatgacagtgcagagttgcgcgaactaccctgcgcgaggatgttgcagcattcgaacaacgccaacgagctgctcttgcgccggaagctggaggagcagcagcaggctgccgaacttcagcacgccattgagctccagagccgccgcctcatgggtctccagctgctcgacctcaaggctcgcgcagctgcgacagcagcggcggcatcggcactgccaacaccagttgccaatgccttcgcgtccagccatcctttgagcaccatggcagtcgagtcgccactagagtccgctcaagctgagcagtgggtttgctctggaggggaagctcaacggtggcgacaaggaagaatctgcttgcgaggcgagccctgacgccgctgatagcgaccaaaggtggattaaacaacccatttcatcattcttcttccttgttagttatgattcccacgcttgcctttcatgaatcatgatcctatatgtatattgatattaatcagttctagaaagttcaacaacatttgagcatgtcaaaacctgatcgttgcctgttccatgtcaacagtggattataacacgtgcaaatgtagctatttgtgtgagaagacgtgtgatcgactctttttttatatagatagcattgagatcaactgtttgtatatatcttgtcataacatttttacttcgtagcaacgtacgagcgttcac

SEQ ID NO: 214454 - DNA, 1366 bp, Zea Mays
aataggtgattgatttctcgatttgggtcgattggagcaatcgttggctattctatcggcatgaataattgatgagacaaactcaatgtcaaacatatttctttgagttttcttcattgatagagtcaaaggcataaagataggacgacaactgacagcacacccctgactaagcagtggagaggtaaagcatcacagtagtctggaggaaaccgacaacacaccggtgaccaagcagtggagaagaggagcatcacagtagtctcgcattgcttatggattgtggggaatggaaccactctgttcaacagcaattttgtttggcaaaagattgtcaaggacacaagggatagaggttgtttttaaatgccactgatgagaaggagttgttgaatgcaattttcaagcttgctgttgagtatcctcacgcggacaatttagctggcgaggagacaaggcagcgattgagtaccaggataagtctattcaatgtcgctgaggcaacagttacaagatcctagaagaaaacccgtggcagctctacactacaataaaggtgataaatatgtctcacccaatggaaggtagcaagatgttgaccccatgggtccttttggtggaataatgatagagtgcggcaccaatcaacctattgagaaagtgcttgcagctgaagatgcagcgcgaggatgttgcagcattcgaacaacgccaacgagctgctcttgcgccggaagctggaggagcagcagcaggctgccgaacttcagcacgccattgagctccagagccgccgcctcatgggtctccagctgctcgacctcaaggctcgcgcagctgcgacagcagcggcggcatcggcactgccaacaccagttgccaatgccttcgcgtccagccatcctttgagcaccatggcagtcgagtcgccactagagtccggagagtagctcaagctgagcagtgggtttgctctggaggggaagctcaacggtggcgacaaggaagaatctgcttgcgaggcgagccctgacgccgctgatagcgaccaaaggtggattaaacaacccatttcatcattcttcttccttgttagttatgattcccacgcttgcctttcatgaatcatgatcctatatgtatattgatattaatcagttctagaaagttcaacaacatttgagcatgtcaaaacctgatcgttgcctgttccatgtcaacagtggattataacacgtgcaaatgtagctatttgtgtgagaagacgtgtgatcgactctttttttatatagatagcattgagatcaactgtttgtatatatcttgtcataacatttttacttcgtagcaacgtacgagcgttcac

SEQ ID NO: 214455 - DNA, 1269 bp, Zea Mays
aataggtgattgatttctcgatttgggtcgattggagcaatcgttggctattctatcggcatgaataattgatgagacaaactcaatgtcaaacatatttctttgagttttcttcattgatagagtcaaaggcataaagataggacgacaactgacagcacacccctgactaagcagtggagaggtaaagcatcacagtagtctggaggaaaccgacaacacaccggtgaccaagcagtggagaagaggagcatcacagtagtctcgcattgcttatggattgtggggaatggaaccactctgttcaacagcaattttgtttggcaaaagattgtcaaggacacaagggatagaggttgtttttaaatgccactgatgagaaggagttgttgaatgcaattttcaagcttgctgttgagtatcctcacgcggacaatttagctggcgaggagacaaggcagcgattgagtaccaggataagtctattcaatgtcgctgaggcaacagttacaagatcctagaagaaaacccgtggcagctctacactacaataaaggtgataaatatgtctcacccaatggaaggcgcgaggatgttgcagcattcgaacaacgccaacgagctgctcttgcgccggaagctggaggagcagcagcaggctgccgaacttcagcacgccattgagctccagagccgccgcctcatgggtctccagctgctcgacctcaaggctcgcgcagctgcgacagcagcggcggcatcggcactgccaacaccagttgccaatgccttcgcgtccagccatcctttgagcaccatggcagtcgagtcgccactagagtccggagagtagctcaagctgagcagtgggtttgctctggaggggaagctcaacggtggcgacaaggaagaatctgcttgcgaggcgagccctgacgccgctgatagcgaccaaaggtggattaaacaacccatttcatcattcttcttccttgttagttatgattcccacgcttgcctttcatgaatcatgatcctatatgtatattgatattaatcagttctagaaagttcaacaacatttgagcatgtcaaaacctgatcgttgcctgttccatgtcaacagtggattataacacgtgcaaatgtagctatttgtgtgagaagacgtgtgatcgactctttttttatatagatagcattgagatcaactgtttgtatatatcttgtcataacatttttacttcgtagcaacgtacgagcgttcac

SEQ ID NO: 214456 - DNA, 2405 bp, Zea Mays
aataggtgattgatttctcgatttgggtcgattggagcaatcgttggctattctatcggcatgaataattgatgagacaaactcaatgtcaaacatatttctttgagttttcttcattgatagagtcaaaggcataaagataggacgacaactgacagcacacccctgactaagcagtggagaggtaaagcatcacagtagtctggaggaaaccgacaacacaccggtgaccaagcagtggagaagaggagcatcacagtagtctctttccagcatcagttggcgtctgcatcatggttgtactgcggctgaggttagttttctgtggcggtggaggcgaagtcatgggcacaggctgctgccctgcaggctgcggtctgccaaaaaccaaggaaatatatgaaggaaatcaacaaggaaataccactgcaacagtttgttcagagaactgctcttaagatctaagatgaggagatgaaaatgctgcaaggaccaaagaaattttcgcagaaactcctaaaacagagatactcttctcacctagattctctatgcctgtctcttcccaaattcaagagccacagatactaaataaaatacatgtgccttgtgacatttgataagcgtagatgtagcaggtgtattaacaagaaacattcatcgaacctgatcaatgtttatgttgtaagcacacattgatcgaaccatttcttctctgtaaactaatgtattaacaagaatccaagtggggtataacttgggagcaatggacctcctttaggtgctgatgtatcgtccttcttatatttacactgtcccaatgatgaagagggtggcacgccaaccgccacggccataaaaaggaaatggcctatgccgtatacaccttcttgagtaacaggaggggcagctggtgcaaccacagcagcagtgcctgatgtatcgtccttcttgagtaacatccttgtacaggttttttacatatagtgatttaacctaaaaaaatacgcacattcatatacaagctgaatgtttgattgcctgctgagttgtcttgtgacggcagcgaaatcttctcgaaattaatcgagagttgtcgacacatttgtctgtaattaaaaattctaaattaactttttataattaatttgtgtggtattgataatgttttccacacgtattttgcatattatagtgatgtttgttgttccgtatcaatgtttcatacaaatcttttacttccatcgcaacgcacgggcacatatctatactatatattgttaacaagggccaagcattgcttatggattgtggggaatggaaccactctgttcaacagcaattttgtttggcaaaagattgtcaaggacacaagggatagaggttgtttttaaatgccactgatgagaaggagttgttgaatgcaattttcaagcttgctgttgagtatcctcacgcggacaatttagctggcgaggagacaaggcagcgattgagtaccaggataagtctattcaatgtcgctgaggcaacagttacaagatcctagaagaaaacccgtggcagctctacactacaataaaggtgataaatatgtctcacccaatggaagacatgatcaaggtagcaagatgttgaccccatgggtccttttggtggaataatgatagagtgcggcaccaatcaacctattgagaaagtgcttgcagctgaagatgcagcgcgaggatgttgcagcattcgaacaacgccaacgagctgctcttgcgccggaagctggaggagcagcagcaggctgccgaacttcagcacgccattgagctccagagccgccgcctcatgggtctccagctgctcgacctcaaggctcgcgcagctgcgacagcagcggcggcatcggcactgccaacaccagttgccaatgccttcgcgtccagccatcctttgagcaccatggcagtcgagtcgccactagagtccggagagtagctcaagctgagcagtgggtttgctctggaggggaagctcaacggtggcgacaaggaagaatctgcttgcgaggcgagccctgacgccgctgatagcgaccaaaggtggattaaacaacccatttcatcattcttcttccttgttagttatgattcccacgcttgcctttcatgaatcatgatcctatatgtatattgatattaatcagttctagaaagttcaacaacatttgagcatgtcaaaacctgatcgttgcctgttccatgtcaacagtggattataacacgtgcaaatgtagctatttgtgtgagaagacgtgtgatcgactctttttttatatagatagcattgagatcaactgtttgtatatatcttgtcataacatttttacttcgtagcaacgtacgagcgttcac

SEQ ID NO: 214457 - DNA, 2455 bp, Zea Mays
aataggtgattgatttctcgatttgggtcgattggagcaatcgttggctattctatcggcatgaataattgatgagacaaactcaatgtcaaacatatttctttgagttttcttcattgatagagtcaaaggcataaagataggacgacaactgacagcacacccctgactaagcagtggagaggtaaagcatcacagtagtctggaggaaaccgacaacacaccggtgaccaagcagtggagaagaggagcatcacagtagtctctttccagcatcagttggcgtctgcatcatggttgtactgcggctgaggttagttttctgtggcggtggaggcgaagtcatgggcacaggctgctgccctgcaggctgcggtctgccaaaaaccaaggaaatatatgaaggaaatcaacaaggaaataccactgcaacagtttgttcagagaactgctcttaagatctaagatgaggagatgaaaatgctgcaaggaccaaagaaattttcgcagaaactcctaaaacagagatactcttctcacctagattctctatgcctgtctcttcccaaattcaagagccacagatactaaataaaatacatgtgccttgtgacatttgataagcgtagatgtagcaggtgtattaacaagaaacattcatcgaacctgatcaatgtttatgttgtaagcacacattgatcgaaccatttcttctctgtaaactaatgtattaacaagaatccaagtggggtataacttgggagcaatggacctcctttaggtgctgatgtatcgtccttcttatatttacactgtcccaatgatgaagagggtggcacgccaaccgccacggccataaaaaggaaatggcctatgccgtatacaccttcttgagtaacaggaggggcagctggtgcaaccacagcagcagtgcctgatgtatcgtccttcttgagtaacatccttgtacaggttttttacatatagtgatttaacctaaaaaaatacgcacattcatatacaagctgaatgtttgattgcctgctgagttgtcttgtgacggcagcgaaatcttctcgaaattaatcgagagttgtcgacacatttgtctgtaattaaaaattctaaattaactttttataattaatttgtgtggtattgataatgttttccacacgtattttgcatattatagtgatgtttgttgttccgtatcaatgtttcatacaaatcttttacttccatcgcaacgcacgggcacatatctatactatatattgttaacaagggccaagcattgcttatggattgtggggaatggaaccactctgttcaacagcaattttgtttggcaaaagattgtcaaggacacaagggatagaggttgtttttaaatgccactgatgagaaggagttgttgaatgcaattttcaagcttgctgttgagtatcctcacgcggacaatttagctggcgaggagacaaggcagcgattgagtaccaggataagtctattcaatgtcgctgaggcaacagttacaagatcctagaagaaaacccgtggcagctctacactacaataaaggtgataaatatgtctcacccaatggaagacatgatcaaggtagcaagatgttgaccccatgggtccttttggtggaataatgatagagtgcggcaccaatcaacctattgagaaagtgcttgcagctgaagatgcagagtgttgtatttgcctatcggcttacgatgacagtgcagagttgcgcgaactaccctgcgcgaggatgttgcagcattcgaacaacgccaacgagctgctcttgcgccggaagctggaggagcagcagcaggctgccgaacttcagcacgccattgagctccagagccgccgcctcatgggtctccagctgctcgacctcaaggctcgcgcagctgcgacagcagcggcggcatcggcactgccaacaccagttgccaatgccttcgcgtccagccatcctttgagcaccatggcagtcgagtcgccactagagtccgctcaagctgagcagtgggtttgctctggaggggaagctcaacggtggcgacaaggaagaatctgcttgcgaggcgagccctgacgccgctgatagcgaccaaaggtggattaaacaacccatttcatcattcttcttccttgttagttatgattcccacgcttgcctttcatgaatcatgatcctatatgtatattgatattaatcagttctagaaagttcaacaacatttgagcatgtcaaaacctgatcgttgcctgttccatgtcaacagtggattataacacgtgcaaatgtagctatttgtgtgagaagacgtgtgatcgactctttttttatatagatagcattgagatcaactgtttgtatatatcttgtcataacatttttacttcgtagcaacgtacgagcgttcac

SEQ ID NO: 214458 - DNA, 1392 bp, Zea Mays
tgaataggtgattgatttctcgatttgggtcgattggagcaatcgttggctattctatcggcatgaataattgatgagacaaactcaatgtcaaacatatttctttgagttttcttcattgatagagtcaaaggcataaagataggacgacaactgacagcacacccctgactaagcagtggagaggtaaagcatcacagtagtctggaggaaaccgacaacacaccggtgaccaagcagtggagaagaggagcatcacagtagtctcgcattgcttatggattgtggggaatggaaccactctgttcaacagcaattttgtttggcaaaagattgtcaaggacacaagggatagaggttgtttttaaatgccactgatgagaaggagttgttgaatgcaattttcaagcttgctgttgagtatcctcacgcggacaatttagctggcgaggagacaaggcagcgattgagtaccaggataagtctattcaatgtcgctgaggcaacagttacaagatcctagaagaaaacccgtggcagctctacactacaataaaggtgataaatatgtctcacccaatggaagatatcatatttagacatgatcaaggtagcaagatgttgaccccatgggtccttttggtggaataatgatagagtgcggcaccaatcaacctattgagaaagtgcttgcagctgaagatgcagcgcgaggatgttgcagcattcgaacaacgccaacgagctgctcttgcgccggaagctggaggagcagcagcaggctgccgaacttcagcacgccattgagctccagagccgccgcctcatgggtctccagctgctcgacctcaaggctcgcgcagctgcgacagcagcggcggcatcggcactgccaacaccagttgccaatgccttcgcgtccagccatcctttgagcaccatggcagtcgagtcgccactagagtccggagagtagctcaagctgagcagtgggtttgctctggaggggaagctcaacggtggcgacaaggaagaatctgcttgcgaggcgagccctgacgccgctgatagcgaccaaaggtggattaaacaacccatttcatcattcttcttccttgttagttatgattcccacgcttgcctttcatgaatcatgatcctatatgtatattgatattaatcagttctagaaagttcaacaacatttgagcatgtcaaaacctgatcgttgcctgttccatgtcaacagtggattataacacgtgcaaatgtagctatttgtgtgagaagacgtgtgatcgactctttttttatatagatagcattgagatcaactgtttgtatatatcttgtcataacatttttacttcgtagcaacgtacgagcgttcac

SEQ ID NO: 214459 - DNA, 1638 bp, Zea Mays
aaaccaacacgtttatatgataaccttaatgtatatcagacattcgtgaaaaatatcagaaattcatccggaaattcggtgaagtgctaatcgcttgcggcttgcctgccggtcttgtggttttgtgctgctctcgctgtccgcagatgctctccatggaagcctctccccagttccttgatggaaggtgaataggtgattgatttctcgatttgggtcgattggagcaatcgttggctattctatcggcatgaataattgatgagacaaactcaatgtcaaacatatttctttgagttttcttcattgatagagtcaaaggcataaagataggacgacaactgacagcacacccctgactaagcagtggagaggtaaagcatcacagtagtctggaggaaaccgacaacacaccggtgaccaagcagtggagaagaggagcatcacagtagtctcgcattgcttatggattgtggggaatggaaccactctgttcaacagcaattttgtttggcaaaagattgtcaaggacacaagggatagaggttgtttttaaatgccactgatgagaaggagttgttgaatgcaattttcaagcttgctgttgagtatcctcacgcggacaatttagctggcgaggagacaaggcagcgattgagtaccaggataagtctattcaatgtcgctgaggcaacagttacaagatcctagaagaaaacccgtggcagctctacactacaataaaggtgataaatatgtctcacccaatggaagatatcatatttagacatgatcaaggtagcaagatgttgaccccatgggtccttttggtggaataatgatagagtgcggcaccaatcaacctattgagaaagtgcttgcagctgaagatgcagagtgttgtatttgcctatcggcttacgatgacagtgcagagttgcgcgaactaccctgcgcgaggatgttgcagcattcgaacaacgccaacgagctgctcttgcgccggaagctggaggagcagcagcaggctgccgaacttcagcacgccattgagctccagagccgccgcctcatgggtctccagctgctcgacctcaaggctcgcgcagctgcgacagcagcggcggcatcggcactgccaacaccagttgccaatgccttcgcgtccagccatcctttgagcaccatggcagtcgagtcgccactagagtccggagagtagctcaagctgagcagtgggtttgctctggaggggaagctcaacggtggcgacaaggaagaatctgcttgcgaggcgagccctgacgccgctgatagcgaccaaaggtggattaaacaacccatttcatcattcttcttccttgttagttatgattcccacgcttgcctttcatgaatcatgatcctatatgtatattgatattaatcagttctagaaagttcaacaacatttgagcatgtcaaaacctgatcgttgcctgttccatgtcaacagtggattataacacgtgcaaatgtagctatttgtgtgagaagacgtgtgatcgactctttttttatatagatagcattgagatcaactgtttgtatatatcttgtcataacatttttacttcgtagcaacgtacgagcgttcac

SEQ ID NO: 214460 - DNA, 1567 bp, Zea Mays
aaaccaacacgtttatatgataaccttaatgtatatcagacattcgtgaaaaatatcagaaattcatccggaaattcggtgaagtgctaatcgcttgcggcttgcctgccggtcttgtggttttgtgctgctctcgctgtccgcagatgctctccatggaagcctctccccagttccttgatggaaggtgaataggtgattgatttctcgatttgggtcgattggagcaatcgttggctattctatcggcatgaataattgatgagacaaactcaatgtcaaacatatttctttgagttttcttcattgatagagtcaaaggcataaagataggacgacaactgacagcacacccctgactaagcagtggagaggtaaagcatcacagtagtctggaggaaaccgacaacacaccggtgaccaagcagtggagaagaggagcatcacagtagtctcgcattgcttatggattgtggggaatggaaccactctgttcaacagcaattttgtttggcaaaagattgtcaaggacacaagggatagaggttgtttttaaatgccactgatgagaaggagttgttgaatgcaattttcaagcttgctgttgagtatcctcacgcggacaatttagctggcgaggagacaaggcagcgattgagtaccaggataagtctattcaatgtcgctgaggcaacagttacaagatcctagaagaaaacccgtggcagctctacactacaataaaggtgataaatatgtctcacccaatggaagacatgatcaaggtagcaagatgttgaccccatgggtccttttggtggaataatgatagagtgcggcaccaatcaacctattgagaaagtgcttgcagctgaagatgcagcgcgaggatgttgcagcattcgaacaacgccaacgagctgctcttgcgccggaagctggaggagcagcagcaggctgccgaacttcagcacgccattgagctccagagccgccgcctcatgggtctccagctgctcgacctcaaggctcgcgcagctgcgacagcagcggcggcatcggcactgccaacaccagttgccaatgccttcgcgtccagccatcctttgagcaccatggcagtcgagtcgccactagagtccggagagtagctcaagctgagcagtgggtttgctctggaggggaagctcaacggtggcgacaaggaagaatctgcttgcgaggcgagccctgacgccgctgatagcgaccaaaggtggattaaacaacccatttcatcattcttcttccttgttagttatgattcccacgcttgcctttcatgaatcatgatcctatatgtatattgatattaatcagttctagaaagttcaacaacatttgagcatgtcaaaacctgatcgttgcctgttccatgtcaacagtggattataacacgtgcaaatgtagctatttgtgtgagaagacgtgtgatcgactctttttttatatagatagcattgagatcaactgtttgtatatatcttgtcataacatttttacttcgtagcaacgtacgagcgttcac

SEQ ID NO: 214461 - DNA, 3136 bp, Zea Mays
tagctagagggactagtagtaggtagtagtagaggagaacagccactcagccagccccctttacttgcacacaatagacaacctcgaacagaaaagaagcagttttgccgtccgagatgagccgccactgtgtgactctccttgtgatcatctttggattactgcagatggctgtggctctctactctaatccaagttcaacgcacccgaactgcacggagagatgtggcaacgtcagcatccaatatcctttcggcttcggatccggctgcttccggcagcccgatttcagcctcacctgcgacggcggcggcggcggcaaccagccgcccaagacctttctgcatgacggcatcaccgaggtcttgcccgattccggtgtcacggtgggtctgtcaaggcttattgatgtagccatttcccacaccatctttatggcacctggtattcctagttacaacttctcgtggaatctcagttctttcactatgttggatggctcattcaacgtaactgggtgtgacttcgatatatatcgtcaagaaccgggcaagaatggttccataccgcggtgtacaaatagctgcccccaaaacatcaccgagacggtggccagacagaactgcaatggaaccgggtgctgccgtctttacgttggagaagttgttcctgatttccagctgaaatttgtgctccacaataatgacactagaggtgatcatgatgctctttctaatggaagcaccctgtggaatacaataaacattaccagcaactgggcccaaatcttatgggatatagatgatcaaccgacatgctccagagcgaaggacaaaaatataaactacgcatgtgtcagcaactacagccattgctttgacgctgaactgtttgatattggttatagatgtggttgtaacagcggttacgtaggcaatccctatgtagttgatggctgcaagcgtgacgaaggatatagtccaaatcaactgaaggaaaactgctcgaggtcctgtggtaatatcagtgttccatatccctttggtttagaggaaggttgctctgcaaggaagctatttaaactcaactgcagaaatgcgacagcgtctatgctccaattcgatgacgaccgtgttgtggcgtttataaatgttgcagagagtctcgtgggcatcaggtttacctcacatttcgaagatgatcagcttgggatatatgtaccaggtgaacccgatctctttatgggtcttggggaatcagtggtctcaatgcactgggcagctgccaatcttacatgcgacgaggccctgaaaaataaatcacaatatgcatgtgtcagttcaaacagcaaatgtttaggagtcaattcaaaggatggttatattggatacagatgcaaatgcttagatggtttccaaggaaatccatataccatcagtgatggttgtgaagatatcaatgaatgtaaaacacaacacatttgcaaagagaacgaggtatgcaacaatgttgtagggagctactactgcaccaattgccctgataaaacagagtacgatgcagcaacaaaccagtgcaaagcaacaaaacagctgggtcttgttttgggtgtgattattgggctttgtgttggctttggcattctagtatcttgcttgggcgggatgcttgtcatccgtagatggaaaagggacattcaaaagcaactacggagaaaatactttagaaaaaaccaaggacttctcctagaacaactaatatcatctgatgagaatgcccgcaacaatacgaagattttttctctggaagagctcaagaaggctacaaatgactttgatacatcacgcatacttggacgtggaggccatggaatggtttacaaaggaatcttgtcggatcagcgtgtggtagcaataaaaatttccaagatcatggagcaaggtgaaatcgacagttttatcaatgaggtcgccattctttctcagataaaccaccgcaacatagtacgactcttcggatgttgtcttgaaactgaggtcccacttcttgtgtatgatttcgtatctaatggttctttgttcgaaattctccatgccgctgaggcaagcaacgatttccagttgtcttgggacgattgcttaaggattgcattagaggctgcaggggcactttattatctccattcttcagcttcagtctcaatcttccaccgtgatgtcaagtcctcgaatatacttttggatggaaactacactgcaaaagtttcagattttggtgcgtcaaggttggttcctattgaccaaacccatgttgttacgaatattcaaggcacttttggctacttagatcctgagtactaccacactgggcaactaaatgagaaaagtgatgtgtatagctttggagtggtacttgtggagctactccttcgaaagaagccggtttttacaaatgagactgggacaaagcaaaatctgtccaactatttcctttgggaaaagaagatgaaacctgttacagagatagtggcttctcaagttctcgaggaagcaacagaggaagaaattaacatggttgcctcccttgccgagaagtgcttgagactccgtcacgaagaaagacctacaatgaagctagtagaaatgactctacagtttttgcgagcagagcggttgaactcaagtagtgatgttcctgcgagcaagcaagaggtggaagaacttttgggtacaagcacttcctattctgacactttgctggacaataaagctgctacaacatcccaacaatcaaagggatattatagtttggagcaggagtttgcttctactactctaccacgttagatttgtcactcgagtgtgaattattaccgttgtcatttacgttataattcgtgaaccaaacaacacctcggtgcgttgtcatttacttgttattctgtcatgaaaaagtatattgactatggcagcaaacgtagcagcaccttgaaacacattattacagattcttcagttcattcttaataatcttcccagagcactgtctattagatatcatcttcttcatctctattctgcaacaacaagaccatatgttgtagagtagatgctaggatgtcaccaccatcgtctgg

SEQ ID NO: 214462 - DNA, 3872 bp, Zea Mays
ggcagaagtcccacgtagccagctgtcagcatatcatcttctcctcaagtcaaagatggtaccagaagaatacggacaatgctgctacgacgacgatgactatacatggagtatatgaagatggaggcatcgcgggaaaaggcacaggcgtgccaggagagcgggctcggtgtctaatgaaaactagcgtccgtctagcttgggctggagtgggccttgtaaatgttggcaggtcgattggtcgtgtggaccgagtggttacaagtaacacccaaaccctggctgtaaggggtcatgaaccattttggctatcagatatcaaatcagatcgtcttcctcgctgttatcttcttcttcaacccttcttctacctctcttctctccgatattcccttctaggtgctaacatttggtatcagactagcgcaatcctgattgtcatccgcgttcgattgctgtggtcggaatggaatccgcgatgcagcagattttggaagctttgggccagatggaggagcgattgacggcaacgctgggagccagatgcgacgcgatcgagcaacgcagcacgacaaccgtggcaaatctgaggggcggccgcgtagggctggacgctggcgcacgcgtggtcgtcgacaacttctccttcagagtcggagtcagagtttctcacctcccttgctgcccaggctccctcggccgaggaggccatggtcgcggtcgcggacgcggggagccccgcgaggctcaacccgctccccaacaccgacgcagaggaggaggaggttctcaccatcacgcccaccaagtgttcgacaatatacctcaaccgcggcatctactccgtccgcaacccgatcctccaccgtcagcacctactccgggactgcgacggcaaccacgtcgacatccttcctacctccgagttcgacgagggtcccatcttcgacgaggagccctgcttccaccgtaacctcctggattcagatccagactctccctacgactgggtcgtccccgtcatcgccgtccacagcagcggctacactgagatgtcccacagcgaagccgacaaggtccccgcgaccgccgcgctacccaacctgcgcgagaagatctgctgtcggttcgtcgataggacgaagctgtccagccatgtccgcctcatccacttctccctaccgtcgccggaccaggcgctcggcatccccatcggcacgcatgtcttcgactgcaccagcgttgacgggaagccgtgtatgcgatcgtacacgccgacgagcaaggaggacgaggttctcgccactacgcccatcaggtgtttgacgaattgctttagcatcatacagtgtcgtttcttgcactcgtgcaattgcagaagggatgcagtgcagcataggcaatcatggccaccgcctgtacagtatgggatactgggtgatggtgttcaagtctggcttccgccttggccaccacctgtttgggaattctggctgtcactgaagattactggtccacagatgatgcattcggtaggatactttggattgccagttatgccagcgacatgtattacaatttcagagattgtgtctggttcaagcgagcaaatatttcctgaaatatttctacaaagcttacatgagtgcagagtttgtcttagtgaaaatactggcagaagtttactccagctcccatgccaccatttgttttgcttgatgtgtatgaagtctaattgcagaattcatgtgatagaagcggatttaacccaggtctggttaagagaagatgcagttgcttacttcaaaaatatgtttgatggtggcctgaggccaacctcaaatgcatttaacaaagttatagatggctgggtgaaggttgatatgctcaacgaggcccatgggttctttgatatgatgcctgaaaaggacatagatgatgttacagtggtcattttctactttggaggacaacatgtgggctgggaaatgaagacagaatggttgtctaatggttggctatgtttggtatgtggtgcatctgatactcaagagcttcctctacatttcattaaacttgcaaaggatacgtacacatctgactgcatgttcaaaaaaatcggatatggcactgtgagtgaggctttggtttacatgctgtccttactatttgttcgaagagattattgcaacgaggaaccattttttaggaatgtgcttgagcattatcaatgtggcgttgagatgatacggagggatttatttattggccattggaaacattatcttcaaagtgctataccacttcaaccctgctttgatggtctcataaatgttggcaagatttgggtgaattactgactctcaactgccctgctgacagagcaatggtgctgctgatgtaccaaattgagttgagactgctcaattgggcctgggaagacgagtgtgttttcaacctgtgtctacttggattacacagtgctgttcatagcagcctagccaatgcttataaatcctggttgataacaatgattcaccgaacacactcaattggccaagatcatttttggcataacgtggataggtgtgtggtgtgtggaattaaggatagatgctgtgcaagattggcaaagctagttttatctgctacactgacacaagattctggcaagctttctcaacttgaattgcaccatccattgttgttgaatactcagtcaagcggcttgaggacaagccgcatttcaagcagtggggaatgtcagcatatcatcttctcctcaagtcaaagatggtaccagaagaatacggacaatgctgctacgacgacgatgactatacatggagtatatgaagatggaggcatcgcgggaaaaggcacaggcgtgccaggagagcgggctcggtgtctaatgaaaactagcgtccgtctagcttgggctggagtgggccttgtaaatgttggcaggtcgattggtcgtgtggaccgagtggtcgtgtggttacaagtaacacccaaaccctggctgtaaggggtcatgaaccattttggctatcagatatcaaatcagatcgtcttcctcgctgttatcttcttcttcaacccttcttctacctctcttctctccgatattcccttctaggtgctaacaccagcttggctggccgcatcagcatcgcttgaataaataccgccatctgtatgaagtgaggaggtgatgccaagcagatgtgtaaccatttagaatgcttgtggtggaccaactgcggacaagctgggaagaaggcacgaacatgtagcagctctctatcatcgattgcggttgcggcttgcaagcattctactcggcacaggacacgtaccgagtgaaagcaactgttcctattgccgtgccggtaagtactacactgctactctccttttcccacgagtttgaccagctcggccttggcagcttccatgaccactgggaaatcaacctccaaatagcggcccctgccaaccaaaattccagcctgtgagatacataaactggtagcaaggaaaaatatatacatgagagggagagaagtggcgggaagagaccagaagtggttcttggaccaggtggcagatggaaaagccgggcttgatatgccatgcataatcctagcaacggcccttggcgtgaatttcgcaaacgaattgcttttaaggaacacctgtggtacagttaaaagtgttgtcatagacgacaaaaaaatcatgatggaaaatgcagcgactgtccgtacctttatgtcagcttgcaagaatgggctgcaggaagcaagatgaaatgccgagtcaaatgaagttttggaataaagcagttcaaagtacaagtggat

SEQ ID NO: 214463 - DNA, 3022 bp, Zea Mays
ggcatcggcatgtcatggacatcccccgctcactgttcgaagagaagcttgagcacatgaaggaatccaaggggctgaagaacgacaccgacctcacggcctctgacctcaaagagctcgtgggtcagtacaaggaggtctacctctcagccaagggagagccattcccctcagaccccaagaagcagctggagctggcagtgctggctgtgttcaactcgtgggagagccccagggccaagaagtacaggagcatcaaccagatcactggcctcaggggcaccgccgtgaacgtgcagtgcatggtgttcggcaacatggggaacacttctggcaccggcgtgctcttcaccaggaaccccaacaccggagagaagaagctgtatggcgagttcctggtgaacgctcagggtgaggatgtggttgccggaataagaaccccagaggaccttgacgccatgaagaacctcatgccacaggcctacgacgagcttgttgagaactgcaacatcctggagagccactataaggaaatgcaggatatcgagttcactgtccaggaaaacaggctgtggatgttgcagtgcaggacagggaaacgtacgggcaaaagtgccgtgaagatcgccgtggacatggttaacgagggccttgttgagccccgctcagcgatcaagatggtagagccaggccacctggaccagcttctccatcctcagtttgagaacccgtcggcgtacaaggatcaagtcattgccactggtctgccagcctcacctggggctgctgtgggccaggttgtgttcactgctgaggatgctgaagcatggcattcccaagggaaagctgctattctggtaagggcggagaccagccctgaggacgttggtggcatgcacgctgctgtggggattcttacagagaggggtggcatgacttcccacgctgctgtggtcgcacgtgggtgggggaaatgctgcgtctcgggatgctcaggcattcgcgtaaacgatgcggagaagctcgtgacgatcggaggccatgtgctgcgcgaaggtgagtggctgtcgctgaatgggtcgactggtgaggtgatccttgggaagcagccgctttccccaccagcccttagtggtgatctgggaactttcatggcctgggtggatgatgttagaaagctcaaggtcctggctaacgccgatacccctgatgatgcattgactgcgcgaaacaatggggcacaaggaattggattatgccggacagagcacatgttctttgcttcagacgagaggattaaggctgtcaggcagatgattatggctcccacgcttgagctgaggcagcaggcgctcgaccgtctcttgccgtatcagaggtctgacttcgaaggcattttccgtgctatggatggactcccggtgaccatccgactcctggaccctcccctccacgagttccttccagaagggaacatcgaggacattgtaagtgaattatgtgctgagacgggagccaaccaggaggatgccctcgcgcgaattgaaaagctttcagaagtaaacccgatgcttggcttccgtgggtgcaggcttggtatatcgtaccctgaattgacagagatgcaagcccgggccatttttgaagctgctatagcaatgaccaaccagggtgttcaagtgttcccagagataatggttcctcttgttggaacaccacaggaactggggcatcaagtgactcttatccgccaagttgctgagaaagtgttcgccaatgtgggcaagactatcgggtacaaagttggaacaatgattgagatccccagggcagctctggtggctgatgagatagcggagcaggctgaattcttctccttcggaacgaacgacctgacgcagatgacctttgggtacagcagggatgatgtgggaaagttcattcccgtctatcttgctcagggcatcctccaacatgaccccttcgaggtcctggaccagaggggagtgggcgagctggtgaagtttgctacagagaggggccgcaaagctaggcctaacttgaaggtgggcatttgtggagaacacggtggagagccttcgtctgtggccttcttcgcgaaggctgggctggattacgtttcttgctcccctttcagggttccgattgctaggctagctgcagctcaggtgcttgtctgaggctgcctcctcgttggcaaccggattgcctgctgctggtggatgtggtgatcaacagtattattacagagccatgctatgtgaacattactagtagcagtgctcataaaagctacaatcccatctcccttttttttccagtcatgtaaaacttccaaactgctccatggttcaaaactctgttcttcaatacatcatcaattatcgattatatacgtggcaaggttttttctttgtttgcttttttcttttctttctggcatgtgtttttttggttttcttggtgtgtgtgtgaggtgtgcatgtcgctgttgaggcccttgctgcacagaccacctcaaactttaagcctcgaaaaagctggtactatttttttagaactctggagtctggtcaatatgcaattgactggtttgcttctgaggctcttcttgcattcatgcctttacggccactctttggcacctgtaacacaggtaaaaaaaatgttaaaagatggttcaggaacacagcagttttcaagccagggaaactgtactgtacagaaaccaagagatcgttcgacatacctgtgcccgcacatctacctaacattctcgaggaccattgccgatcaaaggcccacacatcgtcttcttgttccggcagttgataagaacctagtacataagagacagtacatcatcaaaataaggagcaggtgaaaagcaccatctgcagtatgcagtatgcaacctggcacatggcatactatgtgatactgtacatgagtacaggaaaggatagcttattacaatatcggtgagttacgacacacaaat

SEQ ID NO: 214464 - DNA, 3259 bp, Zea Mays
ctcctcgcttccattcccgtccgccggttgttgttactgctagcttgtcccactagctaggtgcagtaggtgcctagttttgcgcgcatcgcgtcgcgtcgacgacgacccatcctccaccgcgctgccgtggccgcaaccaaggctggatggagcttttgtctgtttgccaggccagccgttgctttgggttaaaagtgcaaaaaaaaatgatgaaggtcacgctacgaactaaacagaccatatacgtcatggacatcccccgctcactgttcgaagagaagcttgagcacatgaaggaatccaaggggctgaagaacgacaccgacctcacggcctctgacctcaaagagctcgtgggtcagtacaaggaggtctacctctcagccaagggagagccattcccctcagaccccaagaagcagctggagctggcagtgctggctgtgttcaactcgtgggagagccccagggccaagaagtacaggagcatcaaccagatcactggcctcaggggcaccgccgtgaacgtgcagtgcatggtgttcggcaacatggggaacacttctggcaccggcgtgctcttcaccaggaaccccaacaccggagagaagaagctgtatggcgagttcctggtgaacgctcagggtgaggatgtggttgccggaataagaaccccagaggaccttgacgccatgaagaacctcatgccacaggcctacgacgagcttgttgagaactgcaacatcctggagagccactataaggaaatgcaggatatcgagttcactgtccaggaaaacaggctgtggatgttgcagtgcaggacagggaaacgtacgggcaaaagtgccgtgaagatcgccgtggacatggttaacgagggccttgttgagccccgctcagcgatcaagatggtagagccaggccacctggaccagcttctccatcctcagtttgagaacccgtcggcgtacaaggatcaagtcattgccactggtctgccagcctcacctggggctgctgtgggccaggttgtgttcactgctgaggatgctgaagcatggcattcccaagggaaagctgctattctggtaagggcggagaccagccctgaggacgttggtggcatgcacgctgctgtggggattcttacagagaggggtggcatgacttcccacgctgctgtggtcgcacgtgggtgggggaaatgctgcgtctcgggatgctcaggcattcgcgtaaacgatgcggagaagctcgtgacgatcggaggccatgtgctgcgcgaaggtgagtggctgtcgctgaatgggtcgactggtgaggtgatccttgggaagcagccgctttccccaccagcccttagtggtgatctgggaactttcatggcctgggtggatgatgttagaaagctcaaggtcctggctaacgccgatacccctgatgatgcattgactgcgcgaaacaatggggcacaaggaattggattatgccggacagagcacatgttctttgcttcagacgagaggattaaggctgtcaggcagatgattatggctcccacgcttgagctgaggcagcaggcgctcgaccgtctcttgccgtatcagaggtctgacttcgaaggcattttccgtgctatggatggactcccggtgaccatccgactcctggaccctcccctccacgagttccttccagaagggaacatcgaggacattgtaagtgaattatgtgctgagacgggagccaaccaggaggatgccctcgcgcgaattgaaaagctttcagaagtaaacccgatgcttggcttccgtgggtgcaggcttggtatatcgtaccctgaattgacagagatgcaagcccgggccatttttgaagctgctatagcaatgaccaaccagggtgttcaagtgttcccagagataatggttcctcttgttggaacaccacaggaactggggcatcaagtgactcttatccgccaagttgctgagaaagtgttcgccaatgtgggcaagactatcgggtacaaagttggaacaatgattgagatccccagggcagctctggtggctgatgagatagcggagcaggctgaattcttctccttcggaacgaacgacctgacgcagatgacctttgggtacagcagggatgatgtgggaaagttcattcccgtctatcttgctcagggcatcctccaacatgaccccttcgaggtcctggaccagaggggagtgggcgagctggtgaagtttgctacagagaggggccgcaaagctaggcctaacttgaaggtgggcatttgtggagaacacggtggagagccttcgtctgtggccttcttcgcgaaggctgggctggattacgtttcttgctcccctttcagggttccgattgctaggctagctgcagctcaggtgcttgtctgaggctgcctcctcgttggcaaccggattgcctgctgctggtggatgtggtgatcaacagtattattacagagccatgctatgtgaacattactagtagcagtgctcataaaagctacaatcccatctcccttttttttccagtcatgtaaaacttccaaactgctccatggttcaaaactctgttcttcaatacatcatcaattatcgattatatacgtggcaaggttttttctttgtttgcttttttcttttctttctggcatgtgtttttttggttttcttggtgtgtgtgtgaggtgtgcatgtcgctgttgaggcccttgctgcacagaccacctcaaactttaagcctcgaaaaagctggtactatttttttagaactctggagtctggtcaatatgcaattgactggtttgcttctgaggctcttcttgcattcatgcctttacggccactctttggcacctgtaacacaggtaaaaaaaatgttaaaagatggttcaggaacacagcagttttcaagccagggaaactgtactgtacagaaaccaagagatcgttcgacatacctgtgcccgcacatctacctaacattctcgaggaccattgccgatcaaaggcccacacatcgtcttcttgttccggcagttgataagaacctagtacataagagacagtacatcatcaaaataaggagcaggtgaaaagcaccatctgcagtatgcagtatgcaacctggcacatggcatactatgtgatactgtacatgagtacaggaaaggatagcttattacaatatcggtgagttacgacacacaaat

SEQ ID NO: 214465 - DNA, 3460 bp, Zea Mays
gttccaacccgacgagcaagagggtgttccacttcggcaagggcaagagcgagggcaacaagaccatgaaggaactgctgggcggcaagggcgcgaacctggcggagatggcgagcatcgggctgtcggtgccgccggggttcacggtgtcgacggaggcgtgccagcagtaccaggacgccgggtgcgccctccccgcgggcctctgggccgagatcgtcgacggcctgcagtgggtggaggagtacatgggcgccaccctgggcgatccgcagcgcccgctcctgctctccgtccgctccggcgccgccgtgtccatgcccggcatgatggacacggtgctcaacctggggctcaacgacgaagtggccgccgggctggcggccaagagcggggagcgcttcgcctacgactccttccgccgcttcctcgacatgttcggcaacgtcgtcatggacatcccccgctcactgttcgaagagaagcttgagcacatgaaggaatccaaggggctgaagaacgacaccgacctcacggcctctgacctcaaagagctcgtgggtcagtacaaggaggtctacctctcagccaagggagagccattcccctcagaccccaagaagcagctggagctggcagtgctggctgtgttcaactcgtgggagagccccagggccaagaagtacaggagcatcaaccagatcactggcctcaggggcaccgccgtgaacgtgcagtgcatggtgttcggcaacatggggaacacttctggcaccggcgtgctcttcaccaggaaccccaacaccggagagaagaagctgtatggcgagttcctggtgaacgctcagggtgaggatgtggttgccggaataagaaccccagaggaccttgacgccatgaagaacctcatgccacaggcctacgacgagcttgttgagaactgcaacatcctggagagccactataaggaaatgcaggatatcgagttcactgtccaggaaaacaggctgtggatgttgcagtgcaggacagggaaacgtacgggcaaaagtgccgtgaagatcgccgtggacatggttaacgagggccttgttgagccccgctcagcgatcaagatggtagagccaggccacctggaccagcttctccatcctcagtttgagaacccgtcggcgtacaaggatcaagtcattgccactggtctgccagcctcacctggggctgctgtgggccaggttgtgttcactgctgaggatgctgaagcatggcattcccaagggaaagctgctattctggtaagggcggagaccagccctgaggacgttggtggcatgcacgctgctgtggggattcttacagagaggggtggcatgacttcccacgctgctgtggtcgcacgtgggtgggggaaatgctgcgtctcgggatgctcaggcattcgcgtaaacgatgcggagaagctcgtgacgatcggaggccatgtgctgcgcgaaggtgagtggctgtcgctgaatgggtcgactggtgaggtgatccttgggaagcagccgctttccccaccagcccttagtggtgatctgggaactttcatggcctgggtggatgatgttagaaagctcaaggtcctggctaacgccgatacccctgatgatgcattgactgcgcgaaacaatggggcacaaggaattggattatgccggacagagcacatgttctttgcttcagacgagaggattaaggctgtcaggcagatgattatggctcccacgcttgagctgaggcagcaggcgctcgaccgtctcttgccgtatcagaggtctgacttcgaaggcattttccgtgctatggatggactcccggtgaccatccgactcctggaccctcccctccacgagttccttccagaagggaacatcgaggacattgtaagtgaattatgtgctgagacgggagccaaccaggaggatgccctcgcgcgaattgaaaagctttcagaagtaaacccgatgcttggcttccgtgggtgcaggcttggtatatcgtaccctgaattgacagagatgcaagcccgggccatttttgaagctgctatagcaatgaccaaccagggtgttcaagtgttcccagagataatggttcctcttgttggaacaccacaggaactggggcatcaagtgactcttatccgccaagttgctgagaaagtgttcgccaatgtgggcaagactatcgggtacaaagttggaacaatgattgagatccccagggcagctctggtggctgatgagatagcggagcaggctgaattcttctccttcggaacgaacgacctgacgcagatgacctttgggtacagcagggatgatgtgggaaagttcattcccgtctatcttgctcagggcatcctccaacatgaccccttcgaggtcctggaccagaggggagtgggcgagctggtgaagtttgctacagagaggggccgcaaagctaggcctaacttgaaggtgggcatttgtggagaacacggtggagagccttcgtctgtggccttcttcgcgaaggctgggctggattacgtttcttgctcccctttcagggttccgattgctaggctagctgcagctcaggtgcttgtctgaggctgcctcctcgttggcaaccggattgcctgctgctggtggatgtggtgatcaacagtattattacagagccatgctatgtgaacattactagtagcagtgctcataaaagctacaatcccatctcccttttttttccagtcatgtaaaacttccaaactgctccatggttcaaaactctgttcttcaatacatcatcaattatcgattatatacgtggcaaggttttttctttgtttgcttttttcttttctttctggcatgtgtttttttggttttcttggtgtgtgtgtgaggtgtgcatgtcgctgttgaggcccttgctgcacagaccacctcaaactttaagcctcgaaaaagctggtactatttttttagaactctggagtctggtcaatatgcaattgactggtttgcttctgaggctcttcttgcattcatgcctttacggccactctttggcacctgtaacacaggtaaaaaaaatgttaaaagatggttcaggaacacagcagttttcaagccagggaaactgtactgtacagaaaccaagagatcgttcgacatacctgtgcccgcacatctacctaacattctcgaggaccattgccgatcaaaggcccacacatcgtcttcttgttccggcagttgataagaacctagtacataagagacagtacatcatcaaaataaggagcaggtgaaaagcaccatctgcagtatgcagtatgcaacctggcacatggcatactatgtgatactgtacatgagtacaggaaaggatagcttattacaatatcggtgagttacgacacacaaat

SEQ ID NO: 214466 - DNA, 3958 bp, Zea Mays
gagccacaggcgtggagacgtccgggataaggtgagcagccgctgcgataggggcgcgtgtgaaccccgtcgcgccccacggatggtataagaataaaggcattccgcgtgcaggattcacccgttcgcctctcaccttttcgctgtactcactcgccacacacaccccctctccagctccgttggagctccggacagcagcaggcgcggggcggtcacgtagtaagcagctctcggctccctctccccttgctccatatgatcgtgcaacccatcgagctacgcgcgtggactgccttccctgggtcggcgcaggaggggatcggaaggatggcggcgtcggtttccagggccatctgcgttcagaagccgggctcaaaatgcaccagggacagggaagcgacctccttcgcccgccgatcggtcgcagcgccgaggcccccgcacgccaaagccgccagcattgctcgccgctgagggccgtcgttgacgccgcgccgatacagacgaccaaaaagagggtgttccacttcggcaagggcaagagcgagggcaacaagaccatgaaggaactgctgggcggcaagggcgcgaacctggcggagatggcgagcatcgggctgtcggtgccgccggggttcacggtgtcgacggaggcgtgccagcagtaccaggacgccgggtgcgccctccccgcgggcctctgggccgagatcgtcgacggcctgcagtgggtggaggagtacatgggcgccaccctgggcgatccgcagcgcccgctcctgctctccgtccgctccggcgccgccgtgtccatgcccggcatgatggacacggtgctcaacctggggctcaacgacgaagtggccgccgggctggcggccaagagcggggagcgcttcgcctacgactccttccgccgcttcctcgacatgttcggcaacgtcgtcatggacatcccccgctcactgttcgaagagaagcttgagcacatgaaggaatccaaggggctgaagaacgacaccgacctcacggcctctgacctcaaagagctcgtgggtcagtacaaggaggtctacctctcagccaagggagagccattcccctcagaccccaagaagcagctggagctggcagtgctggctgtgttcaactcgtgggagagccccagggccaagaagtacaggagcatcaaccagatcactggcctcaggggcaccgccgtgaacgtgcagtgcatggtgttcggcaacatggggaacacttctggcaccggcgtgctcttcaccaggaaccccaacaccggagagaagaagctgtatggcgagttcctggtgaacgctcagggtgaggatgtggttgccggaataagaaccccagaggaccttgacgccatgaagaacctcatgccacaggcctacgacgagcttgttgagaactgcaacatcctggagagccactataaggaaatgcaggatatcgagttcactgtccaggaaaacaggctgtggatgttgcagtgcaggacagggaaacgtacgggcaaaagtgccgtgaagatcgccgtggacatggttaacgagggccttgttgagccccgctcagcgatcaagatggtagagccaggccacctggaccagcttctccatcctcagtttgagaacccgtcggcgtacaaggatcaagtcattgccactggtctgccagcctcacctggggctgctgtgggccaggttgtgttcactgctgaggatgctgaagcatggcattcccaagggaaagctgctattctggtaagggcggagaccagccctgaggacgttggtggcatgcacgctgctgtggggattcttacagagaggggtggcatgacttcccacgctgctgtggtcgcacgtgggtgggggaaatgctgcgtctcgggatgctcaggcattcgcgtaaacgatgcggagaagctcgtgacgatcggaggccatgtgctgcgcgaaggtgagtggctgtcgctgaatgggtcgactggtgaggtgatccttgggaagcagccgctttccccaccagcccttagtggtgatctgggaactttcatggcctgggtggatgatgttagaaagctcaaggtcctggctaacgccgatacccctgatgatgcattgactgcgcgaaacaatggggcacaaggaattggattatgccggacagagcacatgttctttgcttcagacgagaggattaaggctgtcaggcagatgattatggctcccacgcttgagctgaggcagcaggcgctcgaccgtctcttgccgtatcagaggtctgacttcgaaggcattttccgtgctatggatggactcccggtgaccatccgactcctggaccctcccctccacgagttccttccagaagggaacatcgaggacattgtaagtgaattatgtgctgagacgggagccaaccaggaggatgccctcgcgcgaattgaaaagctttcagaagtaaacccgatgcttggcttccgtgggtgcaggcttggtatatcgtaccctgaattgacagagatgcaagcccgggccatttttgaagctgctatagcaatgaccaaccagggtgttcaagtgttcccagagataatggttcctcttgttggaacaccacaggaactggggcatcaagtgactcttatccgccaagttgctgagaaagtgttcgccaatgtgggcaagactatcgggtacaaagttggaacaatgattgagatccccagggcagctctggtggctgatgagatagcggagcaggctgaattcttctccttcggaacgaacgacctgacgcagatgacctttgggtacagcagggatgatgtgggaaagttcattcccgtctatcttgctcagggcatcctccaacatgaccccttcgaggtcctggaccagaggggagtgggcgagctggtgaagtttgctacagagaggggccgcaaagctaggcctaacttgaaggtgggcatttgtggagaacacggtggagagccttcgtctgtggccttcttcgcgaaggctgggctggattacgtttcttgctcccctttcagggttccgattgctaggctagctgcagctcaggtgcttgtctgaggctgcctcctcgttggcaaccggattgcctgctgctggtggatgtggtgatcaacagtattattacagagccatgctatgtgaacattactagtagcagtgctcataaaagctacaatcccatctcccttttttttccagtcatgtaaaacttccaaactgctccatggttcaaaactctgttcttcaatacatcatcaattatcgattatatacgtggcaaggttttttctttgtttgcttttttcttttctttctggcatgtgtttttttggttttcttggtgtgtgtgtgaggtgtgcatgtcgctgttgaggcccttgctgcacagaccacctcaaactttaagcctcgaaaaagctggtactatttttttagaactctggagtctggtcaatatgcaattgactggtttgcttctgaggctcttcttgcattcatgcctttacggccactctttggcacctgtaacacaggtaaaaaaaatgttaaaagatggttcaggaacacagcagttttcaagccagggaaactgtactgtacagaaaccaagagatcgttcgacatacctgtgcccgcacatctacctaacattctcgaggaccattgccgatcaaaggcccacacatcgtcttcttgttccggcagttgataagaacctagtacataagagacagtacatcatcaaaataaggagcaggtgaaaagcaccatctgcagtatgcagtatgcaacctggcacatggcatactatgtgatactgtacatgagtacaggaaaggatagcttattacaatatcggtgagttacgacacacaaat

SEQ ID NO: 214467 - DNA, 4235 bp, Zea Mays
atggggaatctttgctggagcacaaatagagaaagatggcgacgtacggccccgtccccctccgtccccgcctgcagcgacctcccggctgccgtatcctccttcgccgacgcgttcgtggactttgccgtgtccgacatcttcttcccgaccttcccctcctcctcctcgctccctcctcgcccgaagactccaaccaccttcctcccttccccatcccggctcgtcgccatcggagacctccacggggacctgcccaagtccctctccgtgctccgcctcgccggccttgtgcccccgtcttgcaccccgactccccctccgcctccggcctcctcatggcccgcggggcccaccctcgccgtccagctcggcgacatcctcaaccgcagcgacgacgagctccgcctcctatacctactccaccgcctctccctctctgccgagacacgcggaggcgcgttcctccccatcctcggcaaccacgaggtcatgaacgtctccggcgacttccgcttcgccacgccgcagggtttccacgacagggcggtgtgtgggggggtgctggcgtgcgcgggattcgcggcgtgggctgctgaggcgggcgtcgcgggagcggcgggttgctggcgcacgggcgttgcaggagcgggagcagtctacactgcctccttaatagttagtagagattgtttaaaattaaactctacgctaggactgtggacgtgtttttgccccatccgatctaaacctaatccattgccatcctatattgatataggatcatgggcaggtttagttaatccacggcgaagaaaaaaatacatgctgccaagtgccaactggcaagaaatgaagaaactgtcctctggcaagaaaagcgggaaaggcgatgggctgggccggccaggagagtcgctcgattcgcaggccaggcagatcgcggtcagatccccactgccttggcgggaagcctatcaatcctcaccccaaatcccccgctactccccgctccggctccgttcacgactacggcgacgagcaccaccctcacccccagccccacaccgcgccacgccgatgtactcccaactcgtcgacggggactccgactccgagggatccctgatctccgacatctccgcctccccgccccgcggccgttcgccctcgcccccgcccccgcccccgccgccgcccgaacaccgtcccaaccccaagcacaccgccaccgtgaaacctaagcctcccaagtccaaggcgaagcccaagcttgcagcatccgcctgcaccgccgctgtttcgccgcctcccctcccctccgccgcgctctccgacccgcacggtctcgtctcgcgcatcgccgctgctcccgcgcttgtcaccgccaccagcaccgtctcttcctcctccttccgccgtctcgtccagtcgcgcaacccctccttcgatcccgccgccgctttcagcgctccgacacccgcacccactctggcgcccaccgagatagcaaccgcagcgacagcgcagtgccctgcgccggacgcgccgccgcagaccaggcccaagcgggtgcatcccaactcggtgtcggaggtggtcccgcccgcggcggaggcagagcaaccgaagcggccgagagggggtgccgaaggaaactttgtgcggctcaacatcaatggctacggtcggaggaggacgttcaggaacgcgcaggccaggcgccctacgaaataccgctcctggcggcggcagcgacatggcggcgcaaagcctcaaggccgtggtgacgaagaaggggattttgtggctgaagctatgatagagcgggagaagaagagggcaggaggagatggtggtgtcctcgaggccgtcgaagcagcgcgagaggacccgtctgagcagaatcttgagaatttgctcagaattatctatgggtacaactctttccgcgaggggcagcttgaggcaattcagaaggttgttgcaggagagtcaactatgcttgtgctccctactggtgcgggcaagtcactatgctatcaggtacctgctatgattttgcctggactaacactggtggtaagcccgctactctccttaatggtggatcaactgatgaagctacctgcatttttgccaggtggctttcttgcaagcaatcagacaagcgatgagtttcatgagacattacaaaggttgcgtggaggggaaataaaggtgctttttgtttcccctgaaagattcttgaatgaagaatttctgctaatatttagggacgggctacaaatatccctagttgctattgatgaagctcactgcatttctgaatggtctcataattttagaccttcatatctaaggctccgtgcatcactacttcgaagaaaacttaatgttcaatctattcttgcaatgactgcaactgcgacaactcaaaccttggaggagatagtgactgtcttagaaataccatctgataacctcattaaaacatctcaaataagggacaatctgcagctgtttatcagcatgagcaataacagactgaaggatctattgctgttgttgaaggcttcaccttttgttgacatgaagagtataattgtctattgcaagtttcagggagaaactgactatgtttcaaagtacttatgtgataacaacattactgctaagagctaccacagtggacttcttatgaagaacaggaatcgtgtacaggagcttttctgctctaacaaaataagagtggttgttgcaacagtggcattcggaatgggtcttgataagagtgacgttgaaggggtgattcactatagcttgccagaaagcttagaagaatacatacaggaaactggccgtgctggaagggatggacgactgtcatattgtcatctatttcttgattcaacaacattctataaaagtcgtagtcttttgcacagtgacggtgttgacgaatatgctatgagcaaatttcttttccaggtattttcatgtgaaaattcagtggggtgcatttgctccttggttaaagagtcgacttcgcgcaagttcgatataaaagaggaggtgctcttcacagtcctaacacagctagaaattggtggtcagcaatatctccgtttacttcctcagttcagtgttacctgcaccctgtactttcacaagacgtcaccacagctgcttgcagacaaggatgtactagttagatcagttctggataagtcagagactaagggtggacattttgtcttcgacatgacaaaggtagctaatgatctgagcatcacagtgaatgaagtatttgaccatttgcaacagctaaagttctctggagaaatttcatttgaattaaaagatccagcctgcatttacgtgatcttaaagaagccagatgacttgaatgcgctttcagcagatatcacaagatggctttctgaagtagaaaactcgaagatcagtaaattggatgcgatgtttgatctagcaaactttgctgtcaagggttgccaaaggactgatggctgttctggctcccagcacactccgtgcattcaaaagaagatcatacagtactttagtaagaactactccacctcagacagtggccaatgtactcagccacaaaggggcagcccattcttgcaagctgacataaaggtgttccttaaaagcaattcgtttgcgaaattcacgccaagggccgttgctaggattatgcatggcatatcaagcccggcttttccatctgccacctggtccaagaaccacttctggggccgctatttggaggttgatttcccagtggtcatggaagctgccaaggccgagctggtcaaactcgtgggaaaaggagagtagcagtgtagtacttaccggcacggcaataggaacagttgctttcactcggtacgtgtcctgtgccgagtagaatgcttgcaagccgcaaccgcaatcgatgatagagagctgctacatatggcggtatttattcaagcgatgctgatgcggccagccaagctggtgttagcacctagaagggaatatcggagagaagagaggtagaagaagggttgaagaagaagataacagcgaggaagacgatctgatttgatatctgatagccaaaatggttcatgaccccttacagccagggtttgggtgttacttgtaaccacacgaccactcggtccacacgaccaatcgacctgccaacatttacaaggccc

SEQ ID NO: 214468 - DNA, 4288 bp, Zea Mays
atggggaatctttgctggagcacaaatagagaaagatggcgacgtacggccccgtccccctccgtccccgcctgcagcgacctcccggctgccgtatcctccttcgccgacgcgttcgtggactttgccgtgtccgacatcttcttcccgaccttcccctcctcctcctcgctccctcctcgcccgaagactccaaccaccttcctcccttccccatcccggctcgtcgccatcggagacctccacggggacctgcccaagtccctctccgtgctccgcctcgccggccttgtgcccccgtcttgcaccccgactccccctccgcctccggcctcctcatggcccgcggggcccaccctcgccgtccagctcggcgacatcctcaaccgcagcgacgacgagctccgcctcctatacctactccaccgcctctccctctctgccgagacacgcggaggcgcgttcctccccatcctcggcaaccacgaggtcatgaacgtctccggcgacttccgcttcgccacgccgcagggtttccacgacagggcggtgtgtgggggggtgctggcgtgcgcgggattcgcggcgtgggctgctgaggcgggcgtcgcgggagcggcgggttgctggcgcacgggcgttgcaggagcgggagcagtctacactgcctccttaatagttagtagagattgtttaaaattaaactctacgctaggactgtggacgtgtttttgccccatccgatctaaacctaatccattgccatcctatattgatataggatcatgggcaggtttagttaatccacggcgaagaaaaaaatacatgctgccaagtgccaactggcaagaaatgaagaaactgtcctctggcaagaaaagcgggaaaggcgatgggctgggccggccaggagagtcgctcgattcgcaggccaggcagatcgcggtcagatccccactgccttggcgggaagcctatcaatcctcaccccaaatcccccgctactccccgctccggctccgttcacgactacggcgacgagcaccaccctcacccccagccccacaccgcgccacgccgatgtactcccaactcgtcgacggggactccgactccgagggatccctgatctccgacatctccgcctccccgccccgcggccgttcgccctcgcccccgcccccgcccccgccgccgcccgaacaccgtcccaaccccaagcacaccgccaccgtgaaacctaagcctcccaagtccaaggcgaagcccaagcttgcagcatccgcctgcaccgccgctgtttcgccgcctcccctcccctccgccgcgctctccgacccgcacggtctcgtctcgcgcatcgccgctgctcccgcgcttgtcaccgccaccagcaccgtctcttcctcctccttccgccgtctcgtccagtcgcgcaacccctccttcgatcccgccgccgctttcagcgctccgacacccgcacccactctggcgcccaccgagatagcaaccgcagcgacagcgcagtgccctgcgccggacgcgccgccgcagaccaggcccaagcgggtgcatcccaactcggtgtcggaggtggtcccgcccgcggcggaggcagagcaaccgaagcggccgagagggggtgccgaaggaaactttgtgcggctcaacatcaatggctacggtcggaggaggacgttcaggaacgcgcaggccaggcgccctacgaaataccgctcctggcggcggcagcgacatggcggcgcaaagcctcaaggccgtggtgacgaagaaggggattttgtggctgaagctatgatagagcgggagaagaagagggcaggaggagatggtggtgtcctcgaggccgtcgaagcagcgcgagaggacccgtctgagcagaatcttgagaatttgctcagaattatctatgggtacaactctttccgcgaggggcagcttgaggcaattcagaaggttgttgcaggagagtcaactatgcttgtgctccctactggtgcgggcaagtcactatgctatcaggtacctgctatgattttgcctggactaacactggtggtaagcccgctactctccttaatggtggatcaactgatgaagctacctgcatttttgccaggtggctttcttgcaagcaatcagacaagcgatgagtttcatgagacattacaaaggttgcgtggaggggaaataaaggtgctttttgtttcccctgaaagattcttgaatgaagaatttctgctaatatttagggacgggctacaaatatccctagttgctattgatgaagctcactgcatttctgaatggtctcataattttagaccttcatatctaaggctccgtgcatcactacttcgaagaaaacttaatgttcaatctattcttgcaatgactgcaactgcgacaactcaaaccttggaggagatagtgactgtcttagaaataccatctgataacctcattaaaacatctcaaataagggacaatctgcagctgtttatcagcatgagcaataacagactgaaggatctattgctgttgttgaaggcttcaccttttgttgacatgaagagtataattgtctattgcaagtttcagggagaaactgactatgtttcaaagtacttatgtgataacaacattactgctaagagctaccacagtggacttcttatgaagaacaggaatcgtgtacaggagcttttctgctctaacaaaataagagtggttgttgcaacagtggcattcggaatgggtcttgataagagtgacgttgaaggggtgattcactatagcttgccagaaagcttagaagaatacatacaggaaactggccgtgctggaagggatggacgactgtcatattgtcatctatttcttgattcaacaacattctataaaagtcgtagtcttttgcacaggtattttcatgtgaaaattcagtggggtgcatttgctccttggttaaagagtcgacttcgcgcaagttcgatataaaagaggaggtgctcttcacagtcctaacacagctagaaattggtggtcagcaatatctccgtttacttcctcagttcagtgttacctgcaccctgtactttcacaagacgtcaccacagctgcttgcagacaaggatgtactagttagatcagttctggataagtcagagactaagggtggacattttgtcttcgacatgacaaaggtagctaatgatctgagcatcacagtgaatgaagtatttgaccatttgcaacagctaaagttctctggagaaatttcatttgaattaaaagatccagcctgcatttacgtgatcttaaagaagccagatgacttgaatgcgctttcagcagatatcacaagatggctttctgaagtagaaaactcgaagatcagtaaattggatgcgatgtttgatctagcaaactttgctgtcaagggttgccaaaggactgatggctgttctggctcccagcacactccgtgcattcaaaagaagatcatacagtactttagtaagaactactccacctcagacagtggccaatgtactcagccacaaaggggcagcccattcttgcaagctgacataaaggtgttccttaaaagcaattcgtttgcgaaattcacgccaagggccgttgctaggattatgcatggcatatcaagcccggcttttccatctgccacctggtccaagaaccacttctggggccgctatttggaggttgatttcccagtggtcatggaagctgccaaggccgagctggtcaaactcgtgggaaaaggagagtagcagtgtagtacttaccggcacggcaataggaacagttgctttcactcggtacgtgtcctgtgccgagtagaatgcttgcaagccgcaaccgcaatcgatgatagagagctgctacatgttcgtgccttcttcccagcttgtccgcagttggtccaccacaagcattctaaatggttacacatctgcttggcatcacctcctcacttcatacagatggcggtatttattcaagcgatgctgatgcggccagccaagctggtgttagcacctagaagggaatatcggagagaagagaggtagaagaagggttgaagaagaagataacagcgaggaagacgatctgatttgatatctgatagccaaaatggttcatgaccccttacagccagggtttgggtgttacttgtaaccacacgaccactcggtccacacgaccaatcgacctgccaacatttacaaggccc

SEQ ID NO: 214469 - DNA, 3105 bp, Zea Mays
gcaaaaatgcagcgccaccgactcaccgtatacttggcggatttcgcccacgcccgcctctgccgaagaccagccgccgctgtcgacggcgaactcccgcggcgagtcgaccgccgtctcagaccctaaggcctaagccctagttccagcccacccagttccttaaccatggaggatgccctcgcgccgccgtctgtggccccgactccctcccccctcgccgccgctgccgtcctcacccgtcgtcggtcacacctcgacagtgcctccttccgcacgctctcccgcctcttctctcactgtctccacatcaacccgtcgccctgtggcatctcgccgcccgtgcccgagcccgtcgccgcggacttcgtcggtggggaccccgacgattccccagaaaggcctaatggcgctgatttcgatcggctaaaggatgtgcaaatcgaggcggcggatgcgggaggcccttcgcttcacgggactgtccatcaaccggccgcggcgaactctaccctcgacctggttgaggctgaggctgaggctctgcagctcgagggtgcggacgcggtaggggtcgtagaaagcacctcgtgtatgaccagagccgaggctggggaatcagcggtacttgtggtagaaagcacctcatgtaagaccactgctgaggtggaggagtcagcggttggagctggactggcgatggtgggtgacgtatctttgaagtcggtggagtctctcttggagacgaaggttgacgaatcggtagaggtagcagtgggtgatgatgaaggctgtcttttgtttgaagcgatgctgacaaacttcacagggttgattgatgatgttgatgctggagcaataccaacacagaggtgtgcagtttctggaggtgacctgcagaatagcaaggcatctgaggatttgaaacaactgggtgataggattgaagaaggagaacctcttagaaactgtgataatgggcagaatgatggtggtggtttcgaggaaggagagattgagggcgagtttcaggatttgggttcagaagaatctggaaattccgaacatggagacgaagatggtgaagatgagaaattggaagacaattccattagcagaggctcagggccaaataaatcttgtgattatggcacacaattcgggaatttgcaatcaattcctgaaacaggaaatgatcatcttatactgaacagggatgctattgtcagaggtgatgcacaaatatctgttaccagggctcaagccgtcacttatgatgaagttgtggattggaatgagactccgctgcctgacaatgagactgtcaaccctgggaagaagagaaaacgcattctgacagaagagagaaaagctaaaaaaacaaaaaataaaagaaagaaccgggcactgcaacggatagcggatggagtcaaaagaccaaaacttactcctgttacaaagccaaaaaaaccttgccacttctatgaccatgggaagtgccgccaaggaaataattgcaagttttcccatgattttacaccttcaacaaaatctaagccctgcacacattttgcatgtggttcttgtttgaaaggagaagagtgtccatatgaccatgagttgtcaaagtacgaatgccataactataaaaacaatggaacatgtgccagaggtgataattgcaaattctctcatgtgatgccaactacagaaggtactcccacacaagatgcaaagacttctgatgcttcactggcatatgagaaaacaaacaccagagagcatacaagaagccagaagaacgcaacagttcacaatgttgctcctagtaattctatcctaagaaacctggctggcgtctccagcaaatcccagaatgtttctaaccatattccaaagggcgtgcagtttctttccattggtaaaggtcaatccaatctggacagcctgcacctggatgctttgttcatggagaagcaaaggaatgcaaatggtactcaacataaccttggaggacatgaagcagaaaggcaaaaaattgtgaagcaaaatagccagaaaccgaatctattgctagacgataagaattcatcagaaggagctactaggcatccatgttcagacccccaaaaagctactttacctgttaattctattgcaacacctggatcaatacatactcagcatgaagtctcagaggcttctaggattttgcaggagttcttgtttggtgctggcagttagaggaaaaagtaagcacaggtttactagtcttcaaaagctgacttttgtggactccgtgaacaagttcaacccacactgtagttacttggaatggagcaaacagttgggtcaacttactgatgtcatggaaaagttgaacctcaagtcacgaggtagaacaacaggacttgatgtgtcattattgggttcctaacaagctgactgtttagtgaggcgcacctcctgtcagggaactcagattcctattcctccatgcaagagctttacgtccgtccgtttgccacatgagaatggccggctggtttagtcttgaatcatcatcatgattcagtacacatctacctttgctggcgaccaacattagcctggtgcagtgcatggtctgggcttgcatgcatgcaatgcccccgggatctccgttcctatctcttgggttgagatttacatatgaagcatagctgaaaaggttgtggtccgccgcagcagatgctgaaggccccaggtatgtgctggagcgtgtggctgttgcctcgtctcaagtcccggctatatgtccccatgcatgcctacttgtctgctgtcgaaacctctgcggacggacgttgcatcgtttcagaattacgtcacatggtcatctgactgaagagggttcacatgacgattcatcggtgcagcttggcgtggaagcaggcatgtgagctgtgtgcccctctacgcctgggcgtcgtcacatgaccagcggttctgttctcttgtaccgacgatgacggcgacacgatgagcaaagcaattcaccggtacggtacaggagagccaatgctagcgctgtgcatggagccatgcatggaggaagttgtattc

SEQ ID NO: 214470 - DNA, 2377 bp, Zea Mays
gcgccaccgactcaccgtatacttggcggatttcgcccacgcccgcctctgccgaagaccagccgccgctgtcgacggcgaactcccgcggcgagtcgaccgccgtctcagaccctaaggcctaagccctagttccagcccacccagttccttaaccatggaggatgccctcgcgccgccgtctgtggccccgactccctcccccctcgccgccgctgccgtcctcacccgtcgtcggtcacacctcgacagtgcctccttccgcacgctctcccgcctcttctctcactgtctccacatcaacccgtcgccctgtggcatctcgccgcccgtgcccgagcccgtcgccgcggacttcgtcggtggggaccccgacgattccccagaaaggcctaatggcgctgatttcgatcggctaaaggatgtgcaaatcgaggcggcggatgcgggaggcccttcgcttcacgggactgtccatcaaccggccgcggcgaactctaccctcgacctggttgaggctgaggctgaggctctgcagctcgagggtgcggacgcggtaggggtcgtagaaagcacctcgtgtatgaccagagccgaggctggggaatcagcggtacttgtggtagaaagcacctcatgtaagaccactgctgaggtggaggagtcagcggttggagctggactggcgatggtgggtgacgtatctttgaagtcggtggagtctctcttggagacgaaggttgacgaatcggtagaggtagcagtgggtgatgatgaaggctgtcttttgtttgaagcgatgctgacaaacttcacagggttgattgatgatgttgatgctggagcaataccaacacagaggtgtgcagtttctggaggtgacctgcagaatagcaaggcatctgaggatttgaaacaactgggtgataggattgaagaaggagaacctcttagaaactgtgataatgggcagaatgatggtggtggtttcgaggaaggagagattgagggcgagtttcaggatttgggttcagaagaatctggaaattccgaacatggagacgaagatggtgaagatgagaaattggaagacaattccattagcagaggctcagggccaaataaatcttgtgattatggcacacaattcgggaatttgcaatcaattcctgaaacaggaaatgatcatcttatactgaacagggatgctattgtcagaggtgatgcacaaatatctgttaccagggctcaagccgtcacttatgatgaagttgtggattggaatgagactccgctgcctgacaatgagactgtcaaccctgggaagaagagaaaacgcattctgacagaagagagaaaagctaaaaaaacaaaaaataaaagaaagaaccgggcactgcaacggatagcggatggagtcaaaagaccaaaacttactcctgttacaaagccaaaaaaaccttgccacttctatgaccatgggaagtgccgccaaggaaataattgcaagttttcccatgattttacaccttcaacaaaatctaagccctgcacacattttgcatgtggttcttgtttgaaaggagaagagtgtccatatgaccatgagttgtcaaagtacgaatgccataactataaaaacaatggaacatgtgccagaggtgataattgcaaattctctcatgtgatgccaactacagaaggtactcccacacaagatgcaaagacttctgatgcttcactggcatatgagaaaacaaacaccagagagcatacaagaagccagaagaacgcaacagttcacaatgttgctcctagtaattctatcctaagaaacctggctggcgtctccagcaaatcccagaatgtttctaaccatattccaaagggcgtgcagtttctttccattggtaaaggtcaatccaatctggacagcctgcacctggatgctttgttcatggagaagcaaaggaatgcaaatggtactcaacataaccttggaggacatgaagcagaaaggcaaaaaattgtgaagcaaaatagccagaaaccgaatctattgctagacgataagaattcatcagaaggagctactaggcatccatgttcagacccccaaaaagctactttacctgttaattctattgcaacacctggatcaatacatactcagcatgaagtctcagaggcttctaggattttgcaggagttcttgtttggtgctggcagttagaggaaaaagtaagcacaggtttactagtcttcaaaagctgacttttgtggactccgtgaacaagttcaacccacactgtagttacttggaatggagcaaacagttgggtcaacttactgtggctacaagtgctgacaatttttg

SEQ ID NO: 214471 - DNA, 2247 bp, Zea Mays
attcccctcggtgcgccgccgccagtccgccccgccccgccccgcccagcagacagcgcagccatgccgctccacctccacctgctgtcgtccccggccaccgctgccaagctcgcggcaggtctgcgcgcggcgcctctccgccggtgccacagcttggccccggcgccgcgccacacggatcgcgtggcccttgcgtcgtccctctcggcggtggcgcggtctgctggccccgccgtggcagcggcgcagaccaagcccagcgtttcaggaaagaaacaagtattgatatcgttgtcggataaaacggacttggcttatcttggcaatggtcttcagggtttggggtattccatcgtttccactggtggaacagcatccagcctggaagcagcaggagtcagtgtaacaaaagttgaagaaatcacacatttccctgaaatgcttgatggacgagtgaaaacattgcacccaagtatacatggtggtattcttgccaggagagaccaggagcatcatttgaaggcactaaaagatcatggaattgggacatttgatgtggttgtggtgaatttgtatcccttttatgacaaagtcacctctggtaacatctcttttgaggatggcattgaaaatattgatattggtgggcccacgatgatcagagctgcagccaagaaccataaggatgttcttattgtggtggatcataatgattatcctgctttactggagtaccttaaaggaaagcgagacgatcagcagttccccaggatgttggcatggaaagccatgcagcatgtcgcctcttatgattctgcagtgtcagaatggttgtggaagcaatcaaataaaggagagatgttccccccaagctttactgtgccactggagctgaagtctacactccggtatggcgaaaatcctcatcagagtgctgcattctatgctgacaagagcctttctcttgttggtgctggtggtattgccactgctattcaacaccatggaaaggaaatgtcttacaacaactacttggatgcggatgctgcatggaactgtgtatcggagtttgatagtcctacttgtgttgtggtgaagcacacaaatccatgtggtgttgcctcacgaaaggacattcttgaagcttacaggttagctgtaaggggagatgctgtcagtgcatttggtgggatagttgcattcaacacgactattgacgaggaaattcgtgagttcaggagtcctacagatggtgagacgcggatgttctatgagatagtggttgctcccggctatacggagaagggtcttgaggttctcagaggcaagtccaaggcactgaggatactcgaggcgaagagaagtggaaaagggatgctttcacttaggcaggtgagtggtgggtggttagctcaggagtctgatgatctaacccctgaagagatcacctttaccacaaagtctgagaggtctccgcaagaaaacgagcttgccgatgccaaatttgcctggctttgcgcaaaacatgtcaagagcaatgcgattgtgatagccaagaacaactgcatgctgggaatgggcagtggtcagccgaacaggcgagagagcgtccgaatcgccttcaggaaggcaggagaggaggccaagggagctgcattggccagcgacgccttctttccttttgcctggaatgatgccgtcgaggaggcgtgccagaacggcatcggcatcatcgcccagccaggaggcagtaagaaggacgaggacgccgtcgcgtgctgcaacaagtatggtgtgtcgctcgtcctcaccggcgtcaggcacttcaagcattagccgtcatgccccatggctggtcatcttagcttagggagttacggaaaaaaaacaaagcttcggaggctgcagcttgtggagctgccctgatgtttagctttctgcaaagtgcaaaaactgcaaattttggtttctgtaaggcgtaggctttgctgggtgagctcgtggggaaggtaatgtttctcctggagtcgaataagctgatgggtgtaccgcgagtgacaattgaacccaacctaaggactttcaggttggtacttttttctgtcacaaaatcagccgtgcgcctatgcaccaggagaaacatcgatgtgacctacacctcaacggccatcgatgtgacctacaatctttggactacaaaccattgaaaaataaaaagagaaaaggtgcctgggaatttctgtg

SEQ ID NO: 214472 - DNA, 4426 bp, Zea Mays
aggtttgttgctttatttcctgacttagagcaatttcttgacccttatgcagagctggtccacatggattcaagattcagggaatgttggttcctcctgcttaggcaattcgggctgcaagttttggcaccgcaatcatctaatataaatttcatggaatggtggcatgaagcaaatgaagctattcagggtcccttcagagatggcctaaactctcttattgtgctaggtgcttgggccttatggaatcatagaaaaacacatgcatctttgatggttttgctccggaagttgtcacaatttctggatccgataggtggtaaatttctgcattttaggcattactctgataattcaaagtctccttttctgtatcggtgcagactagaagggactgtaagtgaatatgaggcccttttgctaacagaaagacaacaaaatgaagcagctaatgctgcagttgctgaatctcaagcaagaagtgaagcattggtaagcaagctcgaagatgctgtgaaacaaaatgatctcctccatgaagctgctcaaagatttgaagaagctacaaaaaatttggaatcttcactaacatttgagaagcaacggcatcaggcaaatttgatagaattagatgaagcgcgagaaaagattgaagaacttcaaagagaagttggggacactgatgaaaaatccaccctgcttcagactagtatacaaagccttgaagaaaggttaggagagaaggatgctctattgacaacagaaaggctagaaagtgaagcaactaagaaatcgctcaatgaatctgaggatagaaacaaggacttactaatgaaaattgaagttgctgagaaagacattgctcacttccaagaaactgtccaaagaaatgaagaaaatatggcagcactggaaacttcgttgagatctgaaaggcagcaaaaggatgcaatcatgaaacaactagctgaatctcagggtgaaataggagagctgcaaaggaagcttgaagatgctgatgccagaaatgggcttcttcaagattctttgcagagactcgaagaaagtacagcagataaagattctttattggctacagaaagacatgaaaacagtgaaaccaagaaggaattagctggttctcagaaaaagattgcggaattgctaactgaagtgcaagataccggtgcatatattgcagaacttgagggctcggttaggagactcgaaggaaacttgacagtaactgaagcttcattgctaactgaaaaggaacagaatgcttccaccttaaaattacttacagaagcacaattgagaatcgaagaattaataaaaaagcttgaaggttcaaatagaaaatctgatagtcttctggatacaataacaagacttgaacaagatgtctctgccaaagaggtcttattgcttacagaaaagcaggcacacgaggcaacaaggaagactctcactgaagttcaggaaaaaagtgaagaacttctgaagaaaattcatgataatgataaacatattcttcagcttcagtttactatacagaggcttgaggaaaccacagttgcaaatgagaatttgctgttgagggagagggagcagaatgacacaacaacaaaagcgcacaatgaaagtcaagaaaaatatgaagaattactaaagaaatttattgatgttgacaggaaaatcgaccttcttcaaggtaccatagaaaggcttggagaaaatacaacagcaaaggattctctgttgctatcagagagacatgaaaaggctgctattaagaaagcacttactgaggctgaagagaaaaatgaagagttactgatgaaagttgaagatgctaatgaaaaaataggacaccttcaaactaagataaatatgcttgaagataatgtagccgcaaaagatgtttctttagaagctgcaatcaaggaaaatgacgcaaccaggaaatctcttactgaagctcaagagagaaatggtgaattactcaagaaaatcagtgacagtgactacaggatccatttacttcaagacacggtacaaaagcttcaagtagatgcaatatcaaggttgtcgtcttttgtaatggaaaaacaagaaagtgatattgcaaagagagccgttactgaagctcatgaaagaaatgaagatttactaaagagaaatgaggacctcctcaagaggaatgatgatttgattaagaaaattgaagactctagtaaaattgtcactcaacttcaggaagctctacaaagacttgaaggaaaagcatccaacttagaggttgagaaccaagttcttcgtcaacatgcaacttcaactccaccgtctactgctaaatctccagcttcacgctcaaagatctcaaggatccatagaagtccagagaatggccatattttgaatggtgacattaggcaaactgaaatgaagccctcaactggcacatcagcagcaattacctcagtagctaatgttcctgacttgggcgaccaaaaggagtttgaacatggagaaaaactgcaaagaataccaaaacagaaatatcagccttcccataaccagcagccccaagacgatcagcagtggctagtcacttgtatttcacaatatcttggattttctgggagcaaacctgttgcagctctccttatataccaatgtcttctccattggaaatcatttgaagccatgaagacgggtgtctttgatagcattttgcatgctataaactcagccacagaggttcaaaatgacatgagaacattggcgtattggttgtccaacttatctacattaacagttttccttcaacggtcattcaaaactactaggaccacaatctcaactccacaaaggagaagattttcgtccgagaggatgtttggaaatcaaacttcaaatgctgggcttgcttatctcagtggtcaatcagttggatctgctggattgctccaagttgaagcaaagtatcctgctttgctattcaaacagcagctcgtggatttaattgaaaaggtttatggcatgataagtgacagcgtgaagaaggaactaaaccctttgcttgaattgtgtatacaggatccacaaacttctcagtcaagtattgcaaaaggtaatcttaatggcatgggtcaacagaaccaactcacacattggctgggcatagtgaaaatcctcactagctacttggatgtactaagggaaaatcacgttccctcaattctggtgcataaacttttcactcaaatgttctcacttattgatgttcaattatttaaccgattacttttgcggcgtgagtgctgttcttttagtaacggggaatatatcagagctggactagctgaactaaaacattggtccgacaatgctacaagagagtttgcaggttcagcgtgggaggcattgaggcatattagacaagctgttgatttcctggtgatttctcttaagccaatgaggacattaagagagatacgcactgatgtgtgccctgccctcagtatacaacagctagagcgaatagttagtatgtactgggatgatgtgaatggtacaaacactatttcagcagagtttacatcaagcttgaaatctgccatacgtgatgaatccaatatggccacaaatttctctatactgctagatgatgattccagtatacctttttcacttgatgatattacaaagacattgccggtcattgagctggctgatgacgactttctgccatttgtccatgaaaacccaagctttgcgtttttattgcaaagaggggagtagtcttttttttttgtcaccattgtgacttcacctacctgtggataagtcaggattcctgctaggatgtacagtacgcgtgattctttttgtaccaggtagcaaggcatcaaagattagatgctaggtgagcttataggcttctggtttctattgatttgtttgttggttgtatatttgtattcaggttttccttgccattttttctacttgtagccgttttttgggcttgtatactaggtggtaagggcagaagaccctgccctgtaagcatagttacacaaggtcttgctgtaggtatggaagctgtacatgtgttgtaacggattataaaagggggaaagtagtgcgtagtgatggctttgtggttggtgtgttgcttacctttgatcaatgatcatgtattggttcgtcatatattgtttattgtactgcacaccattccattgtagataacatacacgctcaagacttgttctgggatgtcaaatgagtaatctgttacggtacagaaatgtcatgcttacttccagatcttctgtaatgaacacaaataattatcattttcatttatttttgttcttagatcctgctgcggcttttatagggtaattatcgagag

SEQ ID NO: 214473 - DNA, 2691 bp, Zea Mays
atggaggtgagagtgtgggcactgaagaggggtgcaaagtatcgcatgaagctgaagccgaaagccgagctagaagctgaagcattacacaaaatcagaagtgctggtccgagaaaccgcaatacaatttctcaagctgagactggaagtgcaaaacagagaaaaaggagttgggattttaaaaatcatgagcgtgttgctttcatggcatgaccacacgagggagctgcaacggtaccaaccaagaagggaaaggtgcagacgagggggaacctaagctagaaaccaatagtggcaattattgttcggaggccatcgccgctggtgggcggtggcttccccttcccctgtattagcagcgaggaggcagcagctgaagctctcgtctctgcctctccggacctccggtgaactccaacagagaccacctcctccatccgtcggtcatccatctgtgattccttttgcgtgtgcaagttgttaaatcggcacacggcctccgcttttggagtggagaggggcatatacggtttactggtgcgcccggggccgccgcttttcccgctggcctctccccggccgtcccattggagcgcgcaaagctgggcggcaccatttaaagaagcaaactgcactccaccattagcagcaccaaggcaccaccaccaagcgcaccgccacgccacacgatctataacgcgcaggcaggcgaggatcagaccggccggagcttgccttctccgttggggttcctgcttgccgcggcgcgagaacagatatattggatcggatttgtgccgggttcttggagcagtaggcaccaaactggtccaggttgggcaaaaatgcagtttaaccagtagctaacggagctctctcatcttgtactgtggcatttcttaagttgtctggaagctgaatctccaaggctggaagatccaacatctgttcttgaaaatttactgtacctgcaaatggcagacgatcctaacatgaattttggggcattctcccagtcactctgcaaccagcatgtagtttcatttcagacaagcgtagccactagcggctcaggaggcatgccaacatacctggattgttccactgggatggatgccagcgtggggatgctgaccacaccttcagtggttgtttccactggttcatctaatatgccagcagattccgggcagagcctcaaatatggagggccactggctgcggattggacacaggtcgagcttgaaattctgagagatggcatggagaaatatgttcatgaacaaggcatcatgaagtatataaagatagcagcatcgttaccgaacaagacagtaagagatgtcgcaatgaggtgccagtgggtagggaagaaagtaaatacaagacgaaggaaaccccaagaacaccatactgggagaaatacaaaagaaagaaaggataaatttgtagagcctgcgctgtggggaacaaatcatcctcttcaaacaggcatgacagcctcttcatttgtgccgcataatggccaaaacgctatgtttatatctggaggttggtaggtcacttgattacatgagtatcatgtctaattgtttgcttccatctatcttctttgtttcttgttatatgctgttaactgtctcgtgcaattatcaatatcatgatccggcatttgaattttttgcatttgagaggatatataaatactgctgccaatactagagtgactgaactacttcattttattaatgactccattgccaagtttatcgcagcctcagagatagatcgtccagtgctgcatctgctggaggaaaataataggcttcttaatcaaatcgaaacaaatattcagagatttcagcctcataacaacatcgatctcttccatcgggcaagaaggaacattaatgatcttgtacaaatcacgacccaactgcctgggctgaggaccaagatgcctccacttactgtggcaatagatgaaaatcttgctagcttcgtgcttcctggcattacaatggatcaagttcttggaagcaacgatttgaaggaggagccaagaggatggtagatccactgccagcatgtttcagtttattggtagatggatggaccatatggagaactactgcttcattttgcacaccaagtggcggtgaatagggtcaccattcaccaaggaccccctgctttctctatctgaaagcgaaaggagaggtggatgaaaccgttcagctgccctgcagctacccttagacgttggtggctacacagcgagggttttaggaactgcagtttttgtggccttgctgcacctgtaaaaaactgtgattctttctggtttccccttcagacagtagggtaaatagatgtagcggaggaagctcacaagaactagctaaatagttctctctagaagaaaaaaaatgtcgctacatagcaagaaggatcctttttgcctgtcgccatttgctgctagttcttccttcatgtgaacgtgatctaagttcctagttctctcttatccgtgctccgcctttgtatccacgaactggaaatatagatttctgagtatcctacgtgatcttggagaaaatctcgtcgagagcggagacgatgttgccgtagtgctcctgcacctggagcgcgtccttgtctctggcggcgtaatccagctgcggtcaagag

SEQ ID NO: 214474 - DNA, 2751 bp, Zea Mays
atggaggtgagagtgtgggcactgaagaggggtgcaaagtatcgcatgaagctgaagccgaaagccgagctagaagctgaagcattacacaaaatcagaagtgctggtccgagaaaccgcaatacaatttctcaagctgagactggaagtgcaaaacagagaaaaaggagttgggattttaaaaatcatgagcgtgttgctttcatggcatgaccacacgagggagctgcaacggtaccaaccaagaagggaaaggtgcagacgagggggaacctaagctagaaaccaatagtggcaattattgttcggaggccatcgccgctggtgggcggtggcttccccttcccctgtattagcagcgaggaggcagcagctgaagctctcgtctctgcctctccggacctccggtgaactccaacagagaccacctcctccatccgtcggtcatccatctgtgattccttttgcgtgtgcaagttgttaaatcggcacacggcctccgcttttggagtggagaggggcatatacggtttactggtgcgcccggggccgccgcttttcccgctggcctctccccggccgtcccattggagcgcgcaaagctgggcggcaccatttaaagaagcaaactgcactccaccattagcagcaccaaggcaccaccaccaagcgcaccgccacgccacacgatctataacgcgcaggcaggcgaggatcagaccggccggagcttgccttctccgttggggttcctgcttgccgcggcgcgagaacagatatattggatcggatttgtgccgggttcttggagcagtaggcaccaaactggtccaggttgggcaaaaatgcagtttaaccagtagctaacggagctctctcatcttgtactgtggcatttcttaagttgtctggaagctgaatctccaaggctggaagatccaacatctgttcttgaaaatttactgtacctgcaaatggcagacgatcctaacatgaattttggggcattctcccagtcactctgcaaccagcatgtagtttcatttcagacaagcgtagccactagcggctcaggaggcatgccaacatacctggattgttccactgggatggatgccagcgtggggatgctgaccacaccttcagtggttgtttccactggttcatctaatatgccagcagattccgggcagagcctcaaatatggagggccactggctgcggattggacacaggtcgagcttgaaattctgagagatggcatggagaaatatgttcatgaacaaggcatcatgaagtatataaagatagcagcatcgttaccgaacaagacagtaagagatgtcgcaatgaggtgccagtgggtagggaagaaagtaaatacaagacgaaggaaaccccaagaacaccatactgggagaaatacaaaagaaagaaaggataaatttgtagagcctgcgctgtggggaacaaatcatcctcttcaaacaggcatgacagcctcttcatttgtgccgcataatggccaaaacgctatgtttatatctggaggttggtaggtcacttgattacatgagtatcatgtctaattgtttgcttccatctatcttctttgtttcttgttatatgctgttaactgtctcgtgcaattatcaatatcatgatccggcatttgaattttttgcatttgagaggatatataaatactgctgccaatactagagtgactgaactacttcattttattaatgactccattgccaagtttatcgcaggtaggcaccccaccggagcttgatatttaatatataatcataatgcatctgtttttacttcctcagagatagatcgtccagtgctgcatctgctggaggaaaataataggcttcttaatcaaatcgaaacaaatattcagagatttcagcctcataacaacatcgatctcttccatcgggcaagaaggaacattaatgatcttgtacaaatcacgacccaactgcctgggctgaggaccaagatgcctccacttactgtggcaatagatgaaaatcttgctagcttcgtgcttcctggcattacaatggatcaagttcttggaagcaacgatttgaaggaggagccaagaggatggtagatccactgccagcatgtttcagtttattggtagatggatggaccatatggagaactactgcttcattttgcacaccaagtggcggtgaatagggtcaccattcaccaaggaccccctgctttctctatctgaaagcgaaaggagaggtggatgaaaccgttcagctgccctgcagctacccttagacgttggtggctacacagcgagggttttaggaactgcagtttttgtggccttgctgcacctgtaaaaaactgtgattctttctggtttccccttcagacagtagggtaaatagatgtagcggaggaagctcacaagaactagctaaatagttctctctagaagaaaaaaaatgtcgctacatagcaagaaggatcctttttgcctgtcgccatttgctgctagttcttccttcatgtgaacgtgatctaagttcctagttctctcttatccgtgctccgcctttgtatccacgaactggaaatatagatttctgagtatcctacgtgatcttggagaaaatctcgtcgagagcggagacgatgttgccgtagtgctcctgcacctggagcgcgtccttgtctctggcggcgtaatccagctgcggtcaagag

SEQ ID NO: 214475 - DNA, 2471 bp, Zea Mays
atggaggtgagagtgtgggcactgaagaggggtgcaaagtatcgcatgaagctgaagccgaaagccgagctagaagctgaagcattacacaaaatcagaagtgctggtccgagaaaccgcaatacaatttctcaagctgagactggaagtgcaaaacagagaaaaaggagttgggattttaaaaatcatgagcgtgttgctttcatggcatgaccacacgagggagctgcaacggtaccaaccaagaagggaaaggtgcagacgagggggaacctaagctagaaaccaatagtggcaattattgttcggaggccatcgccgctggtgggcggtggcttccccttcccctgtattagcagcgaggaggcagcagctgaagctctcgtctctgcctctccggacctccggtgaactccaacagagaccacctcctccatccgtcggtcatccatctgtgattccttttgcgtgtgcaagttgttaaatcggcacacggcctccgcttttggagtggagaggggcatatacggtttactggtgcgcccggggccgccgcttttcccgctggcctctccccggccgtcccattggagcgcgcaaagctgggcggcaccatttaaagaagcaaactgcactccaccattagcagcaccaaggcaccaccaccaagcgcaccgccacgccacacgatctataacgcgcaggcaggcgaggatcagaccggccggagcttgccttctccgttggggttcctgcttgccgcggcgcgagaacagatatattggatcggatttgtgccgggttcttggagcagtaggcaccaaactggtccaggttgggcaaaaatgcagtttaaccagtagctaacggagctctctcatcttgtactgtggcatttcttaagttgtctggaagctgaatctccaaggctggaagatccaacatctgttcttgaaaatttactgtacctgcaaatggcagacgatcctaacatgaattttggggcattctcccagtcactctgcaaccagcatgtagtttcatttcagacaagcgtagccactagcggctcaggaggcatgccaacatacctggattgttccactgggatggatgccagcgtggggatgctgaccacaccttcagtggttgtttccactggttcatctaatatgccagcagattccgggcagagcctcaaatatggagggccactggctgcggattggacacaggtcgagcttgaaattctgagagatggcatggagaaatatgttcatgaacaaggcatcatgaagtatataaagatagcagcatcgttaccgaacaagacagtaagagatgtcgcaatgaggtgccagtgggtagggaagaaagtaaatacaagacgaaggaaaccccaagaacaccatactgggagaaatacaaaagaaagaaaggataaatttgtagagcctgcgctgtggggaacaaatcatcctcttcaaacaggcatgacagcctcttcatttgtgccgcataatggccaaaacgctatgtttatatctggaggttgcctcagagatagatcgtccagtgctgcatctgctggaggaaaataataggcttcttaatcaaatcgaaacaaatattcagagatttcagcctcataacaacatcgatctcttccatcgggcaagaaggaacattaatgatcttgtacaaatcacgacccaactgcctgggctgaggaccaagatgcctccacttactgtggcaatagatgaaaatcttgctagcttcgtgcttcctggcattacaatggatcaagttcttggaagcaacgatttgaaggaggagccaagaggatggtagatccactgccagcatgtttcagtttattggtagatggatggaccatatggagaactactgcttcattttgcacaccaagtggcggtgaatagggtcaccattcaccaaggaccccctgctttctctatctgaaagcgaaaggagaggtggatgaaaccgttcagctgccctgcagctacccttagacgttggtggctacacagcgagggttttaggaactgcagtttttgtggccttgctgcacctgtaaaaaactgtgattctttctggtttccccttcagacagtagggtaaatagatgtagcggaggaagctcacaagaactagctaaatagttctctctagaagaaaaaaaatgtcgctacatagcaagaaggatcctttttgcctgtcgccatttgctgctagttcttccttcatgtgaacgtgatctaagttcctagttctctcttatccgtgctccgcctttgtatccacgaactggaaatatagatttctgagtatcctacgtgatcttggagaaaatctcgtcgagagcggagacgatgttgccgtagtgctcctgcacctggagcgcgtccttgtctctggcggcgtaatccagctgcggtcaagag

SEQ ID NO: 214476 - DNA, 4559 bp, Zea Mays
acccgacgagtaaagccatgccgctatagaatcgtactatcgtagtcgtcgccgccgccgccatcgcgccgctccggtctctggcggccaccgcatcatcttctcttgcgttgttctgtctgttacactgactttcttctgctcagcgaccgacgagttttgtcgtatcgcttcctcccccgcctctatgggtccttttggcggtgtcgagctggaattgggggtggatgtggaagcggaacagagagaggtgcaggctttggcctgcttcgctgatgcgacgccgcgggcgagtcagtgctggtgctgtggtgccgggtttgtcgatcacgtctgcaaattttgtggggaaacaccaattttgcagttgtttggtcatcggatacattcagcttgctcatcctatttgtttgcttcatcactgcttttggtggatcagatataaagaatctatatgctctgagggatgaactcgtggaatcaaagcaattccttcaagactggtttgatatagaaagtcctccatgcttgtggtcacatataacttgtgtggacaaatctgttgcagtcatagatttgtcaaatatcccactccatgttccttttccattatgcatcacggcattccaggcacttgctcgtctcaacttaagtaggtgtgatttatttggtgagattccagaagccttgggaaatttgaagcatcttcagtacctggacttgagcagtaaccagcttactgggattgtgcctttctcattatatgatttgaagatgctgaaagaaatagtgttagacagaaacagcttgtcgggacaattgatccctgccattgctaagcttcagcaactcgctaagctaaccatatctaagaacaacatttctggagaacttcctccagaggtgggcagtttgaaggacctagaggtcttggactttcaccagaacagcttcaatggatcaataccagaagcactaggcaatttgtctcagctcttctaccttgatgcaagcaagaatcaactcactggatcaatatttccaggaataagcacattgttcaacctgttgacacttgatttctcttcaaatgatttggcggggccaatacctaaggagattgctcgcatggaaaatctagagtgcttggttttggggtccaacaatttcactggaggcattccaaaagagattggtaacctaaagaagctaaaaaaactcattctctctgcatgcaacttatcaggcaccatcccttggtcaattggtggtcttaaaagcctacatgaacttgatatatcagacaacaactttaagtcagaactcccagcatctattggtgagctgggaaatttgaccgtcctgattgcaatgagagcaaagctcataggcagcataccaaaagaacttggtagctgcaagaagcttactctccttcgtctgtccttcaataggttaactggttgtatccccaaagaacttgcaggtttagaagctattgttcattttgaggtggaaggtaacaaactgtcaggtcatattgctgattggtttcaaaactggggaaatgttgtatctataagactgggagataataagttcaatggttctatacttcctgccatatgtcaagccaattctcttcagtcacttgacttgcatttaaacgatctgacagggagtatcaatgagacatttaaaaggtgtaggaaccttactcaactgaatttgcaaggcaaccatttccatggtgagataccagaatatttggctgagttaccgctcacaattctggaattgccctataacaactttactggactcttgcctgccaagttgtttaagtcatcaacaattttggagatagatctcagctataacaagctcactggctgtattcctgagagcatttgtgagctccatagcttgcagaggttgaggatgagcagtaactacttagaaggatcaatcccgccggcggtaggtgctctcaagaatttgaatgaaatctcccttgatgggaatagattatctgggaacataccacaagagctcttcaactgcagaaacttagtcaagttaaacctgagctctaataatctgaacggaagcatctcgagatccatatctcagttgacttcgctcactggcttggttttgtctcacaaccaactctctggttcgattcctgctgagatatgtgggggattcacgaatccgtctcaccctgaatcagagtatgttcaatatcatggcttacttgatctgtcatacaaccggttgattggtcgtatcccaccagaaatcaagaattgtgttattctggaggagctacacctgcaagataactttctgaatgaatctattcctgtggagcttgctgagctgaagaatcttatgaacgttgacctctcttttaatgcattagttggacctatgcttccttggtccacgccattgctcaagctgcaaggcctttttctgtctaataaccacctaactggcaatattcctgctgagataggtcgcatccttcccaacatcgtggttctaagcttgtcctgtaatgcatttgtggctaccctaccccaatctctactatgcagcaagaccctgaaccgtctggatgtcagtaacaataacctctctggtaaaatcccgttatcttgtactggctttgaaggaacattgagctcgctgatcttgttcaatgcaagcagtaaccatttctcagggagccttgatgggtctatctcaaatttcgtacatttgtcttatcttgatattcacaacaacagcctcaacgggagcttgccagcagcactgtccaatctcagtttgctctatcttgatgtctcaatgaatgatttcagtggtgccatcccctgtggtatgtgcaatctatctaacatcacgtttgtcgatttctctggtaaaaatactggcatgcatagcttcgcagattgtgcagcatcaggcatttgtgctgctgatattaccagtaccaatcatgtggaggttcatacacctcatggaatggtaataacaatgaccatttgtgccgccattctcattgtggttcttcttgtggtttttgtgaaatggatggtgttgagaaacagttccttacctcttgtatccggccttgaatccaaggccacaattgagccagcctccagtaaagagttgctaggaaaaaaatcaagggaacctctaagcatcaatctttctacatttgagcatgcactgctgagggttaccatggatgatatcctgaaagctaccaataatttcagcgaggtgcacatcataggacatggtggttttgggactgtctatgaagcagcattccctgaaggacagagggtcgccgtcaagaggcttcatggtagctgccagttccttggtgaccgtcaattccttgctgagatggagaccattggaaaggtgaagcatcataaccttgtccccctacttggctactgcgctcgtggtgacgagcgtttcctgatctatgagtacatgcatcatgggagccttgagacatggctgaggacccatgaaaatacacctgaagcaattggatggcctgaacgtctgaggatctgcctcggttctgctaatgggctcatgttcctccaccatggctttgtgccccatatcatccatcgggacatgaagtcaagcaacattctactggatgagaacatggagccgaagatctctgactttggccttgcaaggataattagtgcctatgacactcatgttagcaccaccgtctctggcacgcttggctacattcccccagaatatgcgatgattatggaatcgaccgcgaggggtgatgtctacagctttggcgtagtcatgctggaggtgctcactggacggccgcctacagggaaagaggtggaagaagggggagggaaccttgtcgactgggtgcggtggatgattgcatgcagtcgggagggtgagctgtttgatcctcgcctgcctgtttcaggcctgtggcgagagcagatggtgcgtgtgcttgccattgctctggattgcaccaccgacgagccatcgaagaggccgaccatggtggaggtagtgaagggactcaagatggtccagctgatgaagcgtgattctcacaacccccagcatcatgcggtgcagccatgatctgggcatgtactgctgcctactgtttgtcactgttggagatgagcttggagcaaactacacccctacaactattttcagcttcaaggcagcttctgaagcggacaactcggcagatgggtcgcgtgcacaagctagggcagagaagaataaggcgccaagccaaacagaaccaaaacttcgtgtatgagtatgaccgaaccctgcgcggtcgtgggcatgcagagctcccgatgtgcgtggttctcattcaagccctgttcgtttaaatatttgatgtatgtgttttatataaatgagatttattgtcattatttaaatatggacacaaaaataaagaactgaaatgaacaatatattgagatagagggagtatattcgag

SEQ ID NO: 214477 - DNA, 2978 bp, Zea Mays
ggtgtcgatcagcagggccggacgatgatggacgtggagtaccacgaggctacgggatggagtgcagcgacttcatgagagcatgtgggatgaagctggccacagcagggtatggcgtgtttggtatcgattatgagggccacggcaagtccatgggtgccaggtgctacatccacaagtttgagagcctcgtggccgactgcgacatgttcttcaagtccatctgtgacatggagggatacaggaacaagagccggtttctatacggcgagtccatgggcggagccgtggctctactgctgcacaggaaggatccgaccttctgggacggtgcagttcttgtggcgccaatgtgcaagatatcggagaaagtgaagccgcacccggtggtggtcaccctgctaactcaggtggaggagatcatccccaagtggaagatcgtccccaccaaggacgtcatcgactccgcattcaaggaccccgtcaagcgcgagaagatcaggaagaacacgctcatctaccaggacaagccccggctgaagacggcgctggagcttctcaggaccagcatggatgtggaagacagtctgtcagaggtgaggatgccgttcctcgtcctgcacggcgaggccgacgcggtgaccgaccccgaggtcagccgcgccctctacgagcgcgcggccagcgccgacaagaccatgaagctctacccggggatgtggcacggcctcaccgccggcgagcctgacgacaacgtggagctggtgttctccgacatcgtctcgtggctcgacaagcgcagtcgccactgggaacccgacgagcgggtgagaagggctccgccggagcctgagaacaagcgccgcgtcaccagcagcagcagtcaacggcccggcagcttcctctgcggactaggctgccgctgccggcaacaccagcaacagtgtagtaggatgtagatatggaaaacgcttgctttttcctcctcctttaagttgttgacaaagaactgagaaaagtcatggtctcaacaaagatcttgttccatcctaagaactgtgtttctttgttctagtatagtttctgggagcaggataggcattctccgcgtgtcaacaaagaaagaactagacccaccaaagcagggcacacttgcaaaagcaaacaaaaaaaagtgagctataccatatatatgatgctatgctctcaacaaagaattagatcatccaggtttatccccaacggttcaactggaattttttttgtatagctaatggctgagcgaactgagagagaaaaaatacaggagaaagaatagcattacagcatcaaccaaggtatttcagcgacacattcccgacgaactacatggccatagcttttgtcagtaaggagaggagggtcgaccaagcagctagaagcaggccaccaaaaatttccaagtcccgtgctcctcttccgtcctagccttgctggtttccggtggtggcagccgcggtgtcttggtcgccgaagatgcgcttgcggaagtcggtgaccatgaggggaaggccctcgcggagggggatcttcggctcccacccaaggagctccttggcacggccgatgtcgggcttgcgcttgtgtgggtcgtcctgggtgttctgacggaactcgatccgtgcgttggggtcgatggtgtcctggacaaccttggcaagctccagcatggtgaactcgccggggttgcccaggttaaatggtcctacatgctcgccttccatcagcttcatcagaccctcgacctgggagaagacccacaaatcagtacaatgaatgcaaagaataatagattcccttgtaatgaatagttcgagcatcccacttgctggctaggccactaagccaccggaaaaaaaaaatcaaatctggtactctggcagtgatgttgaatcgagtgtctcttatttttttttcaatatatgttgagtagaggtagacttgccagatcagaaacatattggaaactcctggtttgctttccatcaccataaaccgtcaagggctccttcctcagtgcctgcaaccataaccgcacgtagtaagtttttagttgtcatcttttgggttctgtaactaagataaacagcagtgtacatattatttacctgagcaacgaagttactgacaacacggccatcgtcaatgcacatgcgagggccatatgtgttgaagatacgtgcgatcctaacctggaaacaacaagaaatcaccaagatgaatctacttcatcgcagacgaaatgaaattccaaccgaccaaaccgacatttttggattgcgacttacctcaaggttggcaccacggtggtaatccatggtcaacgtttcggctgtacgcttgccctcatcgtaacagctcctgacacctgtcattcagaaatcgtacccatcagtaaaactctgcagagagcaggcaagagcttgcctactctgtaaagaagccgtcgagtatccaacggccaacaaatgctatgtaaatagctcaacaaacttcattcattgttttaggtgcaatggttggtgggcgtttggttaggcatagttggtcaagtatagttgtgttctcctattgctttattgaaaaggatttgcacctcaaagtggccctcttggagcaaattccaccaaccaacattgtccttttccaccaaaaagaaccaaaacatgcaagagacccaccaagttaagattccatagccagcatctccaagatacccttttgcatattgcttatacaagacttctttcatgcaacagtaagcttcaagtctggaccagcactgttttctgaaaagggctcattcctgcttactacagctcggattaaaaaaaaataataaagatttgacaacgtagagccttcctgtttgcaacagtacattgtccagcttgcaattccctcctccctctctttttcttggttttgttcactaaaag

SEQ ID NO: 214478 - DNA, 3093 bp, Zea Mays
ggtgtcgatcagcagggccggacgatgatggacgtggagtaccacgaggagtacgtgaggaacgcgaggggcgtgcagctcttcacctgcgtctggctgccggcgccgtcctccgcgcccaccaaagcgctcgtcttcctctgccatggctacgggatggagtgcagcgacttcatgagagcatgtgggatgaagctggccacagcagggtatggcgtgtttggtatcgattatgagggccacggcaagtccatgggtgccaggtgctacatccacaagtttgagagcctcgtggccgactgcgacatgttcttcaagtccatctgtgtagtttgaactcttctgcagacatggagggatacaggaacaagagccggtttctatacggcgagtccatgggcggagccgtggctctactgctgcacaggaaggatccgaccttctgggacggtgcagttcttgtggcgccaatgtgcaagatatcggagaaagtgaagccgcacccggtggtggtcaccctgctaactcaggtggaggagatcatccccaagtggaagatcgtccccaccaaggacgtcatcgactccgcattcaaggaccccgtcaagcgcgagaaggaagaacacgctcatctaccaggacaagccccggctgaagacggcgctggagcttctcaggaccagcatggatgtggaagacagtctgtcagaggtgaggatgccgttcctcgtcctgcacggcgaggccgacgcggtgaccgaccccgaggtcagccgcgccctctacgagcgcgcggccagcgccgacaagaccatgaagctctacccggggatgtggcacggcctcaccgccggcgagcctgacgacaacgtggagctggtgttctccgacatcgtctcgtggctcgacaagcgcagtcgccactgggaacccgacgagcgggtgagaagggctccgccggagcctgagaacaagcgccgcgtcaccagcagcagcagtcaacggcccggcagcttcctctgcggactaggctgccgctgccggcaacaccagcaacagtgtagtaggatgtagatatggaaaacgcttgctttttcctcctcctttaagttgttgacaaagaactgagaaaagtcatggtctcaacaaagatcttgttccatcctaagaactgtgtttctttgttctagtatagtttctgggagcaggataggcattctccgcgtgtcaacaaagaaagaactagacccaccaaagcagggcacacttgcaaaagcaaacaaaaaaaagtgagctataccatatatatgatgctatgctctcaacaaagaattagatcatccaggtttatccccaacggttcaactggaattttttttgtatagctaatggctgagcgaactgagagagaaaaaatacaggagaaagaatagcattacagcatcaaccaaggtatttcagcgacacattcccgacgaactacatggccatagcttttgtcagtaaggagaggagggtcgaccaagcagctagaagcaggccaccaaaaatttccaagtcccgtgctcctcttccgtcctagccttgctggtttccggtggtggcagccgcggtgtcttggtcgccgaagatgcgcttgcggaagtcggtgaccatgaggggaaggccctcgcggagggggatcttcggctcccacccaaggagctccttggcacggccgatgtcgggcttgcgcttgtgtgggtcgtcctgggtgttctgacggaactcgatccgtgcgttggggtcgatggtgtcctggacaaccttggcaagctccagcatggtgaactcgccggggttgcccaggttaaatggtcctacatgctcgccttccatcagcttcatcagaccctcgacctgggagaagacccacaaatcagtacaatgaatgcaaagaataatagattcccttgtaatgaatagttcgagcatcccacttgctggctaggccactaagccaccggaaaaaaaaaatcaaatctggtactctggcagtgatgttgaatcgagtgtctcttatttttttttcaatatatgttgagtagaggtagacttgccagatcagaaacatattggaaactcctggtttgctttccatcaccataaaccgtcaagggctccttcctcagtgcctgcaaccataaccgcacgtagtaagtttttagttgtcatcttttgggttctgtaactaagataaacagcagtgtacatattatttacctgagcaacgaagttactgacaacacggccatcgtcaatgcacatgcgagggccatatgtgttgaagatacgtgcgatcctaacctggaaacaacaagaaatcaccaagatgaatctacttcatcgcagacgaaatgaaattccaaccgaccaaaccgacatttttggattgcgacttacctcaaggttggcaccacggtggtaatccatggtcaacgtttcggctgtacgcttgccctcatcgtaacagctcctgacacctgtcattcagaaatcgtacccatcagtaaaactctgcagagagcaggcaagagcttgcctactctgtaaagaagccgtcgagtatccaacggccaacaaatgctatgtaaatagctcaacaaacttcattcattgttttaggtgcaatggttggtgggcgtttggttaggcatagttggtcaagtatagttgtgttctcctattgctttattgaaaaggatttgcacctcaaagtggccctcttggagcaaattccaccaaccaacattgtccttttccaccaaaaagaaccaaaacatgcaagagacccaccaagttaagattccatagccagcatctccaagatacccttttgcatattgcttatacaagacttctttcatgcaacagtaagcttcaagtctggaccagcactgttttctgaaaagggctcattcctgcttactacagctcggattaaaaaaaaataataaagatttgacaacgtagagccttcctgtttgcaacagtacattgtccagcttgcaattccctcctccctctctttttcttggttttgttcactaaaag

SEQ ID NO: 214479 - DNA, 3238 bp, Zea Mays
ggtgtcgatcagcagggccggacgatgatggacgtggagtaccacgaggagtacgtgaggaacgcgaggggcgtgcagctcttcacctgcgtctggctgccggcgccgtcctccgcgcccaccaaagcgctcgtcttcctctgccatggctacgggatggagtgcagcgacttcatgagagcccggccagggggggttgcttttgcttgaccactaacggaaggtacttttcataaagaggtctgctgcaagtggcaatgcaaagccacccaacagcgaattccctggtgttctttgtatcatttggcgcataaatttaaataacatgtgggatgaagctggccacagcagggtatggcgtgtttggtatcgattatgagggccacggcaagtccatgggtgccaggtgctacatccacaagtttgagagcctcgtggccgactgcgacatgttcttcaagtccatctgtgtttgaactcttctgcagacatggagggatacaggaacaagagccggtttctatacggcgagtccatgggcggagccgtggctctactgctgcacaggaaggatccgaccttctgggacggtgcagttcttgtggcgccaatgtgcaagatatcggagaaagtgaagccgcacccggtggtggtcaccctgctaactcaggtggaggagatcatccccaagtggaagatcgtccccaccaaggacgtcatcgactccgcattcaaggaccccgtcaagcgcgagaagatcaggaagaacacgctcatctaccaggacaagccccggctgaagacggcgctggagcttctcaggaccagcatggatgtggaagacagtctgtcagaggtgaggatgccgttcctcgtcctgcacggcgaggccgacgcggtgaccgaccccgaggtcagccgcgccctctacgagcgcgcggccagcgccgacaagaccatgaagctctacccggggatgtggcacggcctcaccgccggcgagcctgacgacaacgtggagctggtgttctccgacatcgtctcgtggctcgacaagcgcagtcgccactgggaacccgacgagcgggtgagaagggctccgccggagcctgagaacaagcgccgcgtcaccagcagcagcagtcaacggcccggcagcttcctctgcggactaggctgccgctgccggcaacaccagcaacagtgtagtaggatgtagatatggaaaacgcttgctttttcctcctcctttaagttgttgacaaagaactgagaaaagtcatggtctcaacaaagatcttgttccatcctaagaactgtgtttctttgttctagtatagtttctgggagcaggataggcattctccgcgtgtcaacaaagaaagaactagacccaccaaagcagggcacacttgcaaaagcaaacaaaaaaaagtgagctataccatatatatgatgctatgctctcaacaaagaattagatcatccaggtttatccccaacggttcaactggaattttttttgtatagctaatggctgagcgaactgagagagaaaaaatacaggagaaagaatagcattacagcatcaaccaaggtatttcagcgacacattcccgacgaactacatggccatagcttttgtcagtaaggagaggagggtcgaccaagcagctagaagcaggccaccaaaaatttccaagtcccgtgctcctcttccgtcctagccttgctggtttccggtggtggcagccgcggtgtcttggtcgccgaagatgcgcttgcggaagtcggtgaccatgaggggaaggccctcgcggagggggatcttcggctcccacccaaggagctccttggcacggccgatgtcgggcttgcgcttgtgtgggtcgtcctgggtgttctgacggaactcgatccgtgcgttggggtcgatggtgtcctggacaaccttggcaagctccagcatggtgaactcgccggggttgcccaggttaaatggtcctacatgctcgccttccatcagcttcatcagaccctcgacctgggagaagacccacaaatcagtacaatgaatgcaaagaataatagattcccttgtaatgaatagttcgagcatcccacttgctggctaggccactaagccaccggaaaaaaaaaatcaaatctggtactctggcagtgatgttgaatcgagtgtctcttatttttttttcaatatatgttgagtagaggtagacttgccagatcagaaacatattggaaactcctggtttgctttccatcaccataaaccgtcaagggctccttcctcagtgcctgcaaccataaccgcacgtagtaagtttttagttgtcatcttttgggttctgtaactaagataaacagcagtgtacatattatttacctgagcaacgaagttactgacaacacggccatcgtcaatgcacatgcgagggccatatgtgttgaagatacgtgcgatcctaacctggaaacaacaagaaatcaccaagatgaatctacttcatcgcagacgaaatgaaattccaaccgaccaaaccgacatttttggattgcgacttacctcaaggttggcaccacggtggtaatccatggtcaacgtttcggctgtacgcttgccctcatcgtaacagctcctgacacctgtcattcagaaatcgtacccatcagtaaaactctgcagagagcaggcaagagcttgcctactctgtaaagaagccgtcgagtatccaacggccaacaaatgctatgtaaatagctcaacaaacttcattcattgttttaggtgcaatggttggtgggcgtttggttaggcatagttggtcaagtatagttgtgttctcctattgctttattgaaaaggatttgcacctcaaagtggccctcttggagcaaattccaccaaccaacattgtccttttccaccaaaaagaaccaaaacatgcaagagacccaccaagttaagattccatagccagcatctccaagatacccttttgcatattgcttatacaagacttctttcatgcaacagtaagcttcaagtctggaccagcactgttttctgaaaagggctcattcctgcttactacagctcggattaaaaaaaaataataaagatttgacaacgtagagccttcctgtttgcaacagtacattgtccagcttgcaattccctcctccctctctttttcttggttttgttcactaaaag

SEQ ID NO: 214480 - DNA, 3073 bp, Zea Mays
ggtgtcgatcagcagggccggacgatgatggacgtggagtaccacgaggagtacgtgaggaacgcgaggggcgtgcagctcttcacctgcgtctggctgccggcgccgtcctccgcgcccaccaaagcgctcgtcttcctctgccatggctacgggatggagtgcagcgacttcatgagagcatgtgggatgaagctggccacagcagggtatggcgtgtttggtatcgattatgagggccacggcaagtccatgggtgccaggtgctacatccacaagtttgagagcctcgtggccgactgcgacatgttcttcaagtccatctgtgacatggagggatacaggaacaagagccggtttctatacggcgagtccatgggcggagccgtggctctactgctgcacaggaaggatccgaccttctgggacggtgcagttcttgtggcgccaatgtgcaagatatcggagaaagtgaagccgcacccggtggtggtcaccctgctaactcaggtggaggagatcatccccaagtggaagatcgtccccaccaaggacgtcatcgactccgcattcaaggaccccgtcaagcgcgagaaggaagaacacgctcatctaccaggacaagccccggctgaagacggcgctggagcttctcaggaccagcatggatgtggaagacagtctgtcagaggtgaggatgccgttcctcgtcctgcacggcgaggccgacgcggtgaccgaccccgaggtcagccgcgccctctacgagcgcgcggccagcgccgacaagaccatgaagctctacccggggatgtggcacggcctcaccgccggcgagcctgacgacaacgtggagctggtgttctccgacatcgtctcgtggctcgacaagcgcagtcgccactgggaacccgacgagcgggtgagaagggctccgccggagcctgagaacaagcgccgcgtcaccagcagcagcagtcaacggcccggcagcttcctctgcggactaggctgccgctgccggcaacaccagcaacagtgtagtaggatgtagatatggaaaacgcttgctttttcctcctcctttaagttgttgacaaagaactgagaaaagtcatggtctcaacaaagatcttgttccatcctaagaactgtgtttctttgttctagtatagtttctgggagcaggataggcattctccgcgtgtcaacaaagaaagaactagacccaccaaagcagggcacacttgcaaaagcaaacaaaaaaaagtgagctataccatatatatgatgctatgctctcaacaaagaattagatcatccaggtttatccccaacggttcaactggaattttttttgtatagctaatggctgagcgaactgagagagaaaaaatacaggagaaagaatagcattacagcatcaaccaaggtatttcagcgacacattcccgacgaactacatggccatagcttttgtcagtaaggagaggagggtcgaccaagcagctagaagcaggccaccaaaaatttccaagtcccgtgctcctcttccgtcctagccttgctggtttccggtggtggcagccgcggtgtcttggtcgccgaagatgcgcttgcggaagtcggtgaccatgaggggaaggccctcgcggagggggatcttcggctcccacccaaggagctccttggcacggccgatgtcgggcttgcgcttgtgtgggtcgtcctgggtgttctgacggaactcgatccgtgcgttggggtcgatggtgtcctggacaaccttggcaagctccagcatggtgaactcgccggggttgcccaggttaaatggtcctacatgctcgccttccatcagcttcatcagaccctcgacctgggagaagacccacaaatcagtacaatgaatgcaaagaataatagattcccttgtaatgaatagttcgagcatcccacttgctggctaggccactaagccaccggaaaaaaaaaatcaaatctggtactctggcagtgatgttgaatcgagtgtctcttatttttttttcaatatatgttgagtagaggtagacttgccagatcagaaacatattggaaactcctggtttgctttccatcaccataaaccgtcaagggctccttcctcagtgcctgcaaccataaccgcacgtagtaagtttttagttgtcatcttttgggttctgtaactaagataaacagcagtgtacatattatttacctgagcaacgaagttactgacaacacggccatcgtcaatgcacatgcgagggccatatgtgttgaagatacgtgcgatcctaacctggaaacaacaagaaatcaccaagatgaatctacttcatcgcagacgaaatgaaattccaaccgaccaaaccgacatttttggattgcgacttacctcaaggttggcaccacggtggtaatccatggtcaacgtttcggctgtacgcttgccctcatcgtaacagctcctgacacctgtcattcagaaatcgtacccatcagtaaaactctgcagagagcaggcaagagcttgcctactctgtaaagaagccgtcgagtatccaacggccaacaaatgctatgtaaatagctcaacaaacttcattcattgttttaggtgcaatggttggtgggcgtttggttaggcatagttggtcaagtatagttgtgttctcctattgctttattgaaaaggatttgcacctcaaagtggccctcttggagcaaattccaccaaccaacattgtccttttccaccaaaaagaaccaaaacatgcaagagacccaccaagttaagattccatagccagcatctccaagatacccttttgcatattgcttatacaagacttctttcatgcaacagtaagcttcaagtctggaccagcactgttttctgaaaagggctcattcctgcttactacagctcggattaaaaaaaaataataaagatttgacaacgtagagccttcctgtttgcaacagtacattgtccagcttgcaattccctcctccctctctttttcttggttttgttcactaaaag

SEQ ID NO: 214481 - DNA, 3095 bp, Zea Mays
ggtgtcgatcagcagggccggacgatgatggacgtggagtaccacgaggagtacgtgaggaacgcgaggggcgtgcagctcttcacctgcgtctggctgccggcgccgtcctccgcgcccaccaaagcgctcgtcttcctctgccatggctacgggatggagtgcagcgacttcatgagagcatgtgggatgaagctggccacagcagggtatggcgtgtttggtatcgattatgagggccacggcaagtccatgggtgccaggtgctacatccacaagtttgagagcctcgtggccgactgcgacatgttcttcaagtccatctgtgtttgaactcttctgcagacatggagggatacaggaacaagagccggtttctatacggcgagtccatgggcggagccgtggctctactgctgcacaggaaggatccgaccttctgggacggtgcagttcttgtggcgccaatgtgcaagatatcggagaaagtgaagccgcacccggtggtggtcaccctgctaactcaggtggaggagatcatccccaagtggaagatcgtccccaccaaggacgtcatcgactccgcattcaaggaccccgtcaagcgcgagaagatcaggaagaacacgctcatctaccaggacaagccccggctgaagacggcgctggagcttctcaggaccagcatggatgtggaagacagtctgtcagaggtgaggatgccgttcctcgtcctgcacggcgaggccgacgcggtgaccgaccccgaggtcagccgcgccctctacgagcgcgcggccagcgccgacaagaccatgaagctctacccggggatgtggcacggcctcaccgccggcgagcctgacgacaacgtggagctggtgttctccgacatcgtctcgtggctcgacaagcgcagtcgccactgggaacccgacgagcgggtgagaagggctccgccggagcctgagaacaagcgccgcgtcaccagcagcagcagtcaacggcccggcagcttcctctgcggactaggctgccgctgccggcaacaccagcaacagtgtagtaggatgtagatatggaaaacgcttgctttttcctcctcctttaagttgttgacaaagaactgagaaaagtcatggtctcaacaaagatcttgttccatcctaagaactgtgtttctttgttctagtatagtttctgggagcaggataggcattctccgcgtgtcaacaaagaaagaactagacccaccaaagcagggcacacttgcaaaagcaaacaaaaaaaagtgagctataccatatatatgatgctatgctctcaacaaagaattagatcatccaggtttatccccaacggttcaactggaattttttttgtatagctaatggctgagcgaactgagagagaaaaaatacaggagaaagaatagcattacagcatcaaccaaggtatttcagcgacacattcccgacgaactacatggccatagcttttgtcagtaaggagaggagggtcgaccaagcagctagaagcaggccaccaaaaatttccaagtcccgtgctcctcttccgtcctagccttgctggtttccggtggtggcagccgcggtgtcttggtcgccgaagatgcgcttgcggaagtcggtgaccatgaggggaaggccctcgcggagggggatcttcggctcccacccaaggagctccttggcacggccgatgtcgggcttgcgcttgtgtgggtcgtcctgggtgttctgacggaactcgatccgtgcgttggggtcgatggtgtcctggacaaccttggcaagctccagcatggtgaactcgccggggttgcccaggttaaatggtcctacatgctcgccttccatcagcttcatcagaccctcgacctgggagaagacccacaaatcagtacaatgaatgcaaagaataatagattcccttgtaatgaatagttcgagcatcccacttgctggctaggccactaagccaccggaaaaaaaaaatcaaatctggtactctggcagtgatgttgaatcgagtgtctcttatttttttttcaatatatgttgagtagaggtagacttgccagatcagaaacatattggaaactcctggtttgctttccatcaccataaaccgtcaagggctccttcctcagtgcctgcaaccataaccgcacgtagtaagtttttagttgtcatcttttgggttctgtaactaagataaacagcagtgtacatattatttacctgagcaacgaagttactgacaacacggccatcgtcaatgcacatgcgagggccatatgtgttgaagatacgtgcgatcctaacctggaaacaacaagaaatcaccaagatgaatctacttcatcgcagacgaaatgaaattccaaccgaccaaaccgacatttttggattgcgacttacctcaaggttggcaccacggtggtaatccatggtcaacgtttcggctgtacgcttgccctcatcgtaacagctcctgacacctgtcattcagaaatcgtacccatcagtaaaactctgcagagagcaggcaagagcttgcctactctgtaaagaagccgtcgagtatccaacggccaacaaatgctatgtaaatagctcaacaaacttcattcattgttttaggtgcaatggttggtgggcgtttggttaggcatagttggtcaagtatagttgtgttctcctattgctttattgaaaaggatttgcacctcaaagtggccctcttggagcaaattccaccaaccaacattgtccttttccaccaaaaagaaccaaaacatgcaagagacccaccaagttaagattccatagccagcatctccaagatacccttttgcatattgcttatacaagacttctttcatgcaacagtaagcttcaagtctggaccagcactgttttctgaaaagggctcattcctgcttactacagctcggattaaaaaaaaataataaagatttgacaacgtagagccttcctgtttgcaacagtacattgtccagcttgcaattccctcctccctctctttttcttggttttgttcactaaaag

SEQ ID NO: 214482 - DNA, 2677 bp, Zea Mays
cacccctcctactccttcctatatagcacgagctcacgaagactgacgagcacactcctctctttggacttcgcgccgccgcgcacctgatccctctcactccctcgatcactctctcgttgcgggaatggagagtagcacggctgtcgcgtctgccgccctcctcctcgccctgctcggttcgctgctgcagcagaccccagcggcgctcgcctccgtctccgggaagccgcggtcttcgtacgtcgtgtacctcggcggccacccgccgcgcgccgacggcgtgtcgctggaggtcgcgtcccggcgggccaccgactcgcactacgacctcctcggcgccgtcctaggggaccgggagaaggctcgccaggccatcttctactcgtacaccaaacacatcaatggcttcgccgctaacctcgatcccggcgcggccgccgagatcgctaggtaccccggcgtggtgtcggtgttcccgaacaggggccgcaagctacacacgacgaggtcgtggcagttcatggggctcgagagggacggcgatgtcccgcagtggtcggcctgggagaaggccaggtacggcgaggacaccatcatcggcaacctcgactcaggcgtgtggccggagtccgagagcttcgacgacggcgaaatggggcctatcccagactactggaaagggatctgccagaacgaccacgacagggcgttccaatgcaaccggaagctcatcggcgcgcgctacttcaacaagggcttcggggatgaggtgcgcgtccctctcgacgccgcgttcaagacgccgcgcgacgagaacgggcacggcacgcacacgctgtcgacggcgggcggggcggccgtgcgcggcgcgagcgcgttcgggtacgccgcaggcacggcgcggggcgggtccccgcgcgcgcgcgttgccgcctaccgcgtctgcttccgccccgtcaacggcagcgagtgcttcgacagcgacatcctcgcggcgttcgacaccgccatcgacgacggcgtgcacgtcatctcggcctccgtcggcggcgacgccactgactacctcaacgacgccgtcgccgtcggctcgctgcacgccgtcaaggcgggggtcaccgtcgtctgctccgccagcaacgagggcccggacctgggcaccgtcaccaacgtcgcgccgtggatcctcaccgtcgccgccagctccgtcgacagggagttctcggccttcgccgtgttcaaccacaccagggtcgagggcgtgagcctctcggcgaggtggctgcacgggaaaggcttctacccgctcatcaccggcgaccaagccatacatcctggcagcaagcaggaagacgcccagttgtgcttggtggggtcgctggaccccgagaagaccaggggaaagatcgtggtgtgcctgagagggaacatcccaagggtggacaagggcgctgccgtccgccacgccggtggcgccgccatgatcctcgtcaacgacgaggccaacgggaacgtcctccaggccgacccgcacgtgatcccggccgtgcacatctcctacgccgacgggctcaggctctcggcgtacatcaagaacaccaaggttccgtccgggttcgtcgtcaaggggaggacgatcttgggcacgaggccggcgccggtcatggcggctttctcatctcaggggccgaacacgatcaaccctgaaatcctcaagccagacatcacggcgccgggggtgaacgtcatcgcggcgtggagtggcgcgacgtcgcccacggacaagtcgttcgacaagcggcgagtggcgttcaacatcctctccggcacgtccatgtcgtgcccgcacgtctccggcgtcgctggcctgatcaagaccctccacccggactggagccccgccgcgatcaagtcggcgatcatgacaagcgcgacggtgctggacgcggagatgaagccgatcctgaactcgtcctacgccccggcgacgccgttcagctacggcgccggccacgtgttcccgagccgcgcgctggacccagggctcgtgtacgaccacccccatgagcctccacgacctcaattacccatcaatcactgcgcacggtcttcccgccggcacgaccacgatggtccggcgcaggctcaagaacgtcgggctgccggggacgtacacggccgccgtcgtcgagcccgaggggatgcacgtgtcggtgataccggcgatgctggtgttcagggaaaccggtgaggagaaggagttcgacgtgattttcacggtcagcgaccgcgccccggccgcgagctacgtatttggcaccattgtctggtctgatgggagccatcaggtgaggagtccgctggtagtgaagacgacgcaggggtgaagaacttgaacaatttgtctattgctggactgaactaggaatctagctagtcgagagagagaaagagatatgcagcttcgatcattatggaggataattgtggtatggattttttaagataatggaagaagtaatacctcaaacaaatctcagccaatgattttttaggcttttaaaattaatcaatcaatcaattaacctggtaaatgaaaaaaaacaaatattttcaaaccctgttccctgtgcgctgcgccccatctcccctgttccctgttcttccacggtag

SEQ ID NO: 214483 - DNA, 1907 bp, Zea Mays
gtagatccgaagtttgtcactgtcccgttcgtcgtgtcccaaagtccaaaacccaacccacaatggccgccacctcgccggccccggcgccgccgcgcatcctcctcgccggggatgcccacggccgactccaccagctcttcaagcgcgtcaaatcggtgaaccagtcaacggggccgttccacgcgctgctctgcgtggggcagtttttctcccccgagggtgctgcagagggctcaccggaggacgtcaccgactacctcgaggggcgcgcttccgtgcccatcccgacctacttcaccggcgactacggcccagccgcgccgcgattgctatcgaaggccgccgctggtgctcgcgggttcgcacccggtggcatcgagatatgccccaacgtcttctggcttaggggaagcaaccgcttcaccctccacgatatcacattgctggcacaaaaggtgtcttttactcaagggaaccatatgtcaatgattctgctgctcatgttacccgctttattggacttgctaatgttggaaacaaagagaagcagcatctgtcatgtccagtgctgatatcaatgccaagcctccaaacgccactttgtcaccatatgttggttcagcaaaatcagttcctatcgaagaagctccaaaacgtgcagcggagaacatagattcacaatattggcgttatgatgtcaagcggcaaaggcatggggaagctggtgggggtggattgtgtttcaaatttgtatcctcaggatcctgtcaaagagggagtagatgcagttataggcatgatgaagaggcagtggagcattaccagagaaatgtctgttttgattttctaaacaaaggaaaatgtgagaggggcccagaatgcaagtttgttcacagtctttctggggagactgctctaagggatgcaagacctcctagtgaaagaagacgagtggagagcagttgctggttctgcttgtcgagtccagatgtcgagtcacatcttgtcattagcatcggtgaaggttactactgcacacttgcaaaggggccacttgttccaaatcacgttctaatgattcccgtggaacactgccccagtacattgatgatgcctccggaagcagaggcagaacttgggagatataagattgctctgagtaagtactttgagaagcaaggaaaaactgcagtctactttgagtgggtttcaccacgctctcaccatgcaaacctgcaggctgttcctgtaccattgtctaaagcagacgctgttaacaagatatttcatctagcagccaaaaaactgggatttgaattctctatggtgaatccagatggtgcaaaaactgctagagaatcattgatgtctcaatgcgaaagcaaatcagggctgttttatgttgagctcccggaaggtagaattctcttgcacatggtcgacagtaacgagaagttccctgttcagtttggacgcgaggtgttagcgggactgctaagcatggcggatcgtgcagattggaggaactgcaagatttcaaaggaggaagagattaaactggtggacgatttcaaacaaggtttccgcgaatttgaccctgcagagtgaaaacaatgctctgcgcctgtgtttttgttttgcaatttgtagtctatttttgaggtctcatttgaaatggacatatatgaagcacaagaatgtagtaacgttttccaatgccgcaatttttgttttagggctagttttggaaccacatttttcaagggattttcattctcctaagcaaaattagttcattttcttttgtgaaaataggttggaaaaatggtgttttcaaactagcccttagataaacgtatgtctgatctcggcgtgagtgggcacgcctagggatgaaaacggac

SEQ ID NO: 214484 - DNA, 2105 bp, Zea Mays
tagatccgaagtttgtcactgtcccgttcgtcgtgtcccaaagtccaaaacccaacccacaatggccgccacctcgccggccccggcgccgccgcgcatcctcctcgccggggatgcccacggccgactccaccagctcttcaagcgcgtcaaatcggtgaaccagtcaacggggccgttccacgcgctgctctgcgtggggcagtttttctcccccgagggtgctgcagagggctcaccggaggacgtcaccgactacctcgaggggcgcgcttccgtgcccatcccgacctacttcaccggcgactacggcccagccgcgccgcgattgctatcgaaggccgccgctggtgctcgcgggttcgcacccggtggcatcgagatatgccccaacgtcttctggcttaggggaagcaaccgcttcaccctccacggtttgtcggtggtttatttgtcagggaggaaagggttaggagggcctggctgttacagccaggatgatgtggatgccctacgggctcttgcagaagagccagggattgacgatctgttcttgactaatgaatggccgactggagtggtcagtgggtctgacacttccaatgtgcctaatcaggttttggatcccaatgggtatgatcctattgttgctgaattggttgctgagattaaaccaagatatcacattgctggcacaaaaggtgtcttttactcaagggaaccatatgtcaatgattctgctgctcatgttacccgctttattggacttgctaatgttggaaacaaagagaagcagaaatttattcatgcgatttctcctactccagcatctgtcatgtccagtgctgatatcaatgccaagcctccaaacgccactttgtcaccatatgttggttcagcaaaatcagttcctatcgaagaagctccaaaacgtgcagcggagaacatagattcacaatattggcgttatgatgtcaagcggcaaaggcatggggaagctggtgggggtggattgtgtttcaaatttgtatcctcaggatcctgtcaaagagggagtagatgcagttataggcatgatgaagaggcagtggagcattaccagagaaatgtctgttttgattttctaaacaaaggaaaatgtgagaggggcccagaatgcaagtttgttcacagtctttctggggagactgctctaagggatgcaagacctcctagtgaaagaagacgagtggagagcagttgctggttctgcttgtcgagtccagatgtcgagtcacatcttgtcattagcatcggtgaagtacattgatgatgcctccggaagcagaggcagaacttgggagatataagattgctctgagtaagtactttgagaagcaaggaaaaactgcagtctactttgagtgggtttcaccacgctctcaccatgcaaacctgcaggctgttcctgtaccattgtctaaagcagacgctgttaacaagatatttcatctagcagccaaaaaactgggatttgaattctctatggtgaatccagatggtgcaaaaactgctagagaatcattgatgtctcaatgcgaaagcaaatcagggctgttttatgttgagctcccggaaggtagaattctcttgcacatggtcgacagtaacgagaagttccctgttcagtttggacgcgaggtgttagcgggactgctaagcatggcggatcgtgcagattggaggaactgcaagatttcaaaggaggaagagattaaactggtggacgatttcaaacaaggtttccgcgaatttgaccctgcagagtgaaaacaatgctctgcgcctgtgtttttgttttgcaatttgtagtctatttttgaggtctcatttgaaatggacatatatgaagcacaagaatgtagtaacgttttccaatgccgcaatttttgttttagggctagttttggaaccacatttttcaagggattttcattctcctaagcaaaattagttcattttcttttgtgaaaataggttggaaaaatggtgttttcaaactagcccttagataaacgtatgtctgatctcggcgtgagtgggcacgcctagggatgaaaacggac

SEQ ID NO: 214485 - DNA, 688 bp, Zea Mays
agaggctgcttggcgagtcaaaaatacatttggtcatcttccctgcttggagttggagttgagacgccgacgcggcgcccgagaagaatttgcggatggattcgctgcgcagcgtgttggagtcgattcaggcgatgcagatccgccccgtggtcgcccaaatcatcaccctagggatgatcctaacttcggcattgatcctatggaaaggattggtcgtcgtaacagggagtgagtcgccggttgtggtggttctatctggaagcatggagcctgggtttcgaaagggtgatgtcctgtttctgcacatgaataaggaccctgtccgcacaggagacatagttgttttcaatgtcgagggccgtgatattccaattgtccatcgtgtgatcaaggttcatgagcgccatgatacggtggactctgacattctcacgaaaggtgacaataatcccggggatgaccgagtcctgtacgcacatgggcagctttggctgcagcgacagcacatcattggacgggctgttggctatctgccttatgctgggtggcttacaatcgtcatgacggagaaaccagtcctcaagtatctgctaattggtgcactggggctgctggtggtagcatccaaggagtgacgttaaagatttattcacgccttgcctgcgcttgtcaccgcacttgccag

SEQ ID NO: 214486 - DNA, 1010 bp, Zea Mays
accggcccttgttggagcccgtctaagcgatctatctcgcacgcggcgaagcaatccatcatctaccgaccatggccggaggaagcatccgcgcggccgccaaggccgcagtgatcggcggctaccgctccgcagcctaaatgcggcgtgctgtcaccccatcgtcccatatttcctccgccgacgatccgaaggcttccacgttcgcggtggacgactgggtcatcaccgtccgcgaggtgttcggccccgtgcccactcatgaggaatccatggctgccacgctcgacctcaaggacgccttcgagatcacaatggaagcttctgaggctatcatgatatgtcccagaaacgaatggcccaagaaatatgttgtatatggtatgtctaagaaggaagataacaacgaaaatttagtcgtctcatccggaacttctggacgtgttgtgcaagcattcacattgctacaggagagccctgaagctcaggttgttgtggcctcacttgcttctgataagaatgtctgggatgctgtgatgaagaacgaaaaggttatcaagttctacaagacatatgagtcaaagcttagcaagtgttctagtgttgcttcaagtgtgtcggggcatgaggtggaggatggtgaggcagctagcctgcaaagcaacacttacctccctcaaagcgctggtgaatcagtcaaggattatttggagaaaatgaaggccctggtgtccgagatgatggccaatctatcaaacattatgcaagatcttgtcgcaacctctgacgagggccgtagcaagggggagatcaagaccctgacaacgagctcctgcaaagacttttcgaatgcgccctctgcctttgtgctcctggctgttgcgtcgatcatggtagttttgcttaagcgcgtttaggtcagtcaaaaataaaatagaatgaagataaaggaaacttggacacattagcatgattatttatctcttcatgggattgttttttcttgtgtg

SEQ ID NO: 214487 - DNA, 3512 bp, Zea Mays
cagccgttctcctctcagccgtcgccgtcgctctcctctcctccacactgctctcctctctcctccgagccgcagctcttctctctccctctcccctgcgcgccgccactgcgggcatctacaccgctgccgctcctctcttctccgagccgcagctcttctctctccttctcccctgcgcgccgccgctgcgtggccctacacgccaccgctacgggtgccctacgcgccgccgtcactgctccagctctcctctgtttcccagccaatgccgccgctctaactccccaaggcatcgccccgacgacggctcaacgacgccccgtcgacgcctcgcggacgccctgcgccgcagcgggcgctttacgctccatggcaaggcgcgttagatgcctcaggttccacgcgcgccttagcccctaagcgacgctaaggcggcgcttcaaggacgccttgataagcatgattgggaggtgaaaacatggattacgactttggtggcacctcacccgatccctatgggggtggaagcatccacctagtgtgtgatcattgcggtaccagtgacaactacaccactgacgacgctgatgatggccaattcacgtgccgtacatgctctgccgtgcacactacacaggcaactgctgctgatcctcatgacttccccgccactggcaacatctctgtccgtcgtgttgccacccagcccacccccaagcttggtgcccgcacacccgcgccttacctgaggacccctcaggctgctcccgtgcctgctactgccgcttttgatgacttcacagagctgagtgagccgcgggactttgtgtctggatctggcacgtgtggggagcctgaggatctggcagtgcaggtccgctggcgctatgtacggggtctccaggtgatcctgcagcggcagctggaggtgctggtggagcggcaccaggtaggcgcgtttgtgtgtgctgttgccggcattgtctgggtgcggtgggttgctgcatccagggtgtttgatggaatctgggcccgccaggtgcttgaggaccacaaggccgtggggagacagaagtgttatgatgacaagaaacctgatgagatgaagtatgaatgggatgatgatatgtcgctccaacgaaaagacaggcacaagctggagtttgcctttttgcgttcgttgaggatgatgctgccggtttactcaacattggctgtttgtttcttggcctgtcatattgcccgtgaagccatcttgccaagtgacatttacaggtgggcaatggaggggaatatcccatatgtggctgcttttactgaagtagacaggttccttgggagctctttccaagactgccctttggatgcaaggcagctgttcaggccggtgcgagttatcggagcatggcaactggaagctgcagctggatccatagcacaaagagtagccttgaggcttccttcagttaacttctatgcaattgctcaacgttgtttgaaggacttgttactgcctatagatagaatcctcccccacgcatgccaaatttatgagtgggcaatgcctgcagaattatggttgtctagtaatcctgctagagtcccaacacgggtttgtgtgatggctatcctaattgtggccctacgacttctttataacatcaacggtcaagggatatgggagaagatttgtgaggaaggaagaaacccaagtgaatctcactatgatgcaaattcatctacttccaggaagcttgaggctagtaacagtgaggagtttggcacaagagaactgttgtgtgctatttcagttgcctatgataaaatcaatacgtcacatgactactcgagtgatctccgctcttatctcaaatactgcaaggaagttgtttttgctggaattacatcttcagatgaacagactcatctaatagagatcttttgggatatgtacaaagccagggaggatgataatatagaagatcatgtaaaatcccagtcccattctatggcagacattccaattacaaatggagtgaggaaacactaccgagatggagcttttgttaaagcaagttccttttctgcatcttcaggtcatgatgcaatgcaaatgctcaagtcagagatgcaagatcatggatttcattatatgccacctaggaaaccaaggaaatcagatggttatcttcgttataggcggcggcggctaagtggtggctttatttttgttgcacatgctgattattacttgttgctacgtgcttttgcaaagcttgcagaaattgatattcgtatcatgcatattagtgtgttgaaacttgagaagagactcgcatgtattgaggagcgaattgaaagaagcttgaacaccttacataacttttctactggaacagtagatgagctaagatctgtatctgactgaagttcctagtgtagtctcatactctgctagcatggaataccccctccattccttctggaaaaaaacatgtggtgccattgcgtaactgtggttttgaagaatatacgtagcttgatacctcaggaattgagggcttctttctgtggcctcttggcattggtaagcaacctgagcacaaggacagggcaggatgtgggtctgtatttgctgaagcaatatgtaccaagaattatgccccccttctttagaacggacataattatatcagggtcctaatcagtactgtggtagattcagcaacagttccagtagtagacctcagtgcttggcagcaatggcactggggatctgcaatcatgaggcagtttcagtttgggaactggagtggcaagaggaaaaaggctggaacctgggctttttaaagaggctaatcagtactgtggtggattcagcaacagttccagtagtagacctcactgcgcggcagcaatggcactaagggatctgggttctgcaatcatgcggcagtttcagtttgggaactggagtggcaagaggaaaaagcatggaatttaggctttttaaagaaatgctatcagtattgtggtcgattcagcaacagttccagtagtggattcagcaacagttcaaggttagtacaattggtcttgtcaaagctgccgacagaactaaaaagatatccagcatagtgtaatgcatcttgatgtactgccgacatttatttcgttccagcttctgcagcaagagctgatcgtttcaaaggtgacgagaaattggtcgtactagagatgtactgtctattcgctgtatttgcaagtttaaaccaattattcgaactactgcagctgtaatccagagacaatataatatagaaaaaatagaagtcggtggttaaagccgtaacaaacatgctaacaaacatgctagtaggcttcaattgttaagggcttctttgtttcagcttttttgatgaacttttatgagaatctaactatggtgaaaatctgagtatcatgtgtattacatgcgtagaaagataaaagggtttataggatatttt

SEQ ID NO: 214488 - DNA, 3764 bp, Zea Mays
cagccgttctcctctcagccgtcgccgtcgctctcctctcctccacactgctctcctctctcctccgagccgcagctcttctctctccctctcccctgcgcgccgccactgcgggcatctacaccgctgccgctcctctcttctccgagccgcagctcttctctctccttctcccctgcgcgccgccgctgcgtggccctacacgccaccgctacgggtgccctacgcgccgccgtcactgctccagctctcctctgtttcccagccaatgccgccgctctaactccccaaggcatcgccccgacgacggctcaacgacgccccgtcgacgcctcgcggacgccctgcgccgcagcgggcgctttacgctccatggcaaggcgcgttagatgcctcaggttccacgcgcgccttagcccctaagcgacgctaaggcggcgcttcaaggacgccttgataagcatgattgggaggttatctatgcttatagcttttgctctggggttagtgttgttgaattggaatgaatatgtgtggtagtggtactgtggaccgtggaggatagctgagcatgcttttactatcttttagtttcaattttatcatatgccaaaagtgttggtttccttgttttatctttaatctttcattggcaattggaatctctgtctgtaacacccttttattcctggtaaaataactctaattttatgcttcttcatcaggtgaaaacatggattacgactttggtggcacctcacccgatccctatgggggtggaagcatccacctagtgtgtgatcattgcggtaccagtgacaactacaccactgacgacgctgatgatggccaattcacgtgccgtacatgctctgccgtgcacactacacaggcaactgctgctgatcctcatgacttccccgccactggcaacatctctgtccgtcgtgttgccacccagcccacccccaagcttggtgcccgcacacccgcgccttacctgaggacccctcaggctgctcccgtgcctgctactgccgcttttgatgacttcacagagctgagtgagccgcgggactttgtgtctggatctggcacgtgtggggagcctgaggatctggcagtgcaggtccgctggcgctatgtacggggtctccaggtgatcctgcagcggcagctggaggtgctggtggagcggcaccaggtaggcgcgtttgtgtgtgctgttgccggcattgtctgggtgcggtgggttgctgcatccagggtgtttgatggaatctgggcccgccaggtgcttgaggaccacaaggccgtggggagacagaagtgttatgatgacaagaaacctgatgagatgaagtatgaatgggatgatgatatgtcgctccaacgaaaagacaggcacaagctggagtttgcctttttgcgttcgttgaggatgatgctgccggtttactcaacattggctgtttgtttcttggcctgtcatattgcccgtgaagccatcttgccaagtgacatttacaggtgggcaatggaggggaatatcccatatgtggctgcttttactgaagtagacaggttccttgggagctctttccaagactgccctttggatgcaaggcagctgttcaggccggtgcgagttatcggagcatggcaactggaagctgcagctggatccatagcacaaagagtagccttgaggcttccttcagttaacttctatgcaattgctcaacgttgtttgaaggacttgttactgcctatagatagaatcctcccccacgcatgccaaatttatgagtgggcaatgcctgcagaattatggttgtctagtaatcctgctagagtcccaacacgggtttgtgtgatggctatcctaattgtggccctacgacttctttataacatcaacggtcaagggatatgggagaagatttgtgaggaaggaagaaacccaagtgaatctcactatgatgcaaattcatctacttccaggaagcttgaggctagtaacagtgaggagtttggcacaagagaactgttgtgtgctatttcagttgcctatgataaaatcaatacgtcacatgactactcgagtgatctccgctcttatctcaaatactgcaaggaagttgtttttgctggaattacatcttcagatgaacagactcatctaatagagatcttttgggatatgtacaaagccagggaggatgataatatagaagatcatgtaaaatcccagtcccattctatggcagacattccaattacaaatggagtgaggaaacactaccgagatggagcttttgttaaagcaagttccttttctgcatcttcaggtcatgatgcaatgcaaatgctcaagtcagagatgcaagatcatggatttcattatatgccacctaggaaaccaaggaaatcagatggttatcttcgttataggcggcggcggctaagtggtggctttatttttgttgcacatgctgattattacttgttgctacgtgcttttgcaaagcttgcagaaattgatattcgtatcatgcatattagtgtgttgaaacttgagaagagactcgcatgtattgaggagcgaattgaaagaagcttgaacaccttacataacttttctactggaacagtagatgagctaagatctgtatctgactgaagttcctagtgtagtctcatactctgctagcatggaataccccctccattccttctggaaaaaaacatgtggtgccattgcgtaactgtggttttgaagaatatacgtagcttgatacctcaggaattgagggcttctttctgtggcctcttggcattggtaagcaacctgagcacaaggacagggcaggatgtgggtctgtatttgctgaagcaatatgtaccaagaattatgccccccttctttagaacggacataattatatcagggtcctaatcagtactgtggtagattcagcaacagttccagtagtagacctcagtgcttggcagcaatggcactggggatctgcaatcatgaggcagtttcagtttgggaactggagtggcaagaggaaaaaggctggaacctgggctttttaaagaggctaatcagtactgtggtggattcagcaacagttccagtagtagacctcactgcgcggcagcaatggcactaagggatctgggttctgcaatcatgcggcagtttcagtttgggaactggagtggcaagaggaaaaagcatggaatttaggctttttaaagaaatgctatcagtattgtggtcgattcagcaacagttccagtagtggattcagcaacagttcaaggttagtacaattggtcttgtcaaagctgccgacagaactaaaaagatatccagcatagtgtaatgcatcttgatgtactgccgacatttatttcgttccagcttctgcagcaagagctgatcgtttcaaaggtgacgagaaattggtcgtactagagatgtactgtctattcgctgtatttgcaagtttaaaccaattattcgaactactgcagctgtaatccagagacaatataatatagaaaaaatagaagtcggtggttaaagccgtaacaaacatgctaacaaacatgctagtaggcttcaattgttaagggcttctttgtttcagcttttttgatgaacttttatgagaatctaactatggtgaaaatctgagtatcatgtgtattacatgcgtagaaagataaaagggtttataggatatttt
